United States Patent Application Publication US 2024/0301345 A1 - sequence listing, part 7

SEQ ID NO: 958 - DNA, 46992 bp, Unknown
  R117_24m  MAG No. k141_17032
cacggtatgacggcaatggtgccgcaggtttttcgacgcgatacacccgcaacgcaagaccagaatcgacaatctgctgaatcgcggattcatattgcgccgcccgagcgccacgagcgatgtggccaaaaataaatttataccgcaatacacacttttcctagggttgcaattcgcgtatcctacatttttcctagggttgcgattgtccaaaattacatttttcctagggttaataatgcagaatactgcacttttcccagggttagtaccctgaccttccctaatcacacggtgttgtaaaggcgtcgcggtattggccgggggtgagtccggtgcggcgcttgaagacgaacataatagaatatctcaagcatcgatgaatacggagatgatcacaatggctgattacatcggaacagtcaacaaccaatcttcaacacagcccaacggtcacaattcacatagcaacaccaccgagtcgctatggcgcggcacggattatggcaaatggttcgtagcggattcatgcacgtcgctgtcatcaagtatccaaggtttcgcaatgccactcatcgcgcagaccgtcacgggctcaccggcacaggcgacgctgctggattcaatcatgaccatgatatcgtcggtattgcggctgccaggtggcgtggtacaagataagtacgaccgcaaaaaacttatgattgcgttcggcctgattggtttcgcactgttcggcatatgcgcggccctaggatgggcgggattactcatatacccggtgctgatggtacttgcgatatgcctcggcatacgctcaggcctcctaggaaccacgagcaacacgatgctacgaggcatcgttcccgatcaattgctgcccaaggcgtcaagcctcaatgatggccgcgatgccgccctcgaactcgccggcgcaccagtaggtggcgtattgatcggcggcggtctatggctgccattcgcagtcagcgcgctgctgaatctattggaaaccgcggcggcgatgcggatcacaaaatactggcatcgtggcgggcggaccaatacggagggccgcgcccttgccgacgatgaggccgatgagaatggcgatgcggccaacatcactcaggccgctgacgagcaggcaacgaccacgacatcatccgcgtcacagtattggcgtgagatgttttccggattccgctggcttcttagcgagcgattcgaacgtcgcctgattttgtcgagcgcgctggcgttcgcgtgcttcaactcgttcctgctgattacggtgctctcgatcggctccgacccatcacatgtggtgtcagccagtttcatgaacgtttctgtgtctgtgggcgtcatcgttggctcgctcatctcttccgtgctggttcagcatgtgcgcggcggcatagtcgccgtatcgttctacgtgctgatgagcatcggcgcgctcggcgcagcgctggctccgtggattcttgcgcgtatggcgtttctggcaatttcgctgctggccctaccggccggcaatgcggtaatcaacggattccaatcattgctcatcaacaaggagcatatgggccgcgtattcgccggcatgggcatgattgagacgattgctgccccggtgatcacatttctgtccggcatcgccatgcaacactggggttactcagtcacgtccgtggctttgggcttgtgcatcgtggcggccgcgatccctgccgtgacaatgagggaactggtcacactgcctaagccggatggctgggaggaccatatccgcaaatccgggctcaccaagttctgacaacaagtaagggcgactatctcccggatttgtgacgctcggcaaccgtcagcgtcacaaatccgggaagaggaaggtggatacggtttcagccgcgcgggcagcaaggtggacaaatcgttgccgggatggaatcgcggcaagtatgcaaaagcctcccattcgcgcgcgacgcataagcgcgcaaatgggaggcttcccaaccgcagcatcatatgcagaaataaggagagtaaggcatatgctgccgcggtcacaccccgccgggaacctgccgcaggccgcgtccggcatcgaaagccttgcagtcgatgcgtgcggccggccgttcccggcgcggtggccatgtcagacgtcagtcagacgtcatcacttctgccagccgatgtcctgcggcaggttgccggcgaagccggacgggccgtagttggccagacccttcttcgcaccgaggtacgaagccgggttggagaccgggatggtgccgtacagcttgagggcttccttctcggcggcgttgacggccttggtctgctcgtcatagtcggagaggctgccagccttcttgacgagctcgtcgatcttcttgctgcccacgtaggagaagttggacgggccgtcggaggtgtacagctgcggggcggacaccacgaaggtcatggcgctcggagcctgccaagccatcggcagcacctggtagttgccggaagacacggtgtcggagaacttggactcggccacgttcacgaccttgaccttgatgccggccttcttcatcatcgcctggtaggcgttggcgagggcctgctgggtggcgttgtcaccgaagaaagtgaaggagatctcaagggtcttgccgcccttggcgtagtagccgtccttgcccatcttgtagccgtcggcctcaagggttttcttggcgttgtccacgttgtacttggcctcggcgggcaggttgttctcgtagcccttctggaacggcagcagcagctcggagcccggctgctcggccttccagttcaggccctggaactgcacgttgttgtaggtgttcacgtcgaaggcctgagtgatggccttacgcacctgcaggtcgtcaagcggcttggacttgctgttgtactccagcacgcgggtcttggtgctgtagccgatgcgcagctgggcgtccttgacggaacggatggccttgatgtcgtccttggtgttggcctccacggcgtcgatctcgccgttctggaaggcgttgagggaggcggtgtcggccatctgcttgtagacgatcttgtccagcttcggcttgttgccccaccacttctcgttcggcacgaaggtgacctgggagtcggagaaggagtcgaccttgtacggaccggcggcccactcgttgtgcgggttcttcacccagccctgggtgaaggtcttcgggtcggcggccttcgggttcaccagagcgccgaagacttcctgccacgggtagtacggggtcttgtaggtcaccttgacctgcttcgggctgtcgccctgctcaacgctggcgatacggtcgaagccgtcggtgctcggcgggttgtagtccgggttggagccgttgttggcttcccacgtggccttgaaggcggtccagtcgatgtcggagccgtcgttccacttggccttcgggttgatgtcgtactgcacgaccatcgggtccttgctcacgagcttcatgtcggtcaggaagtccgggttcaccttaatcggggagccattgacctggtcggtcatgagcaggctgggctggtaccagctccacagctcggacatgtagccggtgttgccgtcggaagacaggtagttccagttcgggccgacttcgacgatggacagggtcagcgtgccgccgtccttgacgttgtcacggctctggtggttgtcgtaacgctcggtgaccttcggcatgggcaggtcgccggtgtacgacgaatcgatgccggccggcggttcggtggcgctcgaggcattgctggaaccgttgccattgcccgcgccgcagccggcaagcagcatggcaagcgccgcagtggccgcggcgagcgcggtcagcttacgtgtcttgttcattgttatttcctcctctatatggttccgaccgtcatgcgaaatggcatgcaacctgatggccgctcggtcgggaagtgtcatacggccgcagcgccgggcgttcgccgcggcagcgggcctgttgttcggcgctcagcttgggcatgagcgggcagcggcccatgaacgggcagccttcgaacgtctcggtggggctgggcacctcgccctgcagcacgatgcgctggcgggtgcgttccgccttcgggtccggcaccggcacggcgctgatgagcgcctgggtgtacgggtgcaacgggtgctcgaacacgtcttcggtgtcgccggattccacgatgcggcccaggtacatcaccgccacgcggctggagatatggcgcaccaccgacaggttatgggccacgaacaggtaggccacgcccagcttgttctgcaggtcctcaagcaggttgatcacgccggcctggatggacacgtccagtgcggagaccggctcgtcgagcagcacgagcttcgggttgaccgacagcgcacgcgcgatggcgatgcgctggcgctgaccgccggagaactgcgtggggaagcggtccacctggtcggggttcagctccaccagacgcatgagttcaccgatgcgttcgcggatctgctctttggagtagtgctggaccttcatcggctcggccaggatgtcgtagatcggcaggcgcgggtcgagcgaactcatcgggtcctggaagacatactgcacggccgaacgcagctcgcggcgcttctcgcgcggaatcttgtgttcgagcttggtgccgaacatctcgatctcgccgtcctgcggctgcttgaactccatgatctccatgagcgtggtggacttgcccgagccggactcgcccacgagcgccacggtctcgccttcgcgcacgtccagcgtcacgtcgtccacggccttgacctcgccgatcttacggcgcaggaatccgccggcggtcagcgggaaggtcttgcgcatgtgcttgacgtcgagcaccatcttgcgttcgtcgcgcgggatgccggcgaacttcgacttggcggcctcggccaccgtgtacacgtcgtggaaggtcaggcccttgtccacgatctcctgggtgcggtggcaggccacgaactggcccgggcggcccggcaccggctccatggccggctcggtggtgtggcatatgtcggtggccagcgggcagcgcggcgcgaacgggcagcccttgggcatgttgaccaggttcatcggggagccaggaatcggcaccaggcggctgttgcgttcgcggtcggaacgcggcacggcacccagcaggcccatggtgtacggcatggccgggtggtcgaagatggagtcgacgtccgccttctcgaccgggcggccggcgtacatgacgacgatgtcgtcggccacgccggcgatcacgcccagatcgtgggtgatgaagatgacggccgcgccggtttcacgctgggccttgcgcagcacttcgagcacctgggcctggatcgtcacgtccagtgcggtggtcggttcgtcggcgatgatcacgtccgggtcgttggcaatggccatggcgatcatcacgcgctggcgcatgccgccggagaactcgtgcgggaaggacttcaggcggtcctccgggtccgggatgccgaccaggttcatgagctcgatggagcggtcgtgaatctgctgttcggtcatcttcggattgtgggtgaccagcgcttccttgatctggtcgccgatggagaacaccggggtcagagcggagagcgggtcctggaagaccatggcgatgcccttgccacggatctcgctcatctcaagatcggacttgctgagcaattcctcgccgtggtaggtgatggagcccttgacgctggcgttcttgtccagcaggcccatgatggccatggaggtcacggacttgccggagccggactcgcccacgatgccgagggtcttgccggggtacaggtcgaagttcatgccgcgcaccgcgtgcacggtgccggcttcggaggcgaagctgacggtgaggtcgcgtactgaaatcaccggttcggatgccatgccttgcgctcctgtggtgttggggttggtgttggttgttacgttgcttgcgttgcgttcgtcgctcatgatgcccgtctcccctctcactcggccttgccgccagaacgggagtacgggtcgatggcgtcacgcagtccgtcgccgatcagctgcacggagaaggtcaggacgaccagcaccacggacgggaagatcagcacccatggcgaggtctgcaccacggactggccggcgttgagcagcgtaccgagcgaggtgtcgggcgccttgatgcccaggcccaggaagctcagcgaggtttcgctgttgaccgcaccgatcacgccgagcacggtgttgatgaccagcaccgaacccaggttcggcaccagatgacgcacgatgatggtgaaggacggcacacccatgaacttcgccgcgcggatgtattcgcgatcgcgcaggctcagggtcagcgtgcgcagcgtacgggcgtagccgatccaaccgaatgcggtcaggccgatggccagccacagccagtcgctgccgccggccgccatgccgacgatcagggcgatgagcaggaaggacggcacgacgagcagcatatccagcagccacatgcccacgcgctcgaaccagccttcgaagaacgccacggccgtgcccaccagggcggcgatgatcgtggtgccgaacgagctgaagataccgatggtcaacgaacggccgaggccgcggatgatcatcgcgtacatatccgagccaccgaccgtggtacccagccagtgctgggcggacggcggcgaggcgagggcggcgaaatcgggctcatcgtagctccactgggagaatttcgagccgaaaatcgccaaaagaatcagcagaatcagcaccaccagacccaccacggccgaggggcggcgcatgaagcggcgcacgtacagctgcatgcggccggtgcggtggaagtcgtcggcgctggaagcctcctgggcgttcctggcgtcggcggactgcggttcgctgccctgcggatcggtgagttccatatcctgggcggcggcgtcggagaccatgttttcgttgtcgttcatcatgttagatcgtcctttgcgcggggctcagctcagtcggatacgcgggtcaagccaggcggagaagatatccgccagcagcgcgccggacagcgtgcacacgccaccgaacgcggccacggccacggcaccgttgatgtcgttgttggcgatggtctgggtgaagtacatgcccaggccgttgatggcgaacacgttttcggtgatcacggcgccggtgaacacgccggcgatggagaaggccacatccacggcggtcggaatcagcgaggtgcgcagtgcgtggcggcgaatggccgcgttgagcgtcaggcccttggcgcgggcggtgcgtacgtagtcggcgttcatggtgtcgagcagatacgtacgctgggtgagatggtagcccaccatgcccggaatcgtcatcacgatggtgggcaggatcaggtgctgcagatagtcaaacacccaaagcaccgggttggagccttggtaggagtgcaggccggtcacgtagaacgcgcggctgcccacgatgttgttgaagttgatggccagcagcaccaccatcaggcccatgacggcggccgggaccaccaggaagaacgttgcggtggtgttgagcacgcggtcctgccacttgtactggcggatggccgtgtacacgccgatgctcacgccgaagaggatggagagcacggtggcgagcgtcaccagctgcagcgaagcggagatacgggaggcgatggccggcgccaccggcgactggtccgggctcaggccccagttccactgggtgaggatgcccttgagccagcggaaatagcggatgacgaccggcgtctggtcgttgatgttggccagatcgagcgaccggttaatcgacgcgatcggcggatgcggattgcgcgacatgtagttcgaacgcggatccatgaatgcgctggccaggaaatacgtcatcgatactgccacgaacagcatgatcacgtagttcacaatgcgcttgatgatgtacttgaacacccaaccacctcccagataactgggaaagtgatacccccccccgctcaaaaccacaaattgagtccaatatatggaatatgggtattgacttttccgactttttcctgtacagaaaactgcgaaaacacttactgtgtattgggcaaacatccgtttgttaattttgtatttcctgagcctttgctggacatgccttatactttcgtgtcagcagtccgccggcccggatggtgacagtccccgccgccggcaacggattatccatcagcatcatcagcatcagacaggggcatcatgacgacagacgccagcgcacgggccatcaaacccgaacttctgcgtacgtacaccgaggatttcaacaaggaccgcgccaacctgatcgcggcggacgcggcggtttcggccggcgtgctcaaggcggccaccgactatcgcggcgtgcgtgcgctgccgcgcgacttctccatcgaacttaagcaaggttcgatcaccaatcaggagcgttccggccgctgctggatgttcgcctccctgaacacgctgcgttacgaactcatgcatcgctggaatcttgaggatttcgagttctccgagacctacctgttcttctgggacgcgatggagaagtcgaacacctacctggagaatgtgctgcgcacgctcgacgagcccaccgactcgcgcctgttcgaggccatcaactggggcccgtccgatgacggcggctggtggcagatgttcgccgcgctggtgaacaagtacggtctggtgcccaagagcgcctacccggagtccgagaactcccgtaattccgatgatttcaagcagtacctcaactccaagctgcgcgagttcgcagccgagctgcgccgccgttcggctgcgggcgctggcgaggacgagctgcgcgcgctgaaggacgagtacatgggcaccgtgtaccgcatctgcgccgtgtcgcttggcgagccgccggagaagttcgacttcttcgcgcgcaccaaggatgatgatgaggataagaagggcgaggcttgcaagtgcaaggccgaggtcgacgcagacggcaagaccgaatcctgcaagtgcggcgactcctgcaaatgcgagggcaaatccgacgccaaggcctgcaagtgcgataagaacaagtccgacaagccgaaaaccggtaaggacgagcgcccgcagattcgcgagatcggcatcaccccgcttgagttctacaagaagtacgtgccggtggacgtcaacgatttcgctacgctggccaacgccccgctcaagaaccgtccgttcaaccggcgctaccgcatccgcttcagcgcgaacgtggccgaggcgggcgatatggagttcgtcaacgtaccgctggacgtgttcaagaaggccgcgcttgaccagctcaccgccggccatccgatctggttcgcctgcgactgcacgcagttcgccctgcgcaaggacggcttcttcgaccagtccgtggtgcgcgtcgaccagctgttcggcaccgagttcaccggcgacaaggcccacggccttgaatacggcgacagcccgagcaaccacgccatgactttcaccggcgtgaacctcggcgaggacggcaagccgaaccgctggaaggtggagaacagctggggcaaggacgccggcaaggacggctactacgtcatgtccgacgcctggttcgaccgctacgtcaccgagctcatcatccgcaaggaatacctcgacgacgccacccgcgccctgctcaccgccgaaccggtcgagctcgacccttggcagcccctcacccgccgctgccgctgacgttccgctggcgggagcatatattcgaatgccccttctctctgttcagagagaaggggcattacgttatgcgagtacgcccggccgcacctattcgagactatcgcggctgagctgagcaaaagtgccgtcatcatcggccaattgccggtaggttccggcctcgctaattgttccgaactagttatccacagagttatccacatctcacgcaagctagagccacataccccggttttcatagcgagcatgtgaccgctgcgctacggtggcgtcatgaacgacatattgcccactccaccgcccggcgtattcgacgacgaaccgtccggctggacccggccccacacaccgggcgttgcgtctgcgcgcaccatcaatcctgagctacgttcatcaccacgtatggcgagttccgcgccaactgtgattacaggtcctgtgtcgccagcaatgagcgaaaccctcacccaacgtaagcgggaaatgcttaaacgatgcacggacgccgcgcaacagctcgggcaaccggtgctcttcggcatggccacatcgctgatactccaatccgtgccgcttcccaaggattgcgatatcgaccccgccgagctccataccgtctccgactcacaccgcacacgaatacgtgccatcgtgccgccaacgacaccacacatctggaagccgctgagcgatgcgcacaatgtgcgtatcaacaaacatgtgtacgcactggatctgatacacacttgggcacaactcgccgctcatatatcgctcgaatcgctggtcatacttggcgacgcaatccttacggcaatcgcccgcaagccgggtctggcgaacggccgcactgctgacggcatttatcaggacttcgtgcggcaagtcactggactcccgaaattcaacgcaaaatccaagtgcatgatcgctcttgcattcattacgccccgcgtggactctccgatggaatcaaagacccgcatcgcgacgacgaaatacgggcttccgccagccgtgacaaattacacggtgcccggcgcgacattcagcaacggcgcgccgataacgctcgatctcgcttggcccgaatttcgcgtcgccatcgaatatgacggcgatcatcatcgcaccgacaaaaaccagtggcggcgggacaacgacaagcgcgaactgctgcgacatcatcattggatcgtcatcatcgccactgccgcgaacatggccgatgagccatcccaagccgaactcgcctaccgggtcgggcggcagttggcattgcgaggtgccgtattcgatttcactttgacggcaacgccactcgatgagatcgcccggcggaggcgacgaagaatataacgtttatcgcgaaagtcgtacagtatccatgttgcgccgacgctgcgcgactcggtgtccgtgtccgatgtcccggtagcgatgtcaatcgatttatgtgtggaccgggccagatttcgctgtcccggttctccatttcgcccctttttgagcaaccaagacaaaatttcattcacctatcaccccaccgtgcaatattcgccatcgtacatcggcggaattccggggttttgggattacggataatgggcgtttacaaggggggctgtcccggttcccgaaaagaagccgaaatcacgaaccgggacagcgaaatctgtcccggtaatcgcgtcaatcggttgccgtcatcaccggaacatcaactgcgcataggtcgaacgcttcaatgcgcaacaggcatgcgaccatatcgcgatagcgatattccgacggaagtatgggactcaccacgcgaccaatattatttgccgagctttggagcctcgtggttggcgtggcggatcacggcatcggggaaaccggcgtggatgtagtcggacagcatccgcaatagcctctcgtcaaaggtgtgccgctcatcgctgctggcatcgaccaggatgaaatcccatgagtattcggtgtcaccgtcgttgatgatgagtccgcggccagtgatttttgcggccagcaacgcggcgatctgtatggcgcctcgcttgaccaaggccgattccgcttgagtcaggttgcccgaaaatgtgacggtatacatcatcagtccccccttctttgttattttctagaacagcaatgccttattgtaaacagacagcactctgccataatccttttttcaatatgcggcccatggcattcccagcattaaaaaaaaaagaaacccggcggagggggccgccgggtgagagagaagagagaagaagggttcagttatggggttcgaagaacctcgccaccggtatgaacttcattccgttgacatcttctatataaccgccccatgcttggcgaattgatgtgcttgtctgggaaaagtcttggcggagtgtgacgaatttgtgacgcccgccgacaaccggcctcgcattgtcggggcttgaccgcacatacggcaacgggccacctcgcaacacttcatgtgcgaggtggcccgtcagctacgagctagcaatgccgaatcactcggcggcgagtttggccttctcggcggccagacgctcggcttcggcggcacggcgagcagccagcgcttcatcgaagcgagccagctcctcttccacggcctcggtcggaatcttggcgaagatcggtgcgggcttaggcaccacggcgccgacctcgatcgcctcgctcttccacgggtgcacgttcacaccgagctcgtaatcgccggtgatgatcgggtacgtgaagccgggcttgtcgagatcctcgacttccttgagctcaggcagcggcgagaaggtgccggtgccgccgagcgcctcccacaccctctgtgcggagtgcggcaggaacggcgcgagcaggtggttcgcgtcagacacggcctgggcggccacgtgcagcacggtgccgagacgagcctggtcgtccttaatcttccatggttcggtggcggaaatgtacttgttgatgtcgccgaccacacgcatcgcctcggacagggcgtgcttctggtggtgggtttcgatggaggagccgaccacgtcgaacgcggcggaagcctcttccagaaggccacggtcttcgttggtcatcgaatcctcgtccagcggcggaatctcgccgaagttcttgttgatgaggttggccacgcggttcaccaggttgccccacgaggaggcgagctcctcgttgttgtggcgcacgaactcggcccaggtgaagtcggaatcagaggattcggggccggccacggaaatgtagtagcgcacggcgtccacggggtagcgggcgaggatgtccttgacgtagatcacgatgccgcgggaggagctgaacttcttgccttccatggtcatgaactcgctggccaccacctgctcaggcaggttgagcggacccatcgggccggtttcgccgcccttggagcccttgccgttgtacgccagcatttcggacggccagatctgggagtggaaggtgatgttgtcctttcccatgaagtagtaggccgggcagctcggatcgttccaccattcacgccacttctccgggtcgccctggcggcgggcccattcgatggaggccgacaggtagccgatcacggcgtcgaaccacacgtacagcttcttgttcgggttgtcgatccagcccttcaccggcaccgggataccccagtcgatgtcacgggtgatggcgcgcggcttgacctccttgaacaggcccagcgagaagttgatgacgttggtgcgccagcccttgcgggtctccagccatgccttgttggcttcggcgagcgccggcaggtcgaggaagtagtgctcggtctgctcgaagcgcggggtttcgccgttaatcttggagacggggttgatgagctcgtccgggtcgagctcgttgccgcaggcgtcgcactggtcgccacgcgcaccttcggcgtggcaaatcgggcactcgccctcgatgtagcggtcgggcagggtacggccggtggacgggctaatcgccacctgctgggtgcccttgtagatgtagccgttctccaagcactgcttgaacatctcctgcaccacgtgctcgtggttaccggtggtggtgcgggtgaacaggtcgtagctcaggccgaggtcgcacagatccttggcgatcacgcggttgtaacggttggccagttcctgggcagtgagaccttccttctccgcctcgacgagaatcggggtgccgtgctcgtcggtgccggacaccatgagcacgtcattgcccttcatgcgctcgtagcgcgcgtagacgtcggagggcacaccaaatcctgcaacgtgaccgatatgacgggggccgtttgcatacggccaagcaacattcaccaaaacatgactcataaggcttgattatccggcgcggcggggacacgcccggatagctgccgcgccgccatcctcatcccactcacctatccacccgtaacttcccccacatacttatccgtacaccgcttgcgcgcttatccgcatacgcattcgcacacgtatccgtacgtgcatccgtacacacgtccacgcacccatccgtacgcacgtccacgcacatccgcacacacttccgcctgtcgatatccaccgagttatccacatcattcgcgcacctagtgaagttatgcacttatccaccgttttcgcttatccggtggcgcgcaagccgtacttctgcatattgttcgatcatggatatcacagcaggtccgatgacggacatcacaacagtcacctcgccggcaaccgcgcagcccgcggtgccgccgatactgtttaccaagaatctgccgggaccgctcagccttaaccgtctggccgccttcggcgcgttacgtaagctcgacgattccgccggctactggatcgagcattcgggcacactgtatggtcgcgcaaaaatcgtcgcggaggtcgccccgtttggcactgtggtgtgttcgatgaccgccgcttgggtatggctgggaggccccgactttccgagcaccatagacgtgatctccacatcgcacttccgctcggcatccgtcagccgccgcatccgcgtattcaaaagattgacgttgccggagcaaatcatcaagctcggcgggctgcctgtcaccacgccagcccgtacggcttgcgacctggtgatgagtcctgaagacatccccgatccttccaccatcaacgcgctggtgtgccaactgatgtccgcgtaccagtttcggccaaacgactgtctgcaaatcgtcaaggagcatcggcatcacaagtatgccggacgcgcacgcatgttttttgaatcggtgcagaaggagattgacgaaccggctttggagcaatgcgcatgacgaggggattcatcgccaaaggacatcgtagaggccgctatgccgctcaccgtttacggcatttgcggcaggcgcaacggttgcctcgccacgcggcggcggcacactcatccgaatccgcatcgcgcgcaatctcggatatgaccgcgccgcctgaaccacccatcagacttacgcccgcggtggcatgttcgcccgatacggatgttgccgtgctctggcacatcgcatatcacgtgcccgaactgcgtaaatggctggttgccaatcccaaagccgacgcgcctttgctggaattggtctcgcagcgtggtgggcctggggtccggcaggcgttggaaatattgttcgagtcgatggaagcgtaacggggagataatcgccggctgctgcgctatcccttgattttcagcacagccgcatacacctgcttgcgattggccaacgatccgtcagccagtggatgctcctgcaccacttgcgcgatggcgtccttgatacgcaggccttcctccaaagcacggtcgatggccagcacggccatgtcatccacgctcaacgtactgggcgcggccgcttcggcctcctcgttggacgcgccgccgatgaccagcaccatctcgccacggggcggatcatcaatcacactttggcgaatctcgccaatcgggccgcgacgaatctgctcataatccttggtgagttcgcggcacagggccatcgggcgattcgggccgaacgcgtccagcagatcgtccatcgaatcggcaatgcgatgaggcgtctcgtagaacacgatggtgcggcgttcgggcaacagcgtgcgcagatactgcacgcgctcggaatgctttcgcggtaggaagccctcgtagcagaagcggtcggtgggcaggccggagagggcgagcgcgtcgagcacagcggaggggccgggcgcgcaggtgacgggcaggccgcgttcgatggcacggcgcacgatggccaagccggggtcgttgatggtgggcatgccggcatcggacacgacgagcacggtggcgccggtttcgacctggtcgagcaggccgtcggccttgtcgcgctcgttgtggtcgtgataggcgatgacgcgaccgttcacatagacgccgaggcgacgggcgagatcgtagaggcggcgcgtgtcttcggcggccacgatatcggcccgctccaagagggccaccagacgggcggaggcgtcgccaacgttgccgatcggggttgcggcgagcaccacggtgccggcggggacggtcacggccgattcgcgggattgggtggcggcggattcgccggcatgaacttcatcattgcgttcaggcacttgcgtcacgctaccgtcagcgtcatactgctcattcaactcatctgcgcttgtcatactcccagtattgcccataccacagagcaatccacgacaatccatggcggaatcgaggcattctccctttgcaggggctgatttcacatgttccggaagtctacttccgtttcaaggggctcctcatccggtgaagcaccagtacaaacggctttgacgcaacgctattccgccattttggcggcgtatctacttgaccatcagcccctcgaaacgcaagtagacctccggcaaaccccaaatcagccccttgaaacgcgagatggcagaatttcaacgaagacaaataaaaagaccctctgcggtggaatgaatgcagagggtctcgtggagctgacggtagtcgaaaccgcgacctcttcgatgcgaacgaagcgctctaccaactgagctacagccccttggatgttactttgctccgcaaagcaactcgcaacaatatagtacggagtgcggtcaaacgcaatttgacgccgaagtgtcgcagacggggtaaatcacccacaccgctccgcatggataccgcggtggcacccggcaacgtcatcatgcttccagcacatgcagcactttcttttcgttgtagaacgcgaatacgatgccgcccaagccgcacagcacggccgcgcacacggcggcgatgcgatagcccgcgccggacgccatgccgatggtggagacgccggtgaacagcagcatggccacggactgccccatcttcatcgcaaaggtgcgggccgcgtagaacatgccctgacggtcctggccggtggtcttggagctggcgtcggcgatattcgccacgatggcttgcggcagaatgccgaacgcggccatcggaatcgcgccgaccaccgagagcgccaaaccctgggccatcgccggaatgaagccgagcgcggccgaaccaagggcgccggcaaatgcgaacgcacaggtgaagatcacgaaggcaaccagcagcaggcgcttcttgccgaccttattggccaagatattgaccggcagatagaacagcacggagacgccggtcatgagcacgaagtagatggtcgtggtggtttccggcagcttgagcaggctggtcacgaagaacggcagaccggtctggaaggtggtgatggccacccagtagaccacgtcggaacacacgaacttgcggaattcgccgtcgccgaacgtctgcttcagggattcgatggccgattcggaggtgggctgggagttgacgtagtccttctcgcggatggccagcggcggcaccagcatgcacacgaacgccacggcggccatgatggtgaaggtcacgcggatggcggtgatacgccccatcatcggcacgaacgcgccccaaatcaccggcgccacgtacgcgatggccgtgccggccacccaagtgaaggagatggcggtggagatggtgagttgctgcttggagtcgtggccgagttcggcgatgagcgcgttgtacggcgtgcagtagaacgtgaggacgatgtagtagccgatcacggtgacgaacaggaacgccgcgttcacccagccggtgccgttgatcggactccagaacacgagtacggtgaccaccgcgagcggcagggcggcgaatttcaggaacggcatacggcggccggatttggcgtcgcaacggtcggagagggacgccacggccgggtccacgaacgcgtcgaagaatcgggcgaaggcggtgatgccgcccaccacggtcacgatgccgagaacgaccaggccctgcggcacgaatacggtctgaccttgggagatggtctcctggtcaggttggtagaaatacacgagccagttggagatgatgccggaaagcagcgcccacccgaactggccgaccgcaaacgcccacactttggcgatggggagatctttgatggctgatttcgccggtgcaacttgcgcgcccgttacacttgctgtagtcgtattgcccattccccataacctccgaatcaacattgacacagtgtcaaaaaccagtatacaccggggttttacactcaattccctgcagggcaaaaccgcacaccacaatccacaccccgagccgccttcccctcagccatccgcaggctctacgatgagagccatgactggtctggccgaacgactaccgcacgtcgccgctttccccgaagcgctgggcaccgggttgctgctgcataccgatgtcgcgctggacgacgggctcagtaactgcatcgatatgttcatcagcacctatgaagccgcattgtcccggttcaaggatgattcgacggtcggccggatgcgcacggccacgcatggcggcacgttcgattttcctgactgggcattgggtttatttggcctgtacgaccagctgtttgcgtcgactaatgggaccatcgacccatgcgtgggcgaggatttgattcggcttggctatgacgagtcgtattcgtttacgcctgcgccagatgccgctgaacatgcaggcgcgatccacggacgagccatttggtcagccgacgttgagcggcatggcacaacactggtgacgcgcggaccggtcgcgctcgatttcggcgcgtgcggtaaggggtatttggtggatttgcttgcggggatgttgggtgatggcgcgggtcaccctcaacccattcaatacgtcatcgacgccgggggtgatttgctagtgcacacggacgaaccaatcaccatcgcccttgaagatcctgccgatccggccaacgccgtaggtacggtcgaaatcagccacggcgcattctgcgcgagctcccccagccgccgccactggtctgacgccgcaggtcaccaacttcaccatctgctcaacgccatcgacggactaccggttgacgatgtagccgccacatgggtggccgtcacgccgccatcgagcgccataaccacgaagacatcgacgcatggcagcaatgcctcgacaacggcaaaccgcgataccgacgattcgtcgaacaccgttgcggcacacgtccctgtcacactggccgacggcctcgccaccgccctgttcaccaccccggccacccagctgcgcgctcacttccccttcgaatgcgccattctcaacgccaaccgcaccgccgcccaatcccccaattttcccggcggctttttcacacactaatgcacgaaatcatcagtatcacatccctcgggtggaccgatgggttgctcccctcagtcagctacgctgacagctcccctcggagaggggagccgagtatagctaatccgctaatccgctaacgcaggaaacaatccgtcagtcagcgagtgcgaactggctgttgtacaggtcggcgtagaagccgcccgccgccagcagctcgtcgtgcgtgccgcgctcgatcacgtcgccgtggttcatgacgagaatcatgtcggcgtcgcgaatcgtggagaggcggtgcgcgatcacaaagctcgtacgccccacggtcagcgcgtccatggccttctggatcagctcttcggtgcgggtatcgaccgaggaggtggcctcgtcgagaatcagaatcggcgcgtcctgcaccatcgcacgggcgatggtcagcagctgcttctggccctgggagagcgacgacttgtcgtcgagcacggtgtcatagccgtccggcagcgagcggatgaagtggtcgaggcccacggccttgcacgcatcctcgatctgcttgttggtcacgccgggcttggagtaggcgatgttctcgcgcacagtgccgcggaacacccacgtatcctgcagcaccatggagaactggtcgtgcacgttccagcgcggcacggacttggtgtccacgccgtcaatcgcaatcgagccgccggaaatctcatagaagcgcatgagcaggttgaccatggtggtcttgccggcaccggtcgggccgacgatggcgaccttctgcccggccttgacggaggcggagaagtcgtggatgatcggcttgcccggttcgtaaccgaactgtacgtggctgaattccacgtcgcccttcacttcgtggccgttggtcccaagcaaagcggacttgccggattcgtcctccatctccggctcctcaaggaagccgaacacgcgttcggcggccgccgcgcaacgctgcaggttctggaaggcctgggcgaactgcgccaacggctgggtgaacaggcggacatacatcatgaacgccacgatcacgccgaactcgatctgcccgtcgagcgcgagcgccgcgcccaccacgcacaccaccacgtagccgaagttgcccacgaaattcatgagcggcatcatcaggccggagaggaactgcgacttccagccggactcgtagaggtccgagttgtacttctcgaagcgacgaatcgaatcggcctcgccgttgtatgccttgacgatgaggtgaccggcgtacatctcctccacgtggccgttgacgtcacccagcgccatctgctgccgggcgaagtacttctgggaggacttcatgatggccatcatgatgatcaggccgatgaggctggcaccgatggcgcacagggtcatgatcacgttgttgtagaacatcatcaccagcgcgcccacgaacagcgtcaccgaggtaatcagcgagccgagcgactggcccagcgtctggccgatggcgtccacatcgttggtgatgcgcgacagcacgtcgccgtagctaaccttgtcgaagtatttgagcggcagtttgttgattttgaccgagatggactcgcgcagtcgctgggcggtgcgctgggtgacgttggccatcatccagctttgcacgtagccgagcacggcgtagcccacgtacagggccaccaaagcccaggcgatgtggcccaccgtgccgaaatctaccgagttcatcaccggtctgccgttaacgatggcgggcagacctttgacgatctcgttggtcatgtccttgagcttgtccgggccgacgatctggcagacggtgccggccgcgcccaggatgagcgcgatgatgatgacgggaagatagttgcggcagtagttcacgagtttgcccatgactttgccgaaatcatggggcttttcgacggcacgcctgccgcccattggtcctcttggcatttgttttactccttaaaagtccgtattgacctccctctgatgagggaggtggcgcgaagcgtcggagggagagaagccgtacgcgactacccctcagtcagctgtgctgttttattcgctcgcttatcagctcgtcttcgcctgggaacagcccactgggctgttccctttacggctcagcccctgacatggggagctaccgctgccgcccccctacgccgtaagctccgactggctgagctgggattcggcgatctggcggtatacgtcgcagttgtcgagcagttccttgtgcgtgccctgacccacgaccttgccgtcgtcgagcacgacgatgcggtcggcgttcatgatggtgccgatgcgctgggccacgatgagcttggtggaatccttggcctcgcgggcgagcgcgtcgcgcacttcgcggtcggtcttgaagtcgagcgcggagaacgagtcgtcgaaaatcaggatttccgggtgacggtacaccgcgcgcgcaatcgacaggcgctgcttctggccgccggacacgttcgatccgccttgggcgatcgcggcggaatacccgccgttcatgcgcgccacgaactcgctggcctgcgccacgtcggcggcggccttgacgcgattcagctgctcggccggtatatcggcaccttccgcggcctcgccagcggcgatcaacgcggcctcgcgcttgcgcccggccggggtggaggtatcggccatctcgacctccgccgggtcgcccggctgatcgccgtagctcacgttggaggccacggtgcccttgaacagcacggactgctgcggcacgtagccgatcttgtcgcgcagggccttcaggtcgtagtcgcgcacgtccacgccgtcgaccaacacctggccttggctggtgtcatagaagcgcggcacgagattgataagagacgacttgccggagccggtggagccgatgaacgccaccgtctggccctgctcggcggtgaagttgatgccttccagcatcgcctcgcgcgaatccgggtaggtgaagctgacgttgcggaattccacggtgcccctctggccggttttggccacgtcggcggcggttttggtgccgttctcgacgattggctcagtgtcgagcacctccatgatgcgctgcgcggacacgtcggcgcgcggccagagcacgaacaccatgctcatgagcaggaagctcatgatgacctgcacggagtagttggagaacacgaccatgttggagaacacggtgagcttgtccttgagcccggcggcgtcgatgaggtaagcgccgatccagtagacggcgagcatcaggccgttcaggacggtgttcatcaacggcatcatgaacgccatgacgcggttggtgaacagctgggtctcggtgaggtccttgttggccttggtgaatttggcttcctggtagtcctcggcattgtaggcgcgcaccacgcgcaggccggtgaggttctcgcgggccacgaggttgatgttgtcggtcagggtctgcatgaccttgaacttcggcatgaccatggccatcatgacggtgatggacaccagcaggaccgccacggcgatgccggtggcgagcgtccattcgaagccttcgccggcgatcttgcacacggcccatacggccatgatcggcgacttgacgatgagctgcaggcccatggtgatgaacatctgcacctgcgtgacgtcgttggtggaacgggtgatgaggctggcggtggagaacttgctcatctcggccgggccgaaggactcgaccttgcggaattcgagcgagcgcagacgctgggtgaacgaggcggccacgcgcgcagcgatgtagccggtgatgatggcacacgccacggatccgagcgagatgagcagcatcttgccgcccgcgatccagatgtccttcatgtcgctgcccggcgtctcgaccagcgtggtgatgtctgacatatagtcgggcagtttcaggtcgaagtagacctgcccgacgatggtcaccagggcgatgagcatctgaccgatctccgctttggagaggtatttcatgatgcgaaacattggtttccccttgtgttggttgggttggttattggttattggcgattggttcttaagttggctgggttatcggtgattatcggttcacgatgtcttaatagtttccattgtttgattacttacactgtgagatattatacgcacttctgtatgttcgctgtgagcgtcctcaattacctttacctccctctgacgagggaggtgtcaccgcgcagcagtgacggagggagagacccgccagcgggaggaagctagtctcgctcagcctccgcgcgcttagctgccatgtgttcagccacgcgcttgtcccgctccacgaatgcctcacgcacttgttcagccgtcggccgaggccgccccggatggcaaatcgacatatatgtggtgaactcagacaccaggtcaacgaattcgcgcgtgcgccgctcccccatttgcaagaaaatccagcaaattgcggaacgcatttcctctatcatccgatgagactgctcgcgcccggaatcagtgagattcacgcgaataatgcgccgatccttggaatcaatgtcacgcgtgacccagcctttcttctccagagacgacagcacagtggagatgcggccggaactggcctgcagcgccgatgccaattgcgatggcgtttgcgtccccttcatggacagctcccggagcacgaactgctcaccatgggctccacgagtgaattccctctgcattgtcgaacgattgccccacacgctggcatacagttcactaactgcttcctgctcaaatcccataagagcaccatccattcccattcgccacacggcagagcgccgcaaacatccccaagaatatctcacaccgtaaacaattcattactagaaactatttttggaacgcataatgcacacactccacgctctttgatattctgaaagccgcatagatattcacttcggggcgtcgtctaagaatatttgctgggccaacggtagcgacgttggcattgtgctccatgaggtatctggtcgaaaaggcggacgaagacagaccagttgggcggagcgcgcccatacctcaaaaccattgcaattattggctttgaccattttcgtggagtcacgaaaatggtcatgaaaaacataaggacacacccatgaaccgcgacgaaatcacacgcaaaaccagcgaactcagcactatcgcacacaccaccgaggactccaaagttgagtattggtatgcacgcgagctaatgacctatatggggtacgacagatgggaaaacttcagcaaagctattacacgagccaagcaagcttgcgacaattccggcgtatccgttgaatcccatttccgtgacactacgcgagacgtgactctcggcagcggtgccacccgctccatcgcggacgtcaagctcacccgatacgcctgctatctcattgctcaaaacggtgatccaaagaaagaagaagtggcacttctccagagctattttgccgttcagactcgcaaaacggaaatcattgagcaacgcatgggagaaatcagccggctcgccggccgagaggcccttgccactgcagagaagaaactctatccgtatacccaaatcacacacaacaaaaccacacaagagcacatgtacacgcccaaccacgccgcagaacgccggcaaggatgtgatacaggccacagaaagcgttgtaccgcctaggcaatgcaacaattgtccgctatgctctgaaggcagatggcggcacggatgccatcccaaagagggggtatgaccatgattcggggtatgaacctatgcagcatcgccggctgcacgcacgaagcagaagaagcgggcatgtgcaacatgcatttcacatcggcgctggttcacggagcgctgcactacactgcggacggacgtccgtcgcactgctgagcgcaacaacaaagcaaaacaaccagtaacgctcaacggcttccacatgttcatgctctaattgcatgtacttgcagacacaatggccggtctgagccagctgccctcgcatggagcagctggctcagaccggccattattgttgctttgtactgtttgcactgtattgcgcctgcattgcgcaagctcgggcgcactcgggtgcactcgctgagtggcgtgaatcgcagattgctcaatagcaacgcaatccacgccactcagcagttgccatggttatgcgcggcgtttgcggatgacgagcaaggcaccagccgcagctgtcagcaccacaaccacgaccgcaatggcagccacggcaacacccgtattcgaaaggggcgcagcgccattagcagccggcttattcgtggcagtgttaccgggcttaacagtgttgccaggattgttggtatcgccgggcttctgctctccagggccgggagtgacctccgtggccgtgaccgtgacttcgaacgtcgcgttcacgccacgataagagacggtgatggtcttcgtgcctgcggtggcagaatcaaagccagtgaacttcagatcaccatcagttggatcaatcagcttgcgcagcgtttcggtatcgccgactttgtaaatggcggataccttcacatcggcagcgttgaacttatcgcctacctgataggaatccttggtcacttccacagcaagctcggccaactgaggcagttcgccgaatgtcactgtgtaggtttccgccgtgccatcctcagcagttacagtcaccgtggccacgccgctgttctcggtcgaagcctgctccacctgcaccgtagccttcgcgtcagcagcagtcgcctccaccgtcgggtaagaagcagcgtctccggccagcgcaccggcatattcggtgatatccgcggagaatccgtcaaccgtcttgccatccacagtcagatcagcaagattggcgttactagacggctgcggctttggcgttgcttcaccttcggcgatgcgtacttcagcgatcttggcatagtcattgccatcggcgtaggtgaagttgaggcgaatgcccttggtggcgggcagagcgctcacatcggcttccgtcacggctccagcagcaccattcacagtgactgccggcagcgtggcatcagtccacgtggcgttgtcttcagctaggtacgatacagtgaagctcttcggagcggcctcgcccttggccttatccaccgcaacgctgagcttgcccagctgatatgccttatcgaaggtgtagctgagccatggcgaggtgtcgccggtgccccagttcgaccagttggtgctcagattgttgtcgcaagtcaggtcggccgtagaagcggaggcccagctgctggccggctcatacttcgaggctgcggcggacgagcagaacaaccgggcaaggttgctttccacagtcacggtgagcgtggcagttactgaagaatcagtgacaaggcgtaccgtcacggtttgctcgcccaatttggtggtgtcgaagccttccaacgtgtattcatctggctccagtacacgcgtcttgccattggtgagcgtagcggtaaccgtcacgtccttatgcgcgagcgtctgcctcttggcgatagtggcttcagggcccttggctgcgatggactccacagcagcagtctgcgaaccgaacgcagtgccgttgaaggccacggtgaatgcgccggcattgctgttcgacgtggcgaaagcaccggcatcgagcccggttacgtccgcaccggtcagcgttaccgtagcgacatcctgccattcatcgttcgcggaagcacgccagtagcctttcagagtatcggttgaggtgcgctccagcttgagctgcacttggtcgccgaagccggtaccaacatgcgatgtttccttatcgatgtagccatcggcattggaatcgtactgcatgtaaacgccgcttgggctggcaagtaacgtggcatatcccttgccgccgttagcgccagtaagaccgttacggaccaccagaccggcgcgcggatcgccattaccgcccaagtcgagcggcttgaccgtggtttccagcgtttcgttcacgtccagggcatcaggctggtacaccgcactgccctcgttgcgatccgtccagacgccccgattggcgttgtccgtaatcgtgaagtcataagcaccgccggacgcagaaacctggcacgcgctgccgcccttccaatgagcttccttccaacttccggaaatcgggttggagcaggaaacatcgatggttctacggaatgtacggcccggattgaagttactgctctcggcaagagtgcccgtaatggtgtaggttcccggcacattgaatgcgtaggtgttaccagcagccttggtcgacttgctgactgccgtaccgccttccacattccatgtcaccttggtagcaatggtatcgtcgccttccttgacgttgacggtgtccggcagagtaacggttccgcccgtgttcacggtcttcgggagatcatcgccggtttccacagtccagttgaccagcttgcccttggcgctaccatggttgccccaatagctcagatcccaaccgtcgggctcgccttcttgagcaggattgtgcatttcgatggtgccgttctcaccgatggtcagcggcagccaaacataggtggaatcggctttaccggaatcccaacggtcaccaaggtagatgaagtgacctttctcctggtctactgcgagcacactagccgactgcgaaccgaatgtggtgccgcgggtatcgcccacggacaacagaccatccgcgccttccggcatgttgttgtaccacgtgttctcgttgacatcgtccttttccacgccacgggtccagcttcccagcatggagtcggcggtgtagtaggtctgcttgttcggggcccagccggttgcaccagatgcgatgatgttgtaacgcccgtcatattggaatacggcaggagcttccagcgaaccattttgtttgacgatttggaaatcttcgccacgcaccggggcatccgtagtagcgtctgcaagaatgtatgggtactgcccgtcagcagagtactgcttttgtccctcggactggtccacattcgtggtcttgactacattggtgtaatcatcgttgagcttggcgatgtacagcgtggcattggcttcggaagaatacagtacataggcactgtcgtccttcgggtccacgaacacagtcatatcgcggctgtcaccgttctcaccccagctggggttacctgcggcttctttccaattgttctggttaggcaaacgataggcacccaccatagtgaacgggcccgccggattgtcggaaacagccacgcccgcaagtgcacgtgcatagttggaaccgcccggcgtggtgcttccatcggaatgccaccacagcacgtattgcttgttcttcttgttgtagatgatcttcggacgctcgaaaatgccctgtacggaatcaaccgcgccatcaccatcctgatcggggttggtgttgaggtacgggaagattgcgtcggccttggcagcgtccacactgccgtcggacttggtcaggttgtaggccttgtcgaagtaggcgtaatcggcattgctcttatccgtcaactgagatttgctggtcaccgcacgcagcgccacaccaagatcggtccagttgtatagatctgtcgacatataagcatgaataccggggctgttgtcgtaaccgttagaacggtcttcgccataccagtagtaggcgtcgccaaccttgaccacttggccaccgtgcgcttggatgtgtgtgccgccattatcattggcgttcttggcataccaatatggctggaagtaatcgctagcgttcttgcccggatcggctgtgggctggaacttggtgtatgtcggcacttggccgatggtaggcaggtaatccacacctgccgcactggcacttgcagcggccagcccgcatgacaatagcgttgccgcggcggtaattgccgcgataagagcgcccttgcccttattgtttatcttcattgatttggttccttgattgatgataacggttttttgaacaaacagttatatcgctatccgcgaagccagaaaaggttcgacaaatcaatataccgatactgaaaactcagtattcaacttgtcggaccaattatggtcaaagagcggaggaaccggccggcaatagtcaatattgccggcttgttccttcacccattactgcgcgagggtgctatgcacgcttgcgcagcatgaacagtgcacccgcggcagcggccagcagagcgacagcgccagcgatggcggcaacactggaaccggtgttggccaccgtgttcttgttgccgttgccggtggcaccgggcttgttggtgttgccgggcttctgttcttcagggccaggggcgactgcgttggccttgaccgtgacgttgaaggtcgcggtcacaccacggtaggagacggtaatcgccttcttgcctgcggtggtggagtcgaacgagccaatcgcaagctgcgggtcgtcaagagcgaccggcacttctttggtcttgtcgccactctggtagacggcagtcaccttcagaccggcggtatcgagcttgtcgccgatggcgtactcggtcttcgtgggtccgatcaccttgagcgaagccaaagtgaaggcgttgaaggtcaccgtgtaggtcttcgtctcagactcgtcggctgaggtcaccgtaatggcggccttgccgccaagcttgccgttctcaaccgcgtcgccagtcaccttgacggcggcggcattgtcggtggcgaaggcctgcagcaccgggtttgcctcggcgtcgaccggcagatcaaccgtgtagtcggtcttggccgggtcgaagccttcaacggtttcgccgtcaagacgcaggtcgcccagcgtggcatcggatgctggctgcggggtgagtaccgtgctgtcttgtgcgaacacctggatctcagccacgttgatgtacaccttggtgtcctgcaatgtgttagtcaggcggatggccttggcctttaccggggtgccgagcacgaagtcaacggtcggggtgtcggcggcggtgatgccgtcggagccagagccggcatcgccggcctgtatcttccagccatccttggtaccgactccataccattcgccagcctcatcctggtattccagcgtctggctcttcggccaagacgcacgaccatcgtagtagaagaaggtcttcacttcggtgatggtctgagcttcgtcgaaggtgaacgtggcgaccgggtccaccgtcgaggcggtggaagcccaagtggaccaaccctttgacgtagtgtcaccatcgatggccttggaagcggaggcaccctcctggaagttcaccgagaagttcgtgccagaggccgcggcgatgttcttcgcagcaccctgaaccggcgtcacgaatgcctgaatttcggtggcgttcatgtagtcgttgttcacggtgttcacaatgcgcaccttcgtggcattcactgtgcccttatcggccttgaacgtcaccgtctggcctgcggcaggcttaacatcgctaccgaattgcatccacgtctcgccatcagtggtgtactcggccttggcggaagccggagccttgtcaccatacgtaatggtcacgctgctaagctcacactcagagccgaagtcaatcgtggcggtcgggctggcggaatagtcaccagcagagttccacgtcacccaggcttcagctgacgtgtcaccatcggtgagcttcttccactgatcgcccttgctgtattccgtctgctggttggtcacggtcaggctggaagcagtgtcggccacattctcaggcgtggcggcggtgacatagatcgcgcccttcagcgcaatcgtggtcgcgtcgtccagctggtaagtaccggtcacggcaatgttgtcgccagccttggcatcggcgagcttggtatcaagcccatcgaagttccacgtaaccttagccgcatcgccctcgaatgcaggcgatgccttgacgtgcagatacaccggcgcagcctcaagcgcggccttcgcctcgctcgcactggtgccggccagcactgtagccgataccggatcggaaacggtgagcgcgccaacgtagaccgtagcggcgacattgaactcgttgccgtacacatcggtggcggtagcggtggcttcgtaggtgccttccttggccacatcgaccttggaagtatcccagttggcaaccgtggccttgccttcgccccaggtgtagtagagcgtgacttcggtcggcagcgcggccttctcgttaacggcggtctgcacgttcacggtcttctggctggtcggcgttacattacgtagagtccatgtctggttggcggacggcgaagtgccgctcggtgactgccacaagccaaccttcgtgccgactgtggtaccagagttatccacatcgaggttcgtcttagtcgcggcattgagcagctggtaggtcgaaccatcggaagtgttgagaatccacttggcagccgggtcggacttagcggcctcaaccgtttcgttggaaagcgcgttcgtgccatccttggacaccagcaccttgccttcggcgttagtaatcacataagccttgagatcagggcgctcggagtcggcgggctgctcgatctgggtaaaggtccaagtctgcttcttggcgttctcggcatcggaagcgacgttggccagggacagcgcggaatcaccagaagtggtatcagccacggccttgccggactgcttaccaacgagctggtaagtgtcgccggtctcgacggcagcatccttggcgtagccggtcacgccagtgagctggacggaggcgatagaacgggcgggcacagtgaccgtagcggtcttggcagccttgtcaatcatcacagagccttcagcttgcttgacgttgctggtcttggcgaagacttccggagtggcggaatcgacacccgcgttcttgtcttcgtcagaggtttcggtggtcaggtagagctcaccgtaagcgttgtcggcaatctcgccgtacttcgacaggtcgatgacgaaggtctggtcagaggtgccggagttgcggtggatgacggtctgtgtcttgccatcgtcggaggtggcagtcatgttgttgtcttcatcgttgttggcgatgaccttgtcgcccgcgtggatgaagtgggtgatggccttgacgccgttgtacttggcgtttgcaataaccgtgcacggttcaagtccatcggtggtaccgccgttgttgttcacgcggcgctcggagtagagcttgccgtccatgccagccacggtgcagtcgaagtcgatgagcacggtgccccagttggtgttctcaccggccggattcacattcgagcccatctgcatgttgtagaggtcctcgaccacctgccagaaggtgaagtccttggactgcaggcgggtgacgttggagctgatcttgctcatcatgcccagcgcgttgtcgaaaccgtacgggttgtaggagccagactgccaggagccgtccacctcgctcatcgacagcttcttgccgtctgcctgagcgatatcgcgcgactgcatctggttgctgtcggagtaggcgtgaacgttgtactggccgataaggtccttgatcgcctgcgggtactggttgtacgacttgacgaagtcggcggagttcgtggcatcggtggctgcgatgatggtgtcatcattgtccttgagcgcctcagcgagtgcggtaatcgtctgctgctgctgggcgttgctgacatgcataccctcctgcggcttcttcagcgcgttggagtatggggtgacggacttatctttgtcggagtagtacttatcccagtagttgttaatgagcttggtgttgtcatcgctctcatcggtgtacttcgaagccatgtcgcccggagtgccccagtaactggtctcggactcgttgaacggctcgaccgtgtcaacgtttgcgccaaggctttcgaggtgctcgacgttcttggccatgtactgagcgaatttctcagggtttgcaagattattgctaccggagttgcgtccaccagtggcgtaaccgctgttggtcaggaaccacggagcggagttggcgaaggcctctacgtcggtgatgtcagggttatcgccggtggcaccgcgctcaatccaccagtcttgggcggcggacttggagaagtcatactggttgtcgtcagtcgggtcgaatgccgcagccagcttgtctttgtcggcctgcttggtggttacgccattgccatacgtgccggagccggtggcgtcatctttccacgtgccaggcacggcagcgccttggcgcatgaatgggtagccgtaggcaacatcggaggcattgccgccgcccacgttgtagcgggccatgttcaggtccagtccttcatcaccgaagatggactggtagaactgttcgcgcagctgtttgccgtattccacagccttagccttggaagcgtcatcgccgagattggtggtgatggccgattcctcgccgaggctgccggtggcgttggcgaaccaagccagcgaggtgccccagccatcgaaactgttggcataccacgggttcggggtcacggtaatggcatcgttatcagccgcatacgcagtgccggcaaccgcaaacgcccctcctcccactagtgttgccgccgcaaccattgcagcaagcgatttgctcagtaccttcattggtctccttagtgttcctgctatccgccttataccggaaaaatcggcctttgcttcactgcgccggcctctttgcctgatacatgacctacgtcgactccttctttcggcgcagccaaaatgtttacgcaaacattttgatatgagcgattttatcacaaaaccgtcacccagcaaacaacttcagagaccacaaacgacgcacaaagtcatgagccattcgaattgcgctggcccaatcgctacgaatcatatttgccgtagcccttaagtgaatcccactgcatcgagatatcgcgcccgctatcccttccgataacgccgaccacgcgtgttgccttcagcaatcagctttccttgcgcaactaaaccgtttaggaatttgcggactgttctgttatcgagctctgttatcttggcgagttcaggtacagtcacatagtcaacctctgtcaagagtcgattcatcgccgacagcatcgctgcccgcgaatcaatttcacccgatgcggttgcatctgctttcttaccatccacacgttccccgccaatgagcctcgcaccctcttcggcatctttctcaactacagatctcacgctagcaaaaccagaaccatccacggtcttcagcgcaggaacaataggaatcgtcgcctcgaatatgtcaccatcgcggaactcaggctctcgctcagtatattgccgggacgctcttatcagattccgcagtccgctacccagctgctcggctatgccggtctgcacaaacacattagcgataatcggattctttggcattggcgtgaactcgcccagcttcattcgaccttcaaagaatgagcgcgaagcattaaccgtccggatggattcattatcaatggtgacacgcgccaccaccggactggaatactcccgatgcatgaggctgtttgccaccaattcacgggcgatcatcgtacgcgggctcactcgcttatcgccctttaacacaaagcggtcaggcagattccgctcagtaaattcacggagttgctcgtacgaatcgaacaagttggtccgcaccataagtcggtcatcgtatcggtcaatattgtctcgccgaaccacggcatcagtaatatacgctgggcaaaccgaggaaatgacttcatccttgcccaagagcagcactgcagcaagattaaagccctcttcgccggtcgtgtaatcacgatcgtatagcttggcgctgcggaacagttcttcgtcagacatagttccccaagggtgcccagctcgctgagcgaccgccagctgccgcattcgcgcaatcagctcaggacgcaaatcaaacggagtcacgtaacggaaaattcgccgttcggaatagtagttctgcttgcgaatatacatttgactaatctggatatcgctttcgatgtgtgtatccacatcagcaatgcgatcaaacactgcgcccttgaaccgcacaaccgaagaactcggagctacccaaatacgaacaataatccgttcgtcgtactcgatatgttccgtttccaccattggagccggttcgaacatcttacgattagacactacgttgacaacgttgcgctctatctcactaacgcgcttagaatcgacgccgagcacttgaccgtcatcgtcaacgccaagataaatgctgccaccagaacgattggcgaatgagcatacagtctcaaaagtatccgtatgaggcaattcgctgcagcgcttgaactcgaccatagatgattcaccggcctgcagcacttgcataagttcatcctgcatcatcgcattccgcccttcatagcgataattcatacattaggacatggcacttatcgtattttagcatctaattagtacattaggacattgttttatgtcctaatgtactaattaggcggctaattgtactaataattgcacactgatgtactaatccgatgatcgaatgcactaattgtccgcgcaaatgcactaatcggatgaccgaatgtatcaatgagacctataggcagccgattggctgacgatcagcccagtcattggctatcggccgctagccagtcagccgccaacagccaacagccacccaactaatagccgccagccaatcagcccgtccaatcactccttgtgttccagtgcggccttcaaatcgcggctacggtagcgttcgcgcagcatagagaatccaccgaagcccacaagccacaccaggccggcaatcgcggaattgcgcgtatcgtccgcaaggaacaacgtcaggtagatgaacacgaagaacacgattgccaccgtattgagcaccttccacgcgggcatgacgaacccgtccgcgatgaaatcggcggaacggcgatacctgcgatgcgccagcagcgtcaggatgtagatgaacaggaacaccgcggagctggcggacgagaacagcacgaacgcccccgagatgccggggatggcgttgacgatcggcgacagcaggatcagcgccgcggacaccaggatggcgcgggccggcaccttgcggtcggacaccttgccgagcttgttcagcatcgggttcggcgacacctcggacagctggtacaggtggcggccggcggaatacaacagcgaattgagcgacgaggacgcggcggtgatcaccacgaagaacaccagggcggacgcccagttcaacccggcatactggaacaccatgatgaacggggaggcgaaggagccgtcctcgttcggcttgaacgaggtccacggcacgatgcacatgatggccacgagcgcgcccacgtagaagatgagcacacgcacgatgatctcgttgacggctttgggcagcacctcacgaggattcttggtctcggagacggtgacgcccacgaactcgagcagctcataggcgaagaacaccatctggaagctcatgaggaaggccatccagccgttcggggcgaacgagaagccggagaacaggttgtcgagtccggcgtggcccgccgggctcacatgatccacgccatgaatccgcgcggccgggtaatggtagccgatcacgatcatgaccacggcggtgacgatcatcgcgccgatcagcgtgatcttgatcatcgagaaccagaattccacctcgccgaacaccttgacggcgatcaggttgacggacaccagcgacaccaggaaacacagttcgatcagccatttccaatgggtcaggtcgatgccgaacgtgtcgaagaaggtgatgaagtacgtggagacggccgtgatctcggtcatgcccaacagcacgagcgcggcccaatacgtccagccggcgaaatgcccccatccgttgcccaggtagcgggtgatgaaattgatgaaggtgtgctggctggggtcacggtacatcatctcgccgatggcgcgcatcaggaagaacatgatgacgccgaccaggatatacacgaagacgatcgaggggccggtcagcgccagcgacttgccggaccccaggaacaatccggtgccgatggtgccgccgatggcgatgaactgcacgtggcggttgttcaggccacgctccatctcgttggtccggtccaggctttcgacagacttgagtttgcccgtagcctgccgtgtaccaccattcacattcgtatcggccatactgatttcatttctcttctccgccgcccgattgttacgcaccggacgcgatactcgttcaaaacaagttcagactgtatcaccgaaatatgtcacgaaaacgctcagctcaagaatacatgcgatgatgctgtaaatattccgccaaaaaagttcaattcaccaacacctaattgaacttctacctctattccacggacttgagcgagctgaccgggtctacgcgatcgagcactgggttggtgaacagctgcaccagcagcgcgaacgccagcgtcgccaccacggcaatcgcatagctgtaccagtgcacttccacttcgaaatacagcgacggcatattcaacgcagcagtcagtaatccgcctatccacctgccaagcggcagaccaaccaccacacccataccggtcaatatcatcatctcgcgattcacgtagttgtgcacctcgcggtcatagaagcccagcaccttcagtgtggccatctcgcggatgcgttcggacacgttcgtattggccaacgtaaacagcaccaccagcgccaggccgccggcgagccccacaatcagcgccaccacggcacccatcaaatcgaacttaaacgtggcggccagatgcgcacagctcacggccttgagcaccgacgattcctcgcccaaccgatccgcatattcggcctgttcggtctcggaacctttcagcttggcgagcatcgcgttccacgtcaaggtcgaggcagtgccatctcccgaagccgaagacgtcacaccgccggccgcaaacttctggtcgtacagtcgctcactgatgtacacatcagagccaataagattgcgcgtcacggccgtgacctgcaccttggcccggctgctaccgccattgcccagcgtgacggtgtcgccggcatgaatattcagcgagttggcggcggactgcgatacaatcacgccactatcgtccagcgctacagtgccgccacccgctttgccgaagatattgggcagcccaaaccatccatcatcgccggcttgttccagcgtgaccatatcgttcaagatattcagcgaatcgttgggcacggtcatcagctgcacggtttcgctttcctgcgccgcattgctcatctcgccactatccacgcgcagattcagcgtttcggtggtttggccatcttgtgccacctgcttgcgcatcgcggtggcgtcatcgtcattggccacgaccatcaggtcgtactggtagatctgctcgtattgtttgacgccaatcgtgtcgacggtgtcattaatcgcaaatccgcagataatcaacgctgtgcaaccggccacgccgcccacggtcataatcaagcgcgacttgaatcggaagatattgcgcgcggtgactttgccgaggaagttcagccggctccataccgggcgaatccgctccagcaatatgcgagcgcccgctttcggtgccttcggccgcatcagcgcggcgggcgtgtgccgtatctcctcgcgacaggcgagcgcggtggccacgcccacgccgaccacgaacagcacgatgccggccgaaccgtacagccagtcgtattcgagtcgcacaccgggcaatatatacagtccctcaatcaccaccagcaggaatgccgggatgccaaggaatccgaccagcagaccgatgccgccgccgaccaagcaggcgagcaacgcgaacagcagataccggctggacacggcgagtccgccatagccgagtccaaggtaggtgccgataagtccgcggtcttcctcgaccatgcgggtcatggtggtcaggctcatgagcacggcgaccagcaggaacacaatcgggaatgcgcggccgatggattcgatggaactgacgtctgatttgagcgagctgaatccgtcgatcgaagcgcgcgtctgcacataccaacgtgcgttggccacatcgtcgatgcgccgttgctgcttggcgaattcgctttccgcttcgcttcgcttcgcatcgagttcagactgcgcatcatccagtttcgccttgccgtccgcgagctgttgttcgccttcttccagctgccgctcgccttcttcgagctgctgcttgccgctggccagttgggcggcctgcgcttcaagttgcgccgactgggtttcgagggttgcggcattcgcttcgagttccgcggatttggtattgagctgtgcctctcctgcagccgcttcctgttccttggcggtcagttgcgcgttctgctggtccaaggtggattgtgcgggggcaatggtttcgtttaatgtgcgctgcaaatcggctttctgctgggtcagactgtctcgctgcgtttgcagttccgtttgcttggcggccagctgttgccgcagctcactgattgacggcacttcaggcagggtaatgccaaggcgcgcgagcagttgcttgatggcctgccatgtgggtgagttgaagtcgatattcgggtcaagttgcgccagtagattgtcggcctgttgaatcatggacagcatctgatcaatttgtgccacgccttggtcgatttgggtaatgccctgttcgattttcgtgcgattggcagtcagttccgtttgcgccgcatcgagctgtttgcgagccgaggtgagctgcgctttgcccgattcgagctgggtgcgcgcttcggctatctgctggcgaccttgcgcgatctgttgacgggccgatgcaatctgcgcacgtccatcggcgagctgccgttcgccatcggtaatggttgtcctgttgttcttcaattcggtacggctatcttgcaatgtcgttttgttggcttccagctcggcccagttgtcgtcgatctgcttctgggcttcgtccagctgctcgttggcctcgtctttggcatcatccagtttgcgctgcgcgctggagacgatctgttgacgacgggctttctggcgtgtggcctgtatctgatgttcgatacggtcggccacggttttgatggcttcatcgtaggcatcggaaaacgtgtcaaaatcggacgcaccagtgacggcaaccgatatcgcagtgtatatattgccggtcacgccgtcgctgggtgcaaagaacgcatagtcctcggatgaggtggaccggaaggaggtcatgcccgaatagccgtctggattgttgaggtcgcgcgggtcgagtacgacgccggtgatggtgagtttcgtggggaactgcggggattgctcggcgtcggcgtccgtattggcgtcggacttcgcatcggatgccgaggcattggcggcgacacctaccgtatcggcattattggaatcgtcagtctccgtggccgctaccgatatgacggatgaagaggtgtcttgtggcgtcacagtaatggtgccgccaatcttgagtccgctatcgttcaggaattgctgcgtaaccgccacttcgccggccttgttcggcagtttgccctgccgtatgtacggctgatcaagcccttcggtaccgatttcctgcatggtcacggttttcttggtgccgtccaccaacgtggtcaccgtctgagaacgttcgggctgcacggtttgcacaccgtcgattcggcgcagtgccgttgcatcatcatcggtcaggccgtatgtggatagcacctgcaggtcatgcagtccctgctgatcgtaaaaacgaccggccgccagaaaagcatcgcggcatccggcgtagatgccggtcagcacggccacgccaagcagcgtgatgacggcgatcgagacgaacctcttccagctgcgcagccagcaacgcaacgtatctttggcaaataccgcagaaacgcccgctcctcgaccgccgctatcgtcgaggttccgccgtttcacagaatgtttcacaggttgtttcacgaatcgcctcgcttgtttcacggggcgtttcacagagtgtcttgcagtgagcatcgccaatcacctaccattcgatatcggcgatgggccacggcgttgcgttgacctcctcgctggtcaccttgccggagcggaagcgaatcactttgtgagccatcggtgcaagcgcggaattatgcgtgatgatcattacggtcatgccttgtgtttggcaaatatcctgcagcaactgcagcacttccttgccggtctcgtaatcgagcgcaccggtcggctcatcgcacaacaacagcttcggctttttggcaatcgcgcgggcgatggatacacgctgttgttcgccgccggacagttgcgcggggaagttgtccatcctctcccccagtccgactttgcgcagcgtttcctctggatcgaaatggtcagggcagatttgcgaggcgagctccacgttttcgagcgcggtaaggttaggcaccagattgtagaactggaagacgaagccgatatcgttgcgccggtaggtcaccagttcctttttccgcagacccgtaatatcgcgtccgccgaccactacgcggccggttgtggcggtatccatgccgcccagaatgttcaatgccgtggttttgccggcaccggactgccccagaatcacgcttaattcgccttgttcggcggtgaagctggcctcgtcgagcgcgcgaatcacactgctgccagaaggatattccttgaccacatggtcgaattcgatatacgccatcgcacacctccaacgcgctcgtggcagccacctagccccatgggccccgccagaacttcctgctatactcaagtaaaacaacactgtgtcggttctgcaaccaacagttggattgtgggttgtcggaacttggggagaaggccatggccaaagaattgacggaaagccgccgcacccgctacacgagacgtgccatgcaggacgcgcttatcgagttgctgcgcgatcagccgctcggctccatcaccgttaaagcgttgtgcgagcgggccgatgtgaatcgttccacgttttacgcgcattatgcgagcatcgaggaactgctgcacgacattgaagacgaaaccatggcctgggtcaccaccgcactcgaacagctactcgcccagccagatcctgccggcatcgagcatgttattgagcgcatctgccagtacattgccgacaatcgcaatcatctccaagtgctgatgagcccgaaagcggatatcggtttccagcagcagctgctgggattgatttacagccagcgcggtgtaggcgaacagttgcaatcttcggcgggttacccagccgaggcgcagatgcgtatgcgattcgccgtgtccggcagcattgggcttttgcaatattggctcgccaccgatctcgcggcctctcccgaatcggtgtcccacaccatcttcaccatgtgtatgcctgccacgcagtgagcacagtgaattcagtgaactcagtgaactcagtgaagcgtgcggtttcataagcatcgctcgctatagcttcgcctgctcaccggccgcgcccacgcccgcgcttgcaatagcgcacaaatagacgattgaccatttctgagacgatacggcggcatagaataacgaacgttgcgcatcacggcaagccccgcgtgcgccaaacccaagaaatgtgagagaagagcacaatgagtactactgatgcgcctaagaagccgcgcgaaaccgacgacgtgccggtgccggccacgctgcgcaagtcattgaaaaaccgccacatccagctgattgcgctgggcggcgccatcggaaccggcctgttctatggttccagtgaatccatcgcgctggccggaccctcgattctgctcgcctacttggttggcggcctcgcgattttcgcgattgtgcgtgcactgtctgaaatgtccgttgaggatccgaaggcgggcgcgttcagctactatgccacccgctactggtccaagcgcgccggctttatttccggctggaactactggttcaactacatcctcgtctcgatggtggagctatcagtggtgggttcgtttgtgaactactggttcccggcgattccgacatgggtgtcggcggccgtgttcttggtgatcatctgcgccgccaacctgctgggcgtctctaaattcggtgagttcgagttctggttcgccatcatcaagattgtggccgtgatcgccatgattatcggcggcctggccgtcatcatctttgtcctgcccaccgcatccggcgtgcgcgcaagcttcgcgaactggttcaccgtgggtaacggcttcttcccgaacggcctgatggggcagaattccgacggttcctggaccggcctgctgatggcactggttgtggtgatgttcagcttcggcggcaccgagctcatcggcatcaccgccggcgaaaccgaggatccgaagaccacgattccgcgcgccaccaatgatattatttggcgaatcctcgtgttctacatcggcgctctgggtgtgatcatggccgtagtgccgtggaacaccatcgatggcaagtccagcccgttcgtgcagatcttcgattccgtgggcattcacgcggctgccggtattttgaacttcgtgtgcctgaccgctgtgatgagcgtctacaactccggcctgtacgccaactcccgcatgttgtactcgctggccaagcagggcaatgcgcccgcttacttgggcaagctcaactcgcgcggcgtgccagtggccggcgtgctgacgtccgccgcgatcaccgccatcgccgtggtcgtggtgttcgtgtggcctgagttcgcgttcaactacctgatgtcgattgccaccattgccggcatcatcaactggacgatgatcatgctcaccgaaatgaagttccgtaaggtggtcgccgcgggcggcgctcccgaggattccgagctggccggtctgagcggccaggaggcactggacgcgattcacttcaaactgccgtttgccaaggtgaccccgtgggtggtgctggcgttcctggcgctggtcgtggtgctgatgtgcttctccaccagctaccgcatcgccgtcatcgccggcgtgatctggctggccatcctcttcgccgcctaccagctcactcaggcgaagaagtaaggctccatttgcgaatagctctcactgatgagcactcagtgagagctattcgcaaatgggattcattcatgaaacagctcatcgatgccgacgagctgaacgtcggattgagacgccgcagcatcgtcgaccagtgattgatcgaaaccgccgagcgaaaacagcaggtatgttcgctggccgataccggttcgcgcagcacggtctcgcagtagattcagcacggaacggtccaccggcgcattgcggaatttgcactcgcccacaatggcagcatcagacgcattgtcaacggccatcacgtctatctcatcctgacgatcccaccaacggccaaccgcacgcgcacggaagggcaaccgtccagcagcactctcacgccacatccattcacggcacagaccctcgaacggtttgccggcaaaatcatgtaataccggcttgatatgacgctcgtatacgccttccacatcgccccgctccaattccgaacgatacggaaagacaaacgaataccagaatcggaagaaattgtcgctcagctgatacagcccacgcgaacctttcgcccgctccttaggcttcgccgtgactgggaactcacgttccacaatccccagttccataagattggcgagatacgacgatactgttgcgtttgccatcatcgtgtgtgtcgcgatctcattcagcgaagttgcgccgagcgcaatcgcccgtatcacgctgttatatttcgcagtttcccgcagttcttcgtgcaacaaaaattcaacctcgctgtatagcggagcaatgcgtctcagaatatgccgcttgacatttgcgtctatggtctcatctgggtcaaattcctctaggtaacgcgggataccacccagtattgcgtaggccagcgccttatcctcgctactatagttggggaagaattgcgctgcatcccaatatggcatcggcagcatcttcaggatgccggtcgcacgaccatatagcggcgatttttctcccaacagctccttttcgatgaagctcatggcactgccgcaaatcacaatcatcagatttgcatgacgcaacgtgtggtcccaaagattctgtagcactgacggcaatgacggatcagatttgaccagataaggaaactcatcgaatatcacaagcctgcggccgccatcgctcggctctggcagccgggttaactcggttaacgccctttcccaagaaggatattgactcagataatccttgcccggggcacccgcctcgaacatgagacgggagaacgatgccagctgttcatctttagtggcattctgcgccgcgaagaataaggtttccttgtcttttgcgagttgaataagcgtctctgtttttcccacgcgcctgcggccgtagacgaacacaagctgtgccctacgctcagtgaaacattcctgcagttgcttgaggtcatcgtctcgtccgatgaatgccatgctgcccgcctcctttatg

SEQ ID NO: 959 - DNA, 12891 bp, Unknown
  R117_24m  MAG No. k141_17456
catcgactggtcgcagacctaccacaccatcggccagcacccgcggcgcgtggctcagaaggccttcctgcgcaaccttgcccgcggcgaggcctaccagcaggacgcccccggcctgtgggacgtgaccttccagaccgccgtggctcaggccgagcttgagtcccgcgaatacccgggcttctaccacaaggtggctttccgctttgaggacggcaccccaatctacatcgagaccacccgccccgagctgctggccgcttgcacctcgctgatcgccaacccgaatgacgagcgctacaagcagtacttcggccagtacgtctactcccctctgttcaaggtcaaggtgccgattctggcgcacccggccgccgaaatggacaagggtgccggtatcgccatgtgctgtacgttcggtgatgtgaccgacgtcgagtggtggcgcgacctgaagctgcccacccgcccgatcatccagcgcaacggccgtatcgtgatggataccccggactggatcgaggacccggccggccgcgaggtctttgccgaaaccgctggcaagaccacgttctccgcccgcaagatcatcgtcgacaagctgcgcgagtccggcgatctggacggcgagccgaccccgaccaagcgtatgacgaacttctacgagaagggcgacaagccgctcgagatcgtcacctcccgccagtggtatttgaagaacggcggtaccgacgccaagctgaacgccgagcttatcgagcgtggcaaggaactcgagttccaccccgacttcatgcgcgtgcgttatgagaactgggtgcacggcctgaacggcgactggctgatctcccgtcagcgcttcttcggcgtcccgttcccgctgtggtacccggtgaacgcttccggcgagccggattacgatcgcccgatcaccccgagcgaggatcgtctgccgatcgacccgaccatcgatgtgccggaaggctacgacgagtcccagcgtgatgtgcccggcggcttcaccgccgaaaaggacatcatggatacctgggccacctcttcgctgaccccacagatcgtgacccactgggccgagccggacgaggcctccaaggccctgttcgcttccaccttcccgatggaccttcgcccgcagggtcaggacatcatccgcacctggctgttctcgactgtggaccgcgcgcacttggagaacaagtgtctgccgtgggcccatgccacgctgtccggctggattctggaccccgaccacaagaagatgtcgaagtccaagggcaacgtcgtggtgccgaacgagccgatcgagaagttcggcgcggacgccgtgcgttactgggccgccgccgctcgcctgggcctcgatgccacgtacgacatcggccagatgaagattggccgtcgactggccatcaagctgctgaacgccaccaagttcgcgctggccatcggccgtgaggacgagaaccatcacgtgggcgctgccgccgagacctcgtggaacccgatcgatgtgaccgaaccgctggatcgcgccgctatggccaagctggctttggtggtgcgtcaggccaccgaggcgctggaatcctacgagcattccaaggcgctggaagtcatcgaatcctacttctggcagttctgcgacgactacatcgagctggtcaagaaccgcgcctatggcactccggacgagcacggcaatgtgccgtccgagaaggctgtgaagtccgcccgcaccgctctgggtctgggcttggacgccttcgcacgtctgctggccccgtacctgccgtacgccaccgaggaagtgtggagctggatgcacgccggttccggttccgtgcatcgcgccgcctggccggtcgtggacccgtatgtcgaggccgccaccggtgcttcccccgagctgctgacttgggccggcaaggccgtggagcagctgcgtaagatcaagtccgaggccaaggtctccatgaagaccccaatcctgtctgtggcactgtccgctgcttcggaaggtgtgaacgcgattcacgccgccttgggcgatatcgcgcaggccggtcgcgtggtcggcaagttcgacttggtggccaagcacgccgaggaatccgccgccgaagacgcgcccgaaaccgaggtcgccgtcgaagccagcgagctcggtgagccgccagccaagaagccaaagcactgagcgttgcgcacaacaacagtaggtctcacggcaatgccgctcgttccgagcctacgggaagcccaccgggcttcccgcttaacggctcggccagccaagaagccaaagcactgagcgttgcgcacaacaacaaaagaggggaacctcctattgaggttcccctcttttgttttttgacgttcggatgacacgactgtgggacggcacgcaaatatcccgcattgtaagctggcggcccacaatagcgtgggccaccacgcgtgtcaaacgttttatatacgcggcgtcccacagaccgaatcaacaaatccttggaatttagccattcttcaaactatagttagctctgacttacaagagggtgtgggacgccgcatcgaaaaagccagtttttgatgcggcgtcccacaccgataacgcactttacgcgtattgggcacctgtcgcatgcggattttcccgcatacaccatcacaccgtcggaatcacgatgaggtatcgggtttcggcggttttttgttgcgtattggggctatcgagctgcgcgacggcctgcgccaagagcgtgccagcatcgctgatctccacggtctcattgatcagcgcgctcatgtcatgcttgagcagcgtgccgccagtgccaaagccgaacagtactggagcggtgtcaagattgttgccggaatcgccagtatcgctcgacttggctgagtcgttcgttcccgaaccatcgctcttggacgaatcgaacttacctccaccaccgatggccgaagtaagaccacccgcatagttcatcacatcgccagcagacatggacatggtgtcatcgaccagtgaggccttggaatgctgcgactgctgctgttgcgcggctttggcctgcttacgggcggcatcggccttacgcttggcttgggcggcccgggtcttgccgtagaacgattgcgattgcgaatcgaccaggccagtcagtgcctgagcctcggtcaccggaccggaagagacatcaccggacgagccatcgccatcgctgccggaagccgaggacgcgactccttcgaactgatcggagaatcgcaatacaatctggcgcaaggccgtggctttgcccgtatgctcggaggcggtggcaagcgtgctcatcgcggcatcgaccttggattgagcgtcggcgagttcatcgctaccgttggtttcggcgatggcttggctctcgtaagcggtggcgcccgaagacgtgccgccggtcagggcgctcaaattggccgtgtagacgtccgtgtatttcatcgaatacggaatcattgcggcggagagctggctctggccatcggcgtattgcttggagcctcgagtggcttcctccgaagcctcggcggtcagatcatccaccagtccggtggtgccttgctgctggatgcggcgaatcacctcatccaacgcatcgaccgcaccggcatgctgatgtgcggcactgacgttgttcaccgcgttggccaagtcgagtacggcttgcgccaaaggcgtatccccggacagttcgccggccgtgcccatcaacgccggcaactgggtggaggtaccaatcgatccagacaggtgcgtggtatatgagcccacatacgcggccatatagtcttcaaacgtccgcttatgggcggtttcgcgttcggccactacggacttgtccagcgcacgctcattatcgcgcagggtttgaagctgctcgatgagctgttgatgctccccggaaccggcgtcggtcagtgaatcgaccagtatggcggcagaggcgacgagttgggcgacatccgtatcggcagcaggctgtgcggcggcattcgcggcatcgggattagcaccaaccaccggactgctggaattggaaggcaatacggcgagcgccacggaactcatggagaagtctttggcgttcatatagcagctgaattccaagccggttgcggcttttccagctgcggcgactacggtattggaaccttgcgtggttaccgtaatggagttgtcagcggaaacatcatcagctacctgcgtaggcacggtaaaggcgacaaccgggatcgtacggttggcctccttggtttgcggcttaatatcgatatacacgccgatcagtccagatgcgccggcaacctcgtttgcctcgacgtttggaccgtcaagcgagtaggtgacgctgactttccatggcagggtggcggcggaagcggggatacgagaagccttggacgtgccggaatcactattggcggaatcggtatcagtggaaccgctattgccggaatcggcactggcgccattgccggcgccgcccttccctaccacataccaacggaccggctccccttcggcatcggcgacggcgtacatatcacttgccgtagcgagcaccggaccgtaatcaaccggagtcggacgagacatccaagcaccgccgagaatcgaagccacgcacaatgcgcaactgaccagtgcggcaccacatctcatctacgtatcccattcatacagtcggccactatgggcattccattcccgtattaatgtagtcgctgcgggcaacttgccctatagacgaatatccgaaaggtgcccattcgctgcgggcgaatcaggcgaatacgtcgagtacgcccgggtcgccaccggcatcggcgatgcgctggtggcgcttcttggcttcggtaaccacgaattcacggtacatttcggcaatttccggatcaagcccggcatcgatggcgatgcggtggaggcgctcgatctgatagtcctcacgcttggtgtcttcgggcgcgaatccggcgttggctttgagcacgccgacctgcgaggtggccttgaaccgctcggccagtaatgcgatggccgccgaatcgatgttatcgatggtttggcgcagcgctttgatgcgcgccaccgcttgtgcggtttccgggtgggccgccgcctgggcggagtcgatggtggtcctttgccagccgctgctcgtttcgctcatagattcgaggatactcccgattgcggctttgcacgatgcgcaaagtcagatatctcagatgtcatagtcgccgtaggggatatggctggcatccgcatcgccgaacatggccgcaccattgcccactcccaaaacaatcgaacccattgatacatctttcatctcatatatcgtcagcgtgcatgtgaacgttgacggcaatactacaactgcaatgtgatagttgatgtatttgcatcatatacggcaagggctgcgccccgtatcaatcggggtgcagcccttacactattgttcagcggtctgatcagttgccgttgaccgcgttgccggtgttggcctgctgcacgatggcggcgaggaagtcgcggttggtggcggtcttcttgaggcgcggcaccaacgtctggtaggcctgctcgggctccatgccgcccagcagtcgacgcagacggtagataatcggcagttcctgcgggttggtgatgagctcctcgcggcgggtgccggaagcgttgatgtcgatggccgggaacagtcgcttgtccgccagctcgcgggacaggcgcagttccatgttgccggtgcccttgaactcctcgaaaatcacctcgtccatcttggagccggtttccaccagcgcagaggagatgatggtcagggagccgccgttttcgatgttgcgggccgcgccgaagaacttcttcggcgggtagagggcctgcgcgtccacaccaccggacaggatgcggccggaggcgggggcggcgatgttgtaagcgcgagccagtcgggtcatggaatcgagcagtacgaccacgtcctggccgagctccacaagacgcttggcgcgttcgatggccagttcggcaaccgtggtgtgatcggaggccggacggtcgaaggtggaggagatgacctcgccctggaccgtgcgctccatatcggtgacctcttcggggcgctcgtccacgagcaccaccataaggtggacctcggggttgttggcggcgatggagttggcgatgttctgcagggtgatggtcttaccggccttcggcggggagacaatcagaccacgctggcccttgccgatcggggaaacgatgtccatgatacggccggtgagcttgttcggggcggtttcctgcttcaaacgctcctgcgggtacagcggcgtgagcttggagaactgcggacggttgagcgcttcttcaacgctttggccgttgatggaatcgatggcctgcagtggcacgaacttctggcgttggttgcgacgatcgccttcgcgcggggcgcgaatcgaaccatggacggcatcgcccttgcgcaggccgtacttcttgacctggcccatggaaacgtacacgtcgttcgggccgggcaggtagccggaagtgcgcacaaaagcgtaggagtcgagcacgtcgacgatgccggccaccggcaccagatcctcctgcggctcttcgcggcggctatcacggtcattgcgatcgctacgattatcgcgatcatcatagcgacgatcatcatcggcgttgtcgcgatcacggccacgcatgcggcggttacggcgatcgttgcgatcattacggttatcgcgatcgttgcgatcgctacggtcgcggcggttacgacgcacaaactcgtgatcgtcgttctgctcgccgtcttcggacgtttcctcgtgcttctgcgtgggcagcgtggccaggatatcgtcgaggtcacgcacggtttcttcgctgttttccgcagtgcgacgacggcggcgaggctgctcgtcctcatcatcacggactcggcgaatcagcggaacttccacgtcctcatggcgctcgcggcgacgctcggtaggcgctgcatctcccaaatcgagcgtggccagcagatcgccggcctcatcggccttcttgcgcggcttgcggcgagcgaaatcggactggtcgtcatcgcgacgatggcgggccgcacgcggttcggatgcggcatcatcggcggccttacgacgggtgcgtcgcggttcggtctcgtccttcttggcatcgtcggccacgggaagcggcaaatcgagctgcggttccgtggaggccggagccggagccggcgactgggtggccacgtcagcattgtctgtggtattggcctcagcggcatcggactgcggagccttgacgaccttggcggttttggcggccttgggagcgcgcacggtcacaccggccggcggctctccaccattgcgcgccgcctgcagggtggcgagcagctcgggcttgcgcatggtcgacgtgccgcgcaggcccatctgtttagcgagctctttgagctcaggcagcttcatatcctcaagattctggctatttgccactggttgccctttccataccgaacagacccatgcctatccaggcgttaagagtgattattgcggttgcaccgctcatgaatgttcgctgcgtctctgagttttcacgaacttcgtttactgtacaacgccaactcgaccaacgcaaaacggcccgccgaaaaccaaaaaagctccctctgtgacgagggagctcaacaaggtttattcacttttcttcgtggtaggacttttcggtgttgacggaccacacgttcttcttggacgtcttgccggtcttgatgttgccgacggcctccatggcggtggccatggagtggtccatgttgttgtagcggtgctggccgttgcggcccacgcagtagaggttgccgaagccgtcgaggtactcgatgagctcgtccatgtgctcgtaggtgtcgaagtaggcggggtacgccttcttgacgcgctcacgatgggagtcgatgacctcgtccgggccgttgatcacacgcatgcgggtgagctcggagatcgcgaacttggtgacgtcctcctcgctcatgttccagaacgagtcgccctcctcgcagaagtactcgaggccgacccacacggtgtcgtccacgttcttgaccaggtacgggctccagttgttgaagatctgcagacggccgaccttgtagcccgggtcctgcacgtagatccagcagtccggcacgatcggcggattgccgagggtggggatgttggtggtgttcttgagcttcaggtgcttgaccagcaggcccacggtcacgaagtcgcggtacggcaggccgttggccacctcggtcatatcggccggggcgggcttggaatcagcggcctcgggatcgtcgccggccgcgtcgatggcgttgaccaggtccttgaccggcatcgaggagatgaactggtcgccggaaagctcggtgcggttgccctcggaatcctcgtacaccacggaagacacggcgccatcggtctggcggacctcgaccaccctggcgtcggtcagcaccttgacgccggcggcctcgcaattggactcgacggtctcccacagctggccgggaccgtacttcggataccagaactcctcgatcagcgaggtctcgacctccgcgttggagcgcttcctggggctaagcttctggaaggcgttcttgagcacgcccatgatggacaggcccttgacgcgctgggcgccccagtcggcggagatctgggaggggtggcggccccacagcttctccgtgtagccctcgaagaacatcgaatacagcttgcggccgaaacgattgatgtagaagttctccaggttgtcttccggcagcttgtggaacatggacttcaggtagctgaagccggccaccatggtgagcttgaagcccatggccttcaacgtgttggggctcagcgaaatcgggtaatcgaagaagtggcggttccagaagatacgggacacgcggtggcgcttgagcatcaccttgtcctccgtctccggatcggggccgcccggctccatgtcgtggtcgcggccgagcttcttgtcatcataggagggtgcgccctgcaacggcagaacggtcttccaccaatccatgatgcgttcgtctttggagaagaaacggtggccgccgatatccatgcggttgccgttgtgcttcacggtgcgcgagataccgccgaattcgcgggtcccctccagcacggtcacgtcatagttttccgcgccgccatccttgacgagttcccatgcggcggtaagtccagccggaccgccgccgataatcactacggattgcttgtcggtcattatgctccttataaacgcaaaatcagagacagtttactagaagccccggaatcgcacaccgaaagatgagcgaatgcttacagaattctcccgatatacgaccgatgcgccgtcttccatcagcagaaaggcgacgcatccaatcgtgaggtaggggtattcggcaacgctgcgtcacgcacagcgcggcgaatcggtttggtcttgggctaattcgtcagcgacgaaccttccatagattcagcgagattcctgcaagtgcaaacagcatcatcttctatcaaccgcaagcaaacaagacacacgatggcaaggttacgagtttgaacttttgctatgcgttgtatgaacaatgcgcgacgccccgccgtaagatgacggaatgccgcgcattgtcaatacaggctgtatcagacgattgcctgtcagtgaatatcgtcgggaatgtcgatatcggttttctggacttcttcgacgttcacgtccttgaaggtcacgatgcgcacggacttgacgaaacggctggaacggtagacatcccatacccatgcgtcagtcagctgcacatcgaaatacacgtcctgaccagcggaacgcacgttgaaatcgaccttattcgccaagtagaagcgacgctcagtctccaccacataggtgaacagcttgatgacgtcacggtattccctatacagcgcgagttcggcgtcggtttcgtaattgtcgagatcctcggcactcatgcttgtttactcactcactttccgtatcgcgtttgcggccgcggcccagcgtacgccaccatgcttcctttgagggcttgcgttctgcctgatcgtacggccagttgctttcctcttcgagactgtggcgcgcgtttttctgcgtatcgtcatggtgcccggcctgtggctcgactggctgtgcggccgccggcgtctgggcctgggactgcacgtcactcgtcgtgacggcggctgcctcaccacgctgtgccggctcgggttccggcttgttctgctggatggcgatggaatgctcgcgcgcggacagcgcctccttgacacccggattgtcctcaatcaagtgcatgccaaaagcgtcaagcgaacgaatcggatcgtactcgtcgaccaacgtgtccatgacgataaggtcctgatatttgttgttttcgacatcccacaacgcgtcgcgcgaggtgccggacggcacgaatccaagcgactggtagaccgaaatcgaacggctgttcttttccggcacgctcacccagatgcggtgcatgcccaggccggccggttcgggcgcaaagccgtaagtcatcacacgcggcatggcgtcacgggagtagccgcggccacggtactcacggcccaagatgatctggatgcgggcggacttggaccagccgtcgatgtcgatgaggaaaatcatgccgatgacattatcggtgctggccgcatcgagctgaccgtcatcgtcatggtcggcgtcagtcaatacggcccatgcgatggtgcggcgggattccgggtcgcccacgccggattcggcgggtgcctgaccggcttcccaggcttgggagcggcggacccatgtgtgtacgatggcgcgttcggtgaccgcatccttgccggtgatcttggatgcgccatagaaggcatcaagttcatccaaacgagccaggtcctcgacggtggcggggcgcaggtgcaccatttcgccacggattggcggaatgacgatgctctgtggcagatcgcgcttcagttgcgcttcggtagccatgctcagcgtctcgttggttgcggtcatcggtatacatcccccggttcggcttgtttcggctcacggtccagtgccgaacatatcttactcgactgggtgaacgctggaaatgctctgagacgactttcttacagaatcaataaaggctcccgctggcgggagctgtccaacgaatttgaactggaggatttccttacaaataagtgctcccgctggcgggagctgtccgcgaagcggactgagggtggtcatccgtacatggcgaccaccctcagtctcactccgttcgacagctcccgccagcgggagccagtgaatctaatcagcccttgatcttgcccatgacgaccttggtgacggccttggcgtcggcctgaccgcgcgtggccttcatcacggcaccgatgatcacgcccatcggcttcatgttgccgctcttgagcttctcgacgacatccgggttggattcgaacgccgcgtcgacggccgcctcgatggcaccgttgtcttcgacgatcttgtagtcgtgcttcttgacgacttcatccggagtgccttcgcccttaagcacgccttcgacggtctgcttggcgagcttgtcgttgagcttgccggaggcgatgagcttctcgacctcggccacatcggccggggtgatcggcagctcttcgagggacatacccttggcgttggcttcgcgggaaagctcgcccagccaccacttgcgggcaccggcggccttggcaccggccttgacggtttcctcaatcaggtcgagggcgtcggcgttgaggatgtcgcgcatctgcagatcactcaggccccactcagacttgaggcggttgcggcgctcacgcggcatttccggcatctgggccttcatctcctcgatgtgctccttggtgatgtggagcatgacgaggtcggggtccgggaagtagcggtagtcgtcggcatcggacttcagacggccgccagcggtggtctgcgtagcctcatcccagtggcgggtctcctgcagaatctccttgccgtcgtccagacgggcggcctgacggcgaatctcgtactggatggtcttctcgatgccgcggaacgagttcacgttcttggtttcggaacgggtgccgtagggggcgtccgggctcggacgcagcgagacgttcacgtcggcgcgcatgttgccctgctccatgcgggcatgggagatgttcagcgcgcgcacgatgtcgcggatggcgcgcatgtaggcaccggcgatttcgggagcgcgatcgcccgcgccctcgatcggcttggtgacgatctcgatcagcggcacgccggcgcggttgtagtcgaccagcgaatgatcggcgccttcgatacgaccgtcggcgccacccacgtgggtgttcttgccggcgtcgtcctcgatgtgggcgcgctcgatcggcacacggaagacggtgccgtcttccagttcgacatccaggtagccgttgccgttggtgggcttgtcgtactgcgagatctgatagtcgcgcggcatgtccgggtagaagtagttcttgcgggcgaactggctccactcggcgatttcgcagtgcagggccaggcccagcttgatcgcgtaatcgacggcggtcttgttgatcaccggcagggagcccggcaggccaagg

SEQ ID NO: 960 - DNA, 21295 bp, Unknown
  R117_24m  MAG No. k141_17517
ataatccgcaaggtgcttttgcgtaggaccaaggcgccggcgatgacacgggacaaccacaacagcgaatgacgcacaacgggccgtccgggacacccccgtaaacggtcgcgtcgttttccattggtgtcattacggggtccgggtcccgcaaaacgttggaaaatcagcgtttcttgaacggtaaggtaacatatggctgaatttgtgtttcagatgatcaaggcccgcaagtcttacggcgaccgcgtgattctcgatgacgtgaccctgagcttcctgcccggcgcgaagatcggcgtcgtgggcccgaacggcatgggtaagtccaccctgctgaagatcatggccggcctggagaccgtgagcaacggcgaggccacgctgaccccgggcttcacggtcggcatcctgcagcaggagccgccgctggatgacaccaagaccgtgggcgagaacatcaagatggcgttcggcccgattgccgagaaggtcgcccgattcaacgagatcggtgaagaaatggccaacccggacgccgacttcgacgcgctgatggaagaaatgggcaagctgcagaccgagatcgacgccgccgacggctgggacctcgactcccagcttgagcaggcgatggacgccctgcagtgccccgatccggacaccccggtcaacgtgtgctccggtggcgagcgccgccgtgtggccctgtgcaagctgctgcttgaggccccggacctgctgctgctcgacgagcccaccaaccacctggacgccgagtccatcctgtggctggaacagttcctgcaccagtacaagggcgcggtcatcgccgtcacccacgatcgttacttcatggacaatgtggccgaatggatctgcgaggtcgaccgcggccacctgtacccgtacaagggcaactactccacctacttggagaccaaggccaagcgtctggagatccagggagccaaggacgccaagctcgccaagcgactgaagaacgagctcgactgggtgcgctcctcccccaaggcccgtcaggccaagaacaaggcccgtctggaacgttacgaccagatggagaacgaggcgcgcaacaacaagaagctcgacttctccgagattcagattccggccggcccgcgcctcggttccaccgtgcttgaagccaaccacatccataaggctttcggcgatcgcgtgctcatcgacgacctgtccttcacgctgccgcgcaacggcatcgtcggcgtgatcggcccgaacggcgtgggtaagtccacgctgttcaagaccatcgtgggcctggaaccgctgaccagcggcgagctgaagatcggcgacaccgtcaaaatcagctacgtggaccagaaccgtgaaggcctggacccgaacaagaacctgtgggaggccgtgtccggcggcctcgacttcatcgaggtggccggcgtggaagtgccgacccgcgcctacgtggccagcttcggcttcaagggcgccgaccagcagaagctgaccggcgtgctgtccggtggtgaacgcaaccgtctgaacctggccctgaccctgaagcagggcggcaacctgctgctgctcgacgagcccaccaacgatctggacgtcgagaccctggaatccctcgaaaacgcgctgctcgagttcccgggctgcgctgtggtgatctcccacgaccgttggttcctcgaccgcgtcgccacgcatatcctcgcgtgggaaggcgacgacgacaacccggccaagtggtactggttcgaaggcaacttccaggcctaccaggagaacaaggtggcccgactcggtgaggatgcggcccgcccgcaccgcctgcacaagaagcttgtgcgcggctgagatacgccggcattagtgccacaacgcgctttatacgtcgaaagccgtccctcaggggcggctttcccataattgcccccatgactgccccgccccgcatcccataaaatcccacagtcacctacggcaacgcaccggcaacacaccggcagtgcagcagcaacgtagcggcaacgcaccgcataaccaaccgtttaccttccaaacagtctcgttacatttcgctcccggaactcttaacccccaccggatagactgccaaccataggttggaatacgataaccgaatatcgaacactgcagaacaggaatcgaggaacgccatggctcaggcaaccaccgtaactccattggaccatctggtgaaggtgctgaagttgggcgagccttccgcttaccgcaatcacacatacatcaatggcgagagtatgtacttccccactggccgcgtctacggtggccaggtcatcgcccagtcggtgatcgccgcgtccaaaaccgtgggcccttcacgcctgccgcattcggtgcatggctattttattgccgccggcgatattcgtcaagacctgctgtttgacgtcgagaaccttcgcgacggccgctcgttctccgctcgtcgggtcaacgtcacccaagccgaggggtcgattctcacggccatcgcctccttccaggagaccggtcaggagggtgtggaatttgccgatccgatgccggaaaacctgcccgatcccgaaacgttgacttccgccaaggaactcatgcagccgttcgccgaaaagtcgccgttcgccaatttctatgtcgagaaatcgccattcgatatccgccacgtgacgccgaccgtgatgctgcgcgcagacaaggattccgccgagcatgattccggcaagcagatggtgtggatgaaggccgatggccacgtcgatgtgccgcaggtcatgcatcgtgcgatgctggcactcggctgcgatcaggtgatgatggagccggtgctgcgccgcgccggactgtcgatttccacaccgggcatttcctatgcgtccatcgaccattcgatgtggtggtatcaggatatcgatatcaacgaatggcatttatatgtgcaggatacgcctatcgccgcgcacggacgcggactcggcatcgccaaagtgtatgcgcagaatggcgacttggtggcggccatcgctcaggaagctatggttcgcgtgccgcaggagtagtgggaatcggcttggccgatggtgtggttttttcttctctcccccagtcggctacgcctacggcccctcgccagagggggcttatcacggattatcgcttgtaggcttgggctatgtcgctacggcgcttggcttccttgattttcgggttttcggggccttcgttcggcggtagctggcacaaccattcgccgataatgccgatgatcatgtcggcgatgcacaccacggccacgattgcgcactcggtgacggcgtgtgcatagaaatccgcctcgatatggctcaggctcatcacaatctgaccgccataccagccggcgagcgttgcgcccgccaatcccagtgcctttgccagcaccagcgtatacaccgcgatagtgggattgatgaagctatgcggacgcttcttggggtcggtattcgcgtatttatgcacttgcagggccaagatcagcacgataacgcccagcacggccagcaatccggtcacaatccaaggcgcaccaatcagcgacagtcccgagctttcgccgtaggaggccagaccgatacccgccaacaggcccagcacggcaccgatcacatactgccaccatggtgttcgccgtgttttcatgtccggcctccttatcgttgcgttgctgtttgctgtttgcgaacggccctcgcgcctgggctgttcatcttgatttggttttcgtcactgccgtgcccggctgttcgaggccggataccggtccgtcaccgtctggtttctagcctaccgttcgtaactggttctgccatcagctcaactgttcgacagtatccagttgtccgatagcaatccgacctgtccggcatccggtgccatggccaaaaggaaggccaccgggtcgccgcccagagaagcattcgggtccatatccagccaaggtgccaataccgacgcatggttacgggccgacggccaaggaatgctgcagttgggctcgtcggaagtcacgccttccatgtcgacaaggtcaaggtcgactgccagatcatgaacactttcgatgctgcccaatacggcaatcaggtcggcgggcggcaacttggtttcgatttggatgaccgcgctcatcgcgtccgggccgtcgaaatggctgacatggtagagcggcgagatgccctgtacctgattgccaggaacactgtcgatggaaacgatggtttcacggaacagccgttcggcatcctgcgaggtggaatccagcgaaataatcgccttgcgtgagacgggtgccgactccgacgctgatttttgcttgactgcatgcccgccgagcatccagtcttcgctctcgagctgcacggcgttacggtccggcgcggtggccagcaaatcggctacaggcccctcatgggctccggcgagtttggcgttcggattcagcgccgcccagggagccagcacaaacgcgcgctgccaagcacgcggatggggcaatgccagatccggatccgcgctggtgatgccatcaaagtcgataatgtccaagtccaacggcctggaatcccaatgattctcacgaattcgcccatggttcgcctcgatgctttgcaacgcggcgagcaattcgtggctgcccattgtggtttcaagctccaccacggcgttcaggaaatccggcgtaccgtcggccatgccccacgcggccgtgcggtaaagcggcgaaataccggtcacctgtgtgccgagcagcgcgtcaatctcccgaacggcggctcgcaaggtggattccacctcgcccacattgccgcccaaggccaccaccgcgttatggatggcatgctcttcagcagtacgtccattatcggtggcacgcacgcgcgagatggagaccgatacatctgcaaaagccacgacgatgggtgcgtgaggcttgtgcacggtgacgtcgatggaggcgacggccggcgcatcggcaaggatctcgtccgcgatacgttgggccagacgctcgatcaggtccacatgagggccttcgatgacagccgtgatgtccttggccacacggccgtaatcgatggtgtcgttgagatcgtcggattgaccggctgcggccagatcaaggtgcagggtgacatccacgacgaaggtttgtggccgttcgtgttcgaaggcgagcacaccgtgggtgccgttggcatgtacgccggtaagagtgatggtgtccattggtaaggctttctgctcaaatgctcccctcagtcgccttcggcgccagctcccctcgtccgaggggagccaagacctagaagcaaccaaaaaacggagccaggggaatcatgcgtattcgcgccaggtgttgccggcgatgacggcggcgcggcttttggccacgtcgtgtacgcgcacggcccatgcgccatgttcggcggacagggcggacaaggctgcggtcacgtcatcgcgctgggccatgatcggcccatcagcaccggcagcgcccgcctcggtaagcatcgccgagatgaagcgtttacgggactggccgatcagcaccggatatccagtggcgcggaaggtctcgagtccggtcagcagcggcaggttgtgctcgatgccaggcttggagaagcccaggcccgggtcgatgataatgcgctcaggctttacgccggcggccagcacaccgtcgacttggcgcatgagttcgtcgtgtacgtcggtcaatacaccgtgctcgtagacggaggtgtcctgatcggggttcgcgcccttggagccggcgagccaaccgcgccaatgctgcacgatgtacaggcagtcgtggtcggcgaccacatgcggcagttcggcatccagcgtgccaccggaaacgtcgttgatgatctgggcgccctcgctcagcgcagcggcggccacggatgcgcgcgtggtgtcgatggacagtatggcaccggccggaatcaatgtcttgacggcaccggcgatgcgggccagttcgtcggcctcggacacgcgcttggcgccggggcgcgtggattcggcgccgatgtcaatgatgtccgcgccggcggccatcatgtcgcgcccgtgctgggccgccttggccgggtccagccacaggccgccgtccgagaacgagtcctcggtgatgttgagcacacccatcaccatagtgtgcgtactgtcatgcaacgcctgcaaatcagtcattatgtttccccttctatgtaggtcccaagtgagctccctatgatgagggagcttagtagacactatttatccaaaatgaggctcatggcttcggctcgggtggccggattgcgcagcatgccgcgcaccgcagaggtcaccgtgcgggcggaagacttcttgatgccgcgcatagacatgcacaggtgctcgcattcggtcaccacaatcacaccacgtgcgcccgcatactcgaccagcgcgtcggcgatctgctgggtcaaacgctcctgcacctgcggccggcgagcatacacctcgaccagtcgggcgagcttgctcagccccatcaccccgtccttggcgggaatatagcccacatgggccacgccgtggaacggcagcaggtgatgctcgcacaccgaatacagttcgatgtccttgaccagcaccagttcgtcggtatccacgtcgaagtgcttctccagcacatcggccggggaagcctgcagaccggcgaacagctcgcggcacgcgcgggcgatacggtcaggtgtttccaccagcccctcgcgctcgggatcctcgccaatcgacttcaggaacagacgtacggcctcgcgcacgccttcctcgtcgtatgtgcgtttctcccgctggcaagactctatatattcgttcatctcatctctcccttgtcattgtccacaacgacgtcggcccggcctgcgtacgtgagaaaccacatgaacaggtcgggccgaatcgtcatcgtgtctactcttccggcttcatgccgaccgagcgcttaaggctttcgggaatctccaccggcggcttgtccgagtcggggcgacggtcgttggacagccacaccgggcggaccggagccttcttgatcggcgcgaagatcgccgcaagttccttctcgttcagggtctccttgaccaacagctggcggaccagctcgtcaaggatctcgcggttgtcgttgatgatggtccacgcctcggtgtgcgcggtctccaccagcttgagcacctcgtcatcaatcacttcggcggtgcgatcggagtacttgcgcggctgcagaccgtccatcacagtggtctggtcatcgtcggaaccccacttgatggcaccgagcttgtcggagaagccgtattcgatcaccatcgtacgggcgatgttcgtagccttctcgatatcgttcgaggcaccggtggtcgggtcgtggaagacgatttcctcggcggtgcgaccgcccatcgcgtaggccatctggtcgagcagctggttgcgcgactgcgagtagcggtcggaggtcggcatgacggcggtgtagccgagggcgcggcctcgcggcagaatcgtcaccttggtcaccgggtcggtgttgttcagggcggcggctaccagcgcatggccaccctcgtggtatgcggtgttgcgcagctcttccagagccatgcccttggacttgcgcttcggtccggcctgaacgcggtcgatggcctcgtcgatggcgcggttgtcgatcaactgggcaccggcacgggcgcacagcaacgcggcttcgttgagcacgttggccagatcggcaccggtgaagcccggcgtgcgcacggcgaccatgtgcaggtcgacgtccggtacgaacggcttgcccttggcatgcaccctcagaattgcctcacggccttccagatcaggggcggccacgcccacctgacggtcgaatcgacccggacgcagcagagcggggtcaagcacgtcagggcggttggtggcggcgatgatgatgaggttggtgtcgttgtcgaaaccatccatctcgacgagcagctggttcagcgtctgctcgcgctcgtcgtggccaccgcccatgccggagccacgcttgcggcccacagcatcgatttcatcgatgaagatgatggcgggggcgttcttcttggcctcatcgaacaggtcacgcacacgggaggcaccgagacccacgaacatttcgacgaagtcggagccggccatcgagtagaacggcacgccggcctcgcctgcgatggctcgggccagcaacgtcttaccggtgccgggaggaccgtacagcagcacgccacgcggaatacgagcgcccagcgccttgtacttggacggatccttgaggaagtccttgatctcctcgacttcggccacggcctcgtcttcaccggccacatcggcgaacttggtggtgggggtctggccatcgagtagcttgccgctgttcttcttgccacccatgccgagcatgccgccggcaccacccatgcggctcatcaggaaccagaatagggcgaagaagatgatgaacggcaggatcgaggtgacgaggtagctcagcatgctggtctgctcgatattcgaggtccagcccttttcgagatcaccgttctccacggccttggccacctgtgcgccctgcgcgaaggtgtagtagaactgcacgttcttgccgtagttggtcaccttgccggtgtcggcgtttttcttggtgtagtcgttcttcagcttaaggcggacgacctgcttgttgtccgtgatctcggcgtaggtggccttgccctgattgatcagcgcgaaaccatctttggtgtcaatggtcttcgtgccaccgccggcgaacatctggaacatcagcacgaccatgaccacgagtacggcaccccacagccagggggactgccatatcggccggttctcgttgttgttgcctttgccattgttcccgttattgccacggttgaacgggttggtgaacgggttgccgttgttacggttgttgttcgggttcggattattgccgttacccggcccttgcgggaagctcatgcttgcactccttggtagacggacggcttgaggaccgcgatcgaatcgaggttgcggtagcgttcgtcaaagtcgaggccgaagccgacgacgaactcgtccggaatctcatagccggcgtacttcacatcaacgtccacttctcggcgggaaggcttgctcagcaaagcgaagacctccacggaagcggcaccacgacgtttcagttctgcgaccagccacgcgagcgtgcgtcctgaatcaacaatatcctccacaatcaaaatgtgccgtccgcgaacatcggcggacaaatcctgcctgactgtgacctcaccgctcgacactgtgcccgagccatagctcgaaaggctcatgaagtcgatctgtacaggaatgctcatggcctgggtgaacgcgaccagcgtattcacggcccctttcagcaccgcaacgagcagcggattcttatcgcggtaatcctcgctcgcgagagcggccatctcgtggatcttggcatcgatctgttctttgctgaccagctcgtggtcaatatcttcctcaacgtcagcgattcgcatgcgctccatcttggcacacgcgaatgacgtgtttcttgcgattggctgaataacctctgggaagtgagacgccgccttggccatgccaatcgacgaccagccggtcgatggcggcaatctgggcggcactggcgttcacaccggcctggctcagcgcgtgagcgatgacccgcaaccgaatcgcctctggctcacgtgcaatacgtttgatgccgatcatcaggccgatgccatggcccggatcgttggtatcgtctgcagcacaggctcgtggcgtatcggtcgataccgctgccgacgatgccggccggtcaactgccgtaaccgcctcccccatcacctcgtcggatcgctgatccagatactccttgtccattctggccaaccgtgcgctttcggcgaaatggcgggtgacattgaatccagcgaatcgttcgatggccggcagcaggtcgtggcgtacccgcgagcgcaacggatagtcgtccggcaactcgccgtctaccgcatcgccattggtggggtcatcccaatattccacacccaagtcttcacagaggccggtggtttcgtctcgagtaagggtcagcagcggccgcgcaaaagtcacgccactgcgtgtgaagacctgcggcatgccggccaacgcatccacgccacggctgcgcagcagtccgatcaatacggtttccgcctgatcgtccatagtgtgggccaacagcacggcaatggcacctgattcacgcgccgcggcgcacagctcgttgtaccgggcctgccgtgcggccgcttcgaggccctcaccgcgtgcctgcacggttgtgttgcgcacgatgaccgggcccagtcccaacgcacggcaacgatccgcggcctcgccggcgacctgttcggaaccctcctgcaagccgtgatccacaatcacgacaccgcaacgcacgcccatggacgtgcatacgatatggcttaccgcggccagcgccatcgaatcgcgcccgcctgaacaggccacgagcacgagtggtgcatcggaggcaacggcatggtccccatgctgcgcgaattcgggagcctgcacatcgcatagttccacggcgctcagcgttgttcggaccgcgcctacggccttgcgcaatcgtgcggaatatgccatgtactcaccacccttttctggttataggaactcgtgcgtttatggacgtttacggcctttgtagcccttgatggcccttgatgcctcttttacagccccgcgagcttggtgatgaacgagtcgatggcgctacgcgcggcggcataatcctcaggattgttgaccaccacggcaaacgacaacgctcccccattggtacgggacacattgccggccatcgacgtgaccgtgccgaggctgccggttttgacgcgcaacagaccggccacggcatcatccgtataccgatcctgcgccgtgcccaccaaccccgcgatggatagaccttccgcaccagcagcaccgctctcggtggtcagattacgttgttggacggccgccagcgtgcgtacggtgagccgggagccgggagacaggccggagcaatcggccatggtcagaccggatgtgtcgagaccgagatcgttcagagtggatttgaccgcttccgtgccgccttcaggactgtttgtcgctgatttcgtcaaggcggtgagtctaccgaactcctcggccagcgtattgtccgaatgccgcaacgtgtatgccatgatttcggacagtgttgccgaactcaccgaggccaaaggcgtttcgccggatggagcggtgtttgccgtcacgtctccggtaacggccacaccgttcgattggagcagttcggcgaatttcgtggccacgtcgctggcggtgtgctggaacagttccgggtatccggccggatcatcagggtcggccggcgcaggcgtatcggcggtgtattggcggcctccatcaatcgccattgatgagaccggcgtgaagtagacggtgtagtcgcttaagaccgcgccgccttccgacagacctgcgggaatgcgtgagtcgccgaatagggtgtcgtcgtactcgagattgacggaagtgatgcctcgctgggcgagcgcggccacggtggccttggccaaggtgttcagaccggcacgtccgttggtatggtttgcgtcggaatcgcctgcagacagcagcatgtcgccattgcctttgagggtcaacgtattggtgccgtcatcggattgggtcaggaacacttgggtatccaaggtggatgccatgttcagggtggatgaggcggcgagcgcggtcagcgttttcagtgtggatgcaggctcgcgtggagtgttcgactcatgttcggcagcgacggcgccttgggcgtcttcaatgatcaccgacgtatcgtttcccacgccttgcgtggacagcaattcgttgaccagtgcagaagcggccgtggaatcaatggccttgttcgcgttcagggcaccggcgatggtgccgcctgatttggcggtggccggattggcgaaaacaggtgcggtgacaggttttaacgtcaacaatccgggggccacgtcggtgatgtcggcggcgcagtaccccgcgaacagggcgatggtggtcagtgcggaaatgatgacggtcagtgttcggcgatgcgatcgttgggtccgccgttgcgcttcacgtcgctgacggcgtgataccgctgtagataccatcgtgctccttatgccaaggcaatcatttctgcaatgaggcgaacgagtcgagtgttgccacaatcgagagcattcgcgcatccatcagcttaccgcccagccatgtcccgagtgccagaatgccgatgccattggccagcgcgaccggaataatcgccagccacatgccgccttcggctcctgtcagcagcatgaccagcgccacgatgccagtgggcagcatgagcagcaggctgccaagcatgtagacgaacgggaagaagccttgggccatggcgcggccttgaggcgcggagaacggcttgtccattgaggcgaccgggtacatcagtacacaggaggtgacttcggccacgcccagtccgctcaaggcgatgcccatgcccgtggcgaggaagatcaggccggtagcgaggtcatcgggctgcgcccagcgtccggtcagtgcgccgaccagcacgatgccggcgagatagagcagcaccatgtagacgaccatgatgccgacgtagacgcgtacgcggccgattctgtcggtccggccacgcacgccggcgatgacttccatggtgaagccgcggccgtcatatgcgagcccgttgctttccacgacggacatgaaccagccgcaccagatcagcgactgccagacgaccgcgctgatgccgtgtgcctggaaggcgaagatgatcaggaacaggaccggcatggcgaaggtcatggcttggcgggggtctcgtttgagataggtgatcaggcgtgcggaaaccgcgccggatgccgaatcgggcatccatgcgaatgcgccgatgcctttggcggtctcggacggactgtttgcgccgatggtgagccgttcatgtctcagacaccaggtgcagacggcgaagcagacaatccatgtgacggcaaggatggcgatgcgggcgagcagcaccgcccaggctccggtaagcgcgtcgaacggtagttggaaggccgcgccgaacggcgtccatgcgacgatggtggtcgccgcgccccaggtttcggtgttgaggctgaaggccacgccggagttgaccagaatgttcggcaactgacagatgataacgaacgtcagcacgatgaagatatagaacgcgcctttgccgcgtttgctggtcaccagcgtggtggatagggcgatgagcagtttggagatgctcatcatggtgatgacggccagcactgcggcgaggagggaactgatgattacggctggtcccatatgccgataggccagtgtccagagcatcagtgaggccacgccggtaagggcggggatgccggacaggccggaaagcagcaagccgaattgcaggttgcggtcggcgatgccgtagagcgcgaatttgcgtgggttcatggtggagccttcgccaagcatcatgagctggatgaagccgatgaagatggtcatggtcgcgccgaccagcacgacgactatgttgacgatgcctccggaaccaaggatgttcaacggaaagccatccgcgttcacggtgaagggcggcagtatgccgatgaaccatgcgagcacgccggtgccgatgatggtgccggccgcgagtacggcggaaaagacataggcgacggtctgccacgccgattttcgcagggtggcgagcgtgagcgtccagcgcaggcggaccagggtgatggcgctgctgatcatcggcgggcctcatcggtgggtgtggcgggcgtggcggttgtaagcggaatgggctggaccggctggaccgaagttggtgcttgggcttgggcttgcccgccgtcgagccatgcgagatgggcggcttcgtggcggccgccgaccagttgcaggaagcggtcttcgagttcttcgccggcggcgacctcgtccaccgtgccggccgcgcacaccagaccgttgttgattacggccacatgcgtgcacatcttttcgaccaatgccatcacgtgcgaagagataatcaccgtgccgccggtcttcgcgtattcgatgaggatgtctttgaggttggcgctggacaccgggtccacggattcaaacggctcgtccaggaccagaatgcgcgggctatgaatcatcgcggaggccaggcagatcttcttggtcatgccggccgaataatcggtgaccatcgtgttggcggccccggccaagtcgaaagcattgagcaggtcctgggcgcgacgcgtggtctcatcgcggctcatgccgcgcagcatgccggagtagacgagcaattgcaaaccggtcagtcggtctaagatctggtcgggctggggcatgacgccgatcatgcgcttggccgtgttcacgtcgctccacacgtcatggcccaaaatcatggcggtgccggcgtccggtaccaatagaccggtcaccatattgagcgtggtggttttgccggcgccgttggggcctacaagtccatagaacgagccgaccggaatatcgagcgcgagtccgttgacggcgatcttccggtcgaagtgcttgaacaggccacgaatggacaccgccgcattcggattcggcggccatgcttgtggctgcggttgcgacggctgtgcaggcacgggggcggcagctggcatcatcggcggctgaaatccgacattcctttgagtattgtctaagctcatacatccactctaccccaccagccaaccctcagcgaagcaaacgcccgggttgctgttggattgccccgctgagcggctccggactagcggactcggtcaacccttatgcgcgatgggcttccactgggctttggagaagagggcctggaaggagatcggcacgtagctgagaatgtaaatcgggaagctgagcacataggcgagcagctccttgttcgtggcaccgatctggtcgcgctcgacaatgatggtcaatgcagccaatgccatcaggcccaacaccgatatgatgatgccactggaccaactggccagcgattgcagctggctcggccaactcacgaagccacacgcggcgaacagcaagcccattaccgcgcgaatcacgcccaacacggtaaacggacacagcatcaaggtgaagtcgatgcaggagaaatcacgttcgcgaaccgcgcgtttcagcaatgccgagccataataacggaatacctgcaggaatcccttgctccaacgcaaacgctgacgccaactttgcgagaaggtaaccggctgctcgtcgtagagaatcgcagtaccgcaatagccgatgcggtcgccatgcagaatcgaatccatagtgaattcaagatcttcagtgagcagatggaacttccatcccttgttccgcttcatcacctcgcgggagaacatgaatcccgtaccgcccacatggcaagaggaaccgagaatcatacgcgagttagacaggaatcgcgattcacggatgaaccacagcgcagaaccagaagacacccagttatccgccagattcaccgaattacggtagctggtcagaatcttgaatccggagcagaacgccttgttcatttcctcgaagtagtgcttgtccagcttgttatcggcatcgaacacgaagtaggcctcataatcatcggccacaccgatgtcgagcatatgccccaacagatacgtcagcgcatatcccttgccaaccagctcaagattgtggcgttccaccacatggcagcccaaagaccgcaccacgtcggcggtgttgtcggtgcagttgtcggccaccagccagatgtcgatgaggttggacgggtaggtctgatcgcgaatcgacccaataaggttgccgatcactttttcttcgttgcgcgcggagatcagcacggcataccggttggtcatcggggcgtcggggaagcgcacgggcttggcgaacagggacatcacgatgcacagtccctgatatatcatgccggcaccgccgacgatcatcagaagaatatcgagtacggaaagcagagtcatcagcgccaccctgccctaggattgctggaggcagattgatcagactgcttggtttgcttgcgttgctcgggctgctcaggctgttcggcggaccgctcaggctgctcgggctgctcagactgctgcgtatccgcggcaccacgctgcggaatcgccgccgtatccggctcatcaaagcttgcatccgcaccgactgtattatcggcgttatcggtatcatcggcatccgactccggctcagtgccgcgtaatcccttgcgagcgctggaggatagcacgttcttcggaatcgccacggtggcggaatcgtccaaatcggattctttcgtctcgtgcgacggaatcgcataaatctgttcctgcagcaaacgcagttcctcattcatcggcacgcggttggtggatcccctggccgcacgcggcatgtgctcgccgattggctgcaatacgtgctcgccgaacgcctcggacgcctcgacgatcttggacttcttctccggagtcggatcgttcatcagcggtgagtcaatcagctcatagcgcttggtgtacgcacggaagatggcctgcagcgatgcggtgaccggcagcgccaggaacgcgccgaatgcgccgaacagcgagccgaacgccagcaccgagaggaaggcgacggccgcgttgatatccatcgtgcgctgcgaaatcctcggcgagagaatcaggttctcgatctgctggtagacgatgatgaacaccagcaccgccacggcgtacgtccacccgcggttgccccaagcgaacagcaccggcagcgcaccgccgatataggtgccgaccgtggggatgaactgggataccacgccgcagaacagggccaacggcagccagtagggcacatgcaggatctccaagaagatggcggtgcaggtggcgttgatcagcgccagaatcgaacgggagaacaggaaggacgaaatctggccttgggccacggtccacaccagcaggaatcgacgctgcgtgttgggggccagccactggcagaaggagcggcgcagctttgggccggcggcggagatgtaatacgtggtcattaccacggtcatgaggttcagcaggaaggagaacaggccacccaccgtactcatggcggtgccggcgaaatcggtgacccacgaggtctggatattgttgaagatttccatgccaagattgctgatttccggcatcttgaacgtggcgtgctggtccacgaactcacgaatctgcccatacattgccggcaaaccgcggaccatggcaatcatctgctgtacaaacatattgccgaacagcgtgagcagcacacccacgaccacggccacgcccaccagactgacggcggaagccacgccacgcttccagccatgagccaccagcgccaccaccagcggttcgacggccagcgccaggaacagcgagatgatgatgtcgaacaccagataggagatgtcgccccacgagcgccagcagaacatgaatacgatgacggcgagggccacatacagcagcgcgcggccgaaccattccggtggcctgcgggaatctcccttggcggggaacaaagtaccaaagtcgatacgattctcgtcgtccgggtctgccccggcttctgcggcaccgcttctcgacgtgtcggtgctgtttatgtttcgcgcgcgttcgctcatggctccccattgtagcgaggggtttgaagctcggatacgccggcggcgtacacccgcttttctattgttgatgtcatgctcaacgtttcgatcatcatcccagcgtggaacgaagccgaacgcatccgcgactgtctgctgaacgccactcgccagaccatcatgccgcatgaggtgctggtggtggacaatcgttctacggacaacacctgcgcgattgtcgaacagttcatcgccgaacatcccgaggccccggtcaaactgttgcaccagaacgatgaacaggggctgattcccacccgcaactttggcctgaacgccgcgaccggcgatgtgctgggccgttttgacgccgactgtatgatccggcctgactgggtggaggtggtctccggcatcttcaccgaagacccggccgcgatgggtgccactggtccggtgatgtattacgacatgccctcacgtcatttcgggttgaaaggcgacaattccttacgcaagcgaatctaccgtgccgatggcggccagccgctgctgttcggctcgaatatggccttgcgcgcttcggcctggcatcaaatcgcgaatgaggtctgccgagataaggccgatgtgatgcacgaggatatcgatatttccctgcatctgatgggcaagaatctgaaaaccgtgtactcgccgcgcatgatcgccgcgatgagcgcgcgacggatggacacgtcgctgagttcattcctgaactacatgcgacgttttaagaatacgtttgatgcgcatccgcaacatacgcgcacgcataagccggaggtgttgttcaccgccatgtatccggcgatgcatatgttctacccggtgtggcagaaagtgctgaattccgcggatatcaatcctgctgaagccgcgtggatcaacgagcagatgaaactggcggaggcgcaaggcaagcagctgtacgacgagacccccaccgacgaagtctacgacgaaaagcacgaaaagtagctggatatacgagccccctctgcttatgcaagctccctctgatgagggagctgtcgaacgaagtgagactgagggagagactgcgacgcagccgctaaaacatcgaatcggccgcaggccgatacctattattcagcggctacgccgcaacttctctcccagtcagctacgctgacagctccctcatcagagggagctaatgtttaccgtcatcgactgatcacatcagcgacttgtaaatcgcgagaatgtcctcttcggtggcctgacgcgggttgccgggggtgcacacgtcgttgaaggcgtcgtgggccagcggttccagatcagcctcggtggcgccgacctcgctgatcgtggtcgggttcttcagatccacggtcagcttgtggacggcctgcacggcctcttcgcgcaccttctccaggtcgccggtgtaggcgtcctcgacgccgaacgcgtcggcgatgtcgcggtacttctcgcccgtgtagtccttgttgtattccatgaccggggccagcagaatgccgttggccacaccgtgggccacgcccagacggccgcccagcgggtgagccatgccgtgcaccaggccgaggcccacgttggagtaggccataccggtgatgtaggaggcgtacgccatctgctcgccagccggaatgtcgccgtcggcggacttggctaggttcttggcaatcatgcgaatagtctgcatggacaggcagtcggacaggctccaggcacccggggtaatgtaaccctcgatggcgtgggtcagggcgtcaagtccggtggcaaccttcaggccgcgcggcatggagtcggtcagatccgggtccacgaaggcgacgatcgggatatcgtgcgggtcgacagccacgaacttacgcttgttggcggtatcggtgaccacgtagttgatggtcgtctcggaagcggtaccggcggtggtcggcacgccgaagatcgggacggacgggttcttggtatccgcgacgccttccagggacagcacgtcggcgaactccgggttggcggtgatgatgccgatgcccttgcaggtgtcttgcggggaaccgccgcccaggccgatcaggaagtccgcaccggactcggcgaacttggcgacgccgtccttgatgcactcgaccggcgggttcggcttgacgttggagaacacctcgtacggcaggccggcctcatccagaaccttggtgaccttctcggcggtgccggtctccagcagtaccggatcagtgacgataaatgccttggtgaagccgtgctgcttggcgacggccgggatttccttgatcgcgccacgtccgaagtatgcagtctggttgaaaatcatgcggtataccatagggactctccttttgagctagtgtcttaactggtggtccactcactctttgagtggtccaacggttccccagtctactccgcgcatgagcattcacctgaaaacacgctgaaagaacaacactgaaaataatggcaagaaatggcggaattccgcacttgtcgaattattgtccattgaccaaaccagttcaatcgcccgagatctcaacgataagaccattttccggagtcgcttggtgctctccgagaaactcgtctctcatccgcttacttcgcgcgtacacaatcaatatgcgagatgcctaattccattcgtgtttcatcagccgaacgcgaactggttcaccagatggtgtattcaacggtttcagtctcttgaagaggactaagatacctcgacaattggggtgatcatcataagagaatgaggcagataatggcaaatggcaaggctatgacggtcggcgagatggcgtccctgtttctcgaccccgacactcccgttcgtatcgacgcttttgacggctcgcatttcggcccggcagacgcggatttgaaggtcaaaatcgccgcgccgaactgcatgtaccagctgctcgcgcacccgaatgaaatcggcatcgtgcgcgcatacattctgggcgatttcgacgtggacgacattgactacgccgacccgtatccggcgatgcgcaagctggtgtcgctggccaaatacgttcgcccgctcgctcccgcatccattgcccgcgtatccgccggcattctgagtcacggcttcaagaagccgccggtgcccgccaccgagggccc

SEQ ID NO: 961 - DNA, 21237 bp, Unknown
  R117_24m  MAG No. k141_17750
gcggctctggaacgccgtttccagccgattcaggtgcacgagccgaccatcgccgagaccatcgagatcctgaagggcctgcgttcccgttacgagaaccaccaccacgtgaccatcaccgatggcgcgctgcagtccgccgccgagctgtccagccggtacatccaggaccgcaacctgcccgacaaggccatcgacctgatcgatgaggccggtgcacgcctgcgcatcaagcgcctgaccgccccgcctgagctcaaggaactcgacgagaagatcgccaagatcgccgccgacaaggacgaggccatcaagggccaggacttcgagaaggccgccgaactgcgcgacaagcaggagaagctggaagccgatcgcaagcagaaggaagactcctggcgcgaaggcgagtccgacgtcaagatggtcgtggacgaggacgtgatcgccgaggtcatcagctccaccaccggtatcccggtgttcaagctgactcaggccgagtccaagaaactgctcagcatggagacggagctgcacaagcgcatcatcggtcaagatgaagcggtttccgctttgtcacggtccatccgacgcacccgcgtgggattgaaggacccgaagcgcccgtccggttcgttcatcttcgccggccccaccggcgtcggcaagaccgagctggccaagacgctcgccgaattcctgttcgacgatgaggacgcgctgattcgcgtggatatgtccgagttctccgagaagtacgcggcttcgcgactcttcggcgcgcctccgggatacgtcggctacgaggagggcggcgagcttaccgaaaaggtgcgccgcaagccgttctccgtggtgctgttcgacgagatcgaaaaggctcatccggacatcttcaacacgctgctgcaggtgctcgatgacggccacctgaccgacggtcagggccgcaaggtggacttcaagaacaccatcatcatcctgaccaccaacctcggtacgcgagacatcgccaaggccgccaacacgggcttcaacctgggtgccaacaacgagtccagctaccagcgcatgaaggaccaggtcagctccgaattgaagcagcagttccgcccggagttcctgaaccgtctggacgacatcatcgtcttcaagcagctcaccgagccgcaggtgcgccagatcgtggatctggacgtcaagcagctcaacgaccgcctgttcgaccgtcacatgtcgctcgaactcaccgacgccgccaaggacctgctcgcgcagaagggcttcgacccgctgctaggtgcccgtccgctgcgccgcgtgattcagcgcgacatcgaggacgccatctccgagaagattctgatgggcgatctcgaagacggtcagcgcgtgattgtggatgcggaaggcgagggtatcctcggcgaattcaccttcaagggggagaagttcgaggagccggccgccgccgataagcccgccgaagacggtgccgccaccgatgccgaaacttcgtccgaagccggtgcctccactgatggcgagactccagccgacgccactccggccactgaaccagccgaatccgctcccgccgattccggtgacgctccgcagaagtagtccgtttcgatagcgtagctagcgcataccagcaaagctccccttgacaggggagctgtcagcgaagctgactgaggggtagacctacgcacacataatgtgcacgttttttggtctacccctcagttgcctctggcgatagctcccctgtcaaggggaactactgtttgttgtcgggttattgcagcagggcgagtccggtgtcgatggtctcctcgcgggtaaacagcgtgcggccggcgcgcaccgaacgcaataccgagcagcgctcatacacggcgttgaacacactatcggcgtccagcacaatgaagtttgctggcttgcccgtttccaagccgtacatatcgcgcaggcccaacgtagtggcaccgttgacggtcaggaacttcaacgcatcgtcgatttcttcaaagctcatcatctgtgccaaatgcagcacataatcaagaatgagcatcatattgccattgcccagcgggtaccacgggtcctgcattgaatcctggcccaatgacacattgacacccgcctcagtgagctccttgactcgcgtgatgccacggcgcttggggaaggtatcctgacggccctgcaaatacaggttctcggtgggggcgcaggcgaagttgatatgcgccgccttaagcagcttggtcaggtggaagaagtaggcgttgtccgccgatcccagcgaacaggtgtggctggcggtgaccttcgggccaatgccagccttatatgccaacgccgaaagcagctccacgtaacgggaattcggatcatccgtctcatcgcaatgcacgtcgatgagcttgtcgtatttcgaagccaactcaactaccgtgtgcatggaatgctcgccaaactcacggcactgttcgaaatgggggatgccgcccacgcagtcggcacccatcttgagtccttcctccaccagctcggcccccgattcgccatgcgggccctcgtaggagtacatgccctcctgcgggaagctgacgatctggagagtgaccgtatccttcaattcctccttaagctccagcagcgcctttaatgaggtcaggttcgggtcggtcacatcggcatgggagcgaatgagctgcacgccatgcagcatttctttcttaatgccgattttcgcgcgctgcttgatctcgtcgaccgtcaagtcggacttggtctcactccatcgctggatgccctcaaacaaggttccgctttcattcaccgcaccgggcttgcgggccgtgaatacgtaatcaaggtgcagatgcgtatcgcagaacggtgggcagacaagtttgccgcccagatcgaccacctcaatggccgccagatcaccaccctgagcctcatattgttgcgcgagtccggggccgaatgcggtgaacacgccatccgtgacgagaatgtcctgcaatggcagggtgcttgcagccgtgctgccgggttctccggtggcgatatgtgcgttggtgaacagtgtggtagtcatcgtcgctccttcaactggtgtgttgccgaacggttacgtgaaccgactgcccgcgtaaccaactgaggttattgtcaacagcacgctttgcggtgaggttaaccggaacgaccggtgttccgcgggggaatggacagattgtatgactgtatcgattcgcagtgcgcttcataacacgcagttcaaacgagccgatcctgtggtggaggtcgaaggcaaagacctcgatacgccagtgcgatgggtgtttaccaacgagcgagaggatgtctccagtttcctttcgggcggtgagatgctgattatcgagggtaacgctctgctcgccgccgattggcacggcacgttaggacaatatgtagcaagcctggcacaggctggtgtcgccgctctggtggtcgaactggtggagggtgtggtgcggatgccggacgaactggtgtctgcggccaggctgcatgggttgacgttgattggtctgaaatctcgcgtaccttttgtcgacatctgtcagagtgtcaataccgctatcgtgcacgaacagatgcacttgcaattggaggtggacacaatgtccacttcattacgtgagggattgtcccgtaccggcaatatcgaggctgtggccgaaaccattgcgtcgctgttcggcgaaagcgtcgccattttcgatggtgacggtctgttggccgctcgagcgggtcgtgcgttcgatgccggcaacgaatcgagcgccgtcatcgcccttgaaagtcgctcccggccggtgggagcattggagatcacgcaacgcgccatgactttcgacgccacgatgcgtcgggccatcgccaccatcgtgtctccggtggccgccctctatattgacggcggcgcgcgcatgggcatgatgcatcatctgagtatgggcccggccgacggcgtgcacgtcaatacatttgaggcgcaggaagcgcatgcgatgctcgacgcgctgggttttgccggatcatgcatctatatgccattcgcttttcggttcagatcggtggtggaaggcatcaaccatgtatcgacgatggtcgaacggttcgaagaacggtcgggatgcgccgtctcctgcatgctggaaggtgacttgatggtcggatggtgctccaccaccgattcctcagacggtgcggccgcattcggacgccattgcatggatgcgcttgccgtactggaaggcgacggtgtgtacgtggtgcatggccgagtggcattggacacggtgacgctggtcgacgggttcgcggtattgcgtgacatcgccaatcaggaaccggcatacgggcgaatcgtaagtaccatgtccgcactcgtcgaccgtttcgtcgcatcctctgatatggacaaggcgatgcgcatgctcgtggtgcagaccatcggattcgaggtcgccgcctctccgttgttgctggacacactgtgcgtctgcttcgacaacctcgatagcaaaaccggcgcgtgcgagcaattgggtatcagacggcaaaccctgtacaaccgactggacaaagtgacacaaatggtcggcgtcgactataacgacaaaccgaactggtcgatgctgctattcgccgccaaactcacgaaatcatggcaagaacagcatggtgaataatgcgccagcaccactgggcaacctgtccacttctacgccgaacgggttaatcgacgattcacgtttcagcaaatactcaagggcatagtcgaggctatcgcggcgctggtcgacctgctgcgaaacgaattcccacttgaatcccattcagtcacacgaacagcacatccttgaaaggacggtgacatcatgagttccgcaacgattactacatctgcacgactgatgaatttcacccctcaaactgaagaacaggccatggtcaggaaagtcgcggtatcttccttccttggcaacttcatcgagtggttcgactacgcctcctattcgtacttcgccaccaccatcgccctggtgttcttcccaaccgacaatcacaccgtcgccatgctgcagaccttcggtgtgttcgcgctatccttcatcctgcgtccaatcggcgcactgttctggggtagctacggagataagaaaggccgtaaagccgcattggcccactcgattatgttcatgtccggtgcgagcttcctgattggctgcctgccgtcttactcggtgatcggcgttggcgcgccgattctgcttctgctgctgcgcatggtgcaaggcttctccgcttccggtgaatatgccggtgcggccacattcctcggcgaatatgcacccacctcaaagcgtggcatctactgctcgctgattccggcgtccaccgccatcggtctgctcgctggctccacgctggccacgctgatgaccgccaacatgaactccagcgcgatggtcggttggggatggcgtgtgccgttcctgctggccggcccgcttggcctgattgtgctgtacatccgtaccaagctctccgattcccccgtgtaccagtcaatgaacgatgctcttgagtccaagagcgccgcctccgctgacggccaattcgtttccaagagcggcatgttcgccccgctcgccgaactcttccacaaccatctcaaggccctgatcatcagcttcggagcctgcgtgctgaatgcggtcggcttctacaccgtgctcacctacctgccgacctatctgtctgacaccgtcggcatggacgccacccagtccggcaccatcaccaccatctgcttggtcgcctacgtgttcatggtgttcggcatgggccacatctccgacaaattcggccgcaagaaggtgctcatcggtgcttgcgtggcgttcatcgtcctcaccgttcctgccttcctcatcctcaacacctcccagttctggcccgtgctgctggttgagctggcaatgtgcgccaccctgaccgccaacgacggtaccctgtccagctacctgaccgagacgttccccacctccgtgcgcttcaccggattcgcgttcagcttcaatctggccaatgccatcttcggtggtacggcctcgttcatcgccactggcctgattgccctaaccggttcatccatcgccccggcctggtacatggtgggtgttgcggccatcgccttggtcgcgatgattctttcccatgaaaacaccgacaaggatctgaatcacatctgatctcctcagctccggctcctttcccgagggagccgggcgtattcattgaccatccaatccaccaccaacccaaaggagtactgcaatgggtagcaaccgccgtatggaccacatgacctggccggaattcaaggaggtgaagactcatcccgtcatcgtgccgatcggttcgaccgaacagcacggccagcatctgcccatcggtaccgacgcggtactcgccacgcgggtcgccgaagatctggcggaacgcatcgacggcaccgtgctgcccaccctgagctacggatacaagtccaagccgctctccggtggcgggccgctgttcccgggtactatcgacatgaacggcgtgacagtgatcacccaaatgcacgacgtgctgagcgaacttatcgccgatggcttcaccaagatcgtcgtcatgaacgcgcattttgaaaacgaggcgttcatcgtcgaggccatcgacctggtcacccgcgaaaccgggggagtggccaccatcgtggaaaccaattggtgggacccggttccgcagtcggttatcgacaaggtgttcgatggattggtgttccccggctgggcattggagcatgcggccgtcaccgaaacttcgttgatgctccactacgcgccggaactggtgcacatggaccgtatggtcgaggaagccggtgccacggcgaaatcctatgtacgctacccggtgcgccaaggtgacgttcccgctcacggcggactcgccaatccggccggctcaagcgccgaacgcggccgcctgattgccgaggcgtgcgtggatgcggtagctgagatctgcgtcgaggaatttgccgagtaatctccccttgccgacgcattcgtagtgacacgggttgcaaaggcctgaccctgatagtacggggtcaggcctttcctatcccaagacgccgctaagaattcacctgagagtcgccttcctaggcatggccgttcaatcgacgatcctagcgtgactggtgtgagcaggaatatgaagaaccggcggtgggccggcaagcgatcggggatcgcttttggtgcagtagcgcttatccttacggctctggtggttccttatgcttgtgcgggaaccacgggagccgttcctttttccggcgataatccatcttccggcacccgtacggtgaccatcgccgacatcactgattttcacgggcatatcgaacgtggtgcggacaacgccaccgccttcaccgtggccgacagccataatcccggcaatatgatcccggtatcgaccggcgatttggtgggaggttccccgtatgagtcggcggtggagaaggaccaacccacgctggacatggccaaagcgtggggattgacgatttcggcggtaggcaaccatgagttcgaccgcggtgtcgccgatttcaacaatcgcatcgctgatcccagcaatggcatcgactggctgtgcgccaacacgtctgccgccagtaagtcgcctgacggactgctgagccatgtacgtgactctacgattcgaacggtgaacggcaagcggatcggtttcgtgggcgcccttactgatgcgctcggctcggtagccactccgcagattacgcgtgatgccgatcttgacgaacgggcggtggacgcgatcaatcgcgtggcccgtgaactcaaacgctccggaaaggtggatgcggtggtggccttgctgcacgccgatgcctcagccgccgccgatattgggcgagatgttgatgtggtatacaccggccacaatcatgcgatcaagcgtggtacgaccgctggtggcgcgcctatttacgaggcgggcagcttcgggcggaatatggccgtgcaggatttgatcatcaccggtgccgggcgtcgcgccacggtgcgagtggccgatgtggacctcggcaatggcaccagccatacggcggttgacggcgtgctgggcgtggaagggcttaatgcgcatccggcgcaagccgcttggatgtctgccggtgctgaggcgaacgatgaggtatcgcgcgctcagcatatttaccaggcggcggcaacatattcgaatcatgccggcaacgcggtgattggcaccttggcctccggcgtgaatttcgacaaacaaggttcggataagcacgggaatacggtcggtgtgctggtggcggacgcgaaccgcgagtcaatcatgaagcatgtgtatgccggaaatcgtttgccggtaatcggattttcgaataatggcagtctgcggactccacggcttgatatgaatggcgatggcaaagtcaccgtgcgcgaggtggatagtctcatggccttgcagttcaaggccgcgcatgagacgctcaccgggcgcgatgtgaagagagtgctcgccgagcaattccaccgtgacgatgggcgactggagcggcgctggctcggcatctcctcgaacgtgacgtatcggtatgccgaatgcggtacgaccggtgggagcggcaatgccgatgccgccgctgatactgatgccgccgctgataccaacgctgacgctgacgagtgtgctgccgacgaacatgcggcggttcgtatcgtgaacctcgccgttgacggtcgaccgattgcggacgatgacctggtgattatcgcatccaattcatatctgcttcagggcggcgacagttaccccgccttccgtgccggaaccaattacggcgagctgaatatgccatacagccagccgttgcatgaatatctggccgcacatcaagggctcacggcaattgttgcagcaccggtagggactcaggcgtaagacaccaattgctgggtgactgaggaactatggggtggagttatgagtatagggcagaagaaaacggcataaatatgacgaagctcccctcgctgaggggagctgtcgccgtaggcgactgaggggagcttgcggtataaccgtaaactcccctcagtcagccttgctgccggcttccctcagaggggaacctggcacgagacccttacttgatggcgttcagccactgctccttggtggccttctcggcttcgagcttggccttcttcttcgggtcggattcggccgcgatcttggcgtcgagctcggcgagctgggcgttgagctgctcctcgaagctggacttgcgggcgtcggcctccgggtcggtctgcttccaagcggcatcctcgatggccttgatctgcttgtcaacggcgtcgagacggttctcgatgcggcgcatatcgtcacgcggcacgtaaccgatctgatcccactcttcctgaatcttggccagctcctggcgggccttcttggcctcggcgtcggtcttcaccggcaccagagcctcggccttgaccagcagagcctccttggcagccagattctccttctcggaggagttgatctgatcgcgatcagcctgacgagcgttgaagaaggtgtcggcggcttcgcggaacttggcccacagctcgtcgtcctcgttacggccagcgcggccggccttcttccaacggtccatcagatcgttgaacttgcgggaagtctcaccccaagcggtggaatccttgagctcattggcctcggcgataatcgcttccttggcttccttggcggctgtacgctcgttgtcgcgagcctgagcccacttgcggcgagcctggttgaaggtggtgcgggcggcggagaagcgcttccacagcgcctcggcctccggcttgtcgatgcgcacggtggtgcgctggtggttctgccactcgtcgaacaggttgcggaacttgtcggcggtggagcgccagttggtgttgtcgcccagggaggccgccagagcttcggccttctcgacgatggtggtgcgctcggcgacggccttggcctgagcggccttgcgcgcttcggcgatctcggccttcttggcctcgccggcggccttcagttccacgtaacgggccttgagggccgcgaggtcgcccaccaccgccggttcggcggtttcttcgcccagcagcttcacggactcgtcgatttcacgggccttgatgttcggggaagccagacgggtggccagcagatcgagcttggccttgagatccaggaaacgacgggcgtacagtgccaacgcctcttccttggagacatccgggaactggcctacctcgcgctcggcgtcgccatccttgacgaagacggtgccgttgtcatccacgcggccgaaggcctcggcggccttgacatcagcctcggaataggtggcggtggcggcggccggggcggcagcgcgcggcttggccgacggagtcttcttggcgaaggcggcgggggagggcgcgtgcggtttcggcatggaagcgggggacggagtcggcgccggcgtggccgcgctggcttcgggtgcgggtgtcgttgcctgctcttcgggcgcagcggtgtttacgggttcggtgacagtttcgtcggccatggccagctccttaaagcgtagaatgcataagcgggagcgtctcccatcccgggcgaaccaggaagttttgacgcaaccctcacctattatattgatttcgtggctaaaggtgcatcaatatcaggattcccggagtggctcccctccgaacgtgttgtggagcagcgtgttatcgatacgcttcgtaaggtttttgagctcaacggcttcatcggcattgagacgcgagcggtggaaaccggcgcttctttgttgaaaaaaggcgagaccagcaaggagatctacctgctgagccgtttgcaggaggtcggtcatgaatccgacactccgattgaagagcggttgggcctgcatttcgatctgaccgtgccgctgagccggtatgtggtcgagcactcgggtgtgttggcgttcccgttcaagcgctggcagattcagaaggtgtggcgtggcgagcgtccgcaggaaggccgcttccgcgagttcgtgcaggccgacatcgacgtgatcggcgccggcgacctgcccgaccactatgaagtggaactgccgctggtcatggtctccgcgctggaagagctgcgcgcgtatggcctccccaaggccaccgtgcacgccaataaccgcaagctgtctgaaggcttctaccgcggccttggcctgacggacgtcgaaggcgtgctgcgcgagatcgacaagctcgacaaaatcggtgccgatgaggtggcccgactgctcaccgagacctgcggcgccaccgaagcacaggcacgcgcctgcctcgaattggccgagctcaccgcctccgacggtgccgagcttgccgccaagttcgatgcgctgtgcgagtctcacggcatcgccaaggattccgaggcatacacgctggctcgtcagggacttgataccctggccatgatcgtcgacgaggccgccgccatccgccccggttccgtcatcgccgacctgaagatcgcccgcggtctcgactactacaccggttccgtctacgagaccttcctcgacggtgccgcatcactcggttccatctgttccggtggccgttacgacaatctcgcctcccagggcaaccgcaagtacccgggcgtgggcctgtccatcggcctgagccgactggtcagctacatgctgcacgctgccggcgcgcacgccaaccgcgtcagcccggccgccgtgctggtcgctgtgtggaatgaagaggaccgcccggccgccaaccgtattgcgaaccaactgcgtgcgcgcggcatcgccaccgacgtggcacccaccgcggccaagctcggcaagcagatcaagtacgcggacaaactcggcattccgtacgtgtggttcccggccaccgctgccgaaggtgcggaaggtgcagagcccgctggcgacgaggtcaagaacatcgtcacgggcgagcaggttgccgccgattgcacgtcgtgggagccggatactgtggttgcccagcaaaccgtcgaaatctgacgtattcgcgcgaaaaatcgaggagaaacaagataatgagccagacggcttacagaacacatcatgccactgaagtgaccgaggccctggtcggccagaaggtcaccctcgccggttgggttgaccgacgccgtgatcacggtggcgtggccttcatcgaccttcgtgattcgaccggcctcgtgcaggtcgtcatttacgacgaggatatggcccgcccgctgcgcagtgaattcgtgattcagattaccggcgaagtgcgcctgcgcccggatggcaacgagaacacccatctggccaccggcaagatcgaggttgtggccgagaccattgagatcctcgccaagtccgacgctctgccgttccaggtttccaccgctctcgagaatgagtccgagaacaagctgccgggcgaggacgtgcgtctgaagtaccgttacctcgacctacgccgcccgtccatgcagcacaatctgaagctgcgttccgacatggctaaggccgcccgccacgcgctggaagacatggacttcaccgaggtcgagaccccgaccttcatcaagtccaccccggaaggcgcccgcgacttcgtggtgccggcccgtctggtgcccggttcctggtacgccctgccgcagtccccgcagctcctcaagcagctgctcatggtctccggtgtcgagcgttactaccagctcgcccgctgctaccgtgacgaggacttccgcgccgaccgtcagcccgagttcactcagctcgatatggagatggcctacgtggaccaggaagatgtgatggccatgactgagaaggtcatcgccgccatctggaagtccgccggctatgaggtccagctgccgctaccgcgcatcacctggaaggatgcgatggacaagtacggctccgacaagccggacctgcgcttcggcaacccgctggtggaactgaccgagtacttcaagaacacgccgttccgcgtgttccaggccccgtacgtgggtgccgtggtcttcaagggcggtgccgccacgccgcgtcgtcagttcgacgcttggcaggattgggctcgtcagcgtggagccaagggccttgcctacgtggtcttcggcgaaaacggcgaactcaagggccccgtcgccaagaacctgtccgatgaggagcgcaacggcctgcgcgaggccgtcggtgccgaggaaggcgacgccgtcttcttcgccgccggttctcgcgagtccgcccagctgctgctgggtgccgtgcgtgtggaactcgcctcccgcgaaggcctgctggatccgaagaagttcgctttcacttgggtcgtggacttcccgctgttcaagcccaccgacgatccggatgatgacgatgtggctgtcggccactccaagtggacctccatgcaccacccgttcaccatgccctccaaggattggatcgacaagttcgacaaggatcccgagcacgccatgtccgattcctacgacattgtctgcaacggtgaggagatgggcggcggttccgttcgtatccaccgtgacgacatccaagcccgtgtgctcgatgtgctgggcatcaccaaggaagaggccgacgagaagttcggcttcctgcttgaggcattcaagtatggcgctccgcctcacgcgggtctggcccttggctgggaccgcaccgtgtccatcctggccggtgctgactccatccgcgacgtcatcgccttcccgaaggccggcggcggccgcgacccgctgaccggtgctccggccccgatctccgacgagcagcgcgccgagaccggcgtcgactacgacccggacgccgacgaaaactaatctacggagcgtataccgcctttcctcagcactcgacgcaccttagtgcgccttcggcttcgaacggcggtctccgcatgcgtagattaattttcgaggagtaatgctccggtgctattagccgcaaatggcccttggaataattccaagggccatttgctttttgcgggtggggcccaatgtgccaaatacctgccaaggggtgccaaatactccgcccgatggcacctccgccatgcggcaaacctcgcaccatgcggtgtcccccttggcgtttgccgattatcccccccatggggcggtaactttctcatggggcggtaaacaacccatggggcggtgaaaaccccatggggcggtaggtcaaaatggcttaattccgcggtttcacaatttcttcaaaccgccccatgggcaaattaccgcctcatgggggaattgccgccccatgagaagtaatcgcaactccgtatttgatcaatgttgtgaggctttgttgtgttttgcttgtttccgcctcctgtattcccctttgcgcgcattgatggtaaggctgccgtctattaatacccggcatgaaggttgaggacggccaggaagcggtatttgcatcgcggtggcaacctcttgtgcgaaggcacgttgtttggcggtattccacaggtcatcggcgaacacctcgatgacggtccagcccaattgccgcagacgtcgacgtttttgctggtcccgcacatattgtttgcggaagcgacggtgatgatcgccatcatattcaatagcgactttgtattgtggataagccatgtcaacggtgtaggtgtatccgttctctgaatcggtaatgccatattgtgtttgcggtatgggcaggccgaaaagcataagcgccaagcgtgtacgagtttcctgaacggaatccgatggttttacgagcttcagcgctgcctcacaacgcgcacgaccaataacgcggtgaaaggccgttagtcgttgagtgaattgttcaatggcatatccataacgtctgatgagcgcttcagccagcaccactaattcagtgaggttgagatattgggcaaactgtatccacgcatccatgggatgcatgcaggttacgccgtttgaaaaagcgatactgctgaactttgcattccatatgcgatagtcgacattgtccaatgaagagcgggtccccttgctcctcaccgtcacataaaaatccttctgcggcaacgtgctgtgcctcggcaactccacgccgcataattccaatgcggtatacagcgagaaacacaacgtgcgtttcgtgcgcactttgcccagcagattccaacaggccgtgttcttggccgtggcttgggcgtcaagatctttgcgcagatagttgttgatttcgccattgtgcggcgcttcgttgtatccgttcatgcgccgagcgtagcgcattccacggtggcacaggggcaaaaccgaaaaatggggataacttaagcggcgcgaaccggttatccaccggcatatcgtgtgccgcgcccggttatccaccgcgcttcgggagtgtcgtccaccgtataacagcactcatcgtgtgcgaacagctagccacgctcaaaatgcctagcacatttatacgaatacgacatgggaaacggcgagaccagccccacacaatacaaagtgaccgccagccatgcgcccgactgcggcatacacggcagcaacgccaacgacaccaaggccaaacatggaatcagcagataggacaacacgtgcccgctttgccgtcgcagcaacgtctcagccgccacgcagcaggcaatcagcgcacagcagacgccgagcgatgcgcgactcagcgagaatgtatgccgatgcccaatgccgccttcacgatgtctgatgcggaaatgagacatcgactgagcaactgtgtggacatactgtgaacacgttggaaacgtcggtgtgttatcctcccactcatgtctgaaacgaacaatgaaacagcagtgcgttcgcgcacgacaagcacaacatcaccaagcaaggccaaattgaccccgctggttcccggcaaagaggacctgaaccgtccgctagtcgaactgacccacgtcgaaaagcacttcggtgctttgcacgtcctgaaggacatcaacctgaccgtcaccaagggtgaggtgctggtggtcgtgggcccgtccggctcaggcaagtccacgatgtgccgcaccatcaatcgcctcgagaccatcgattccggcgacatccgcatcgacggcaagcccctgccacaggaaggcaaggagctcgcgaacctcagggccgaagttggcatggtgttccagtcgttcaacctgttcgccaacaaaaccattcttgaaaacgtgacgttggccctcatcaaagtgcgtcacatggacaagaaggaagccgagcaactggccatggacctgctcgcccgcgtgggcgtcgactcccaagccagcaagatgccctcccagctctccggcggccagcagcagcgtgtggccatcgcccgcgcgctcgccatgcgccccaaggtcatgctgttcgacgagcccacctccgcactcgacccggaaatggtcaacgaagtgctcgacgtgatggtcgaactcgcgcatgaaggcatgacgatgatctgcgtgacccacgagatgggcttcgcgcgcaaggccgccgaccgcatcgtcttcatggcggacggccagattctcgaagagaacacgcccgacgagttcttcgagcatccgcagaccgaccgtgccaaggacttcctctcgaagatcctcacccactgacgaacccactgaaagacgggtacgcaatccaatgacattcaccaatacgttcaaacggaaggtttgccgcgtgatcgccgcgctcgccgccgtggcctgcacaatgtcgctggccgcctgcggcgcggacgaaaccggcaagatccgcatcggcatcaaattcgaccagcccggcctgggcttcaagaagtccggcacctacgtgggcttcgacgtggacgtggccaagtacatcgccaagaaactcggctattccgaagaccagatcatctggaaggaagctccctccaagcagcgtgaggccatgattcagaacggcgacgtggacatgatcctcgccacctactccatcaccgacgagcgcaagaaggccgtctccttcgccggcccgtacttcgtggccggacaggatctgctcgtgcgcaaggacgacaactccatcaacggccccgaagacctgaacggcaagcgcctatgctccgtcaccggttcgacctccgccgccaccgtcaaggagaagttcgcctccgaagtccagcttatggaacagcccggttacgccgaatgcgccactgccctgttctccggcatcgtggacgcggtaaccaccgacgacatcatcctggccggcctggcctccgcctcgcgcggcaagctcaaggtggtcggcaaaccgttcacgcaggaatactacggcgtgggcatcaagaagggcgacacgcagctggccaccaaaatcaacaacgccatcgtggacatgattcaggacggctcgtgggagaacgccatcagcgataacaccaagggcaccaactacacgcccgacgtacgctacaacccgcccaccccggacgaaggagaggaggcctgatgagcggattcctggaactcttcagccagtatgacgtgctcggcgcgtttctggtcaatatcgaactgaccctatggtccgccctgttctccctgatcctcggcgtgatccttgtggtgatgcgcatctcgccgatttcctcgctcagggccgtggccggtgcgtatgtggaactgttcaagaacctgccgctgaccatcatcatggtgttcatggtgctgggtgcctacgcgcagctgaagctcagcttctccgacaccttcaccacgaacttcttctggctcgcggtcaccggcctgagcctgtacacggcggcgttcgtgtgcgaatctctgcgttcgggcatcaacaccgtgccgattggccaggccgaggccgcacgagcgctgggcttgggcttcatgcagtccgccaccgagatcattctgccgcaggccttccgaggctccgtggcaccgctcggcaacacgctgatcgccctgctcaagaactccaccgtggccgccgccgcatccgtggccaccgaaacatcctcgctgatgagcgagatgatcgaattccgtcccgacgtgatcatccaaatcttcctgatcttcgcgctcggctacgtgatcctgatcatccccatcggcatgctcaccacgtacctgtccaacaaactcgccgtaaggaggtgacggatatggccgatacttcgaattccgtgctgttcgacgcgccaggtcccaagggccggcgcaccattcgcatcgtcaactggatcgcgggcattctgttcgcggtggtgctcgtgtttatcctcatgcgcctgcacaacccgccggacggcgagaaccagctcagctgggagctgtggaagcccgccgtcgaacgagaggcgtggaccgacttctacctgcccggactgtggatgaccatcaaggccaccatcgtggccgtggtgggtgccgtggtgttcggcttggtgttcggcgtgggccgactgctgccgaacccgttggtacgtggcgtctccgccgtgatcgtcgagttctgccgtgcggttcccgtgctgctgctcatgatcttcttctggcgatggttcgcgttcgcgggcctgcccagcccgtcctattgggccgtggtgctggccttggtgctgtacaacggttcggtggtcgccgaactggtgcgctccggcgtcggcaatctgccgggcggccagcgtgaggcctcgctcgctttgggcctgaccgaaacgcagtcgctgatggagatcgaggtgccgcaggccgtctacgccatgctgccggccgccgtcacccagctggtcgtggtgttgaaggacaccgctctgggctcgatcatcatgtataccgacctgctgcaggaatcgcgccgactcggctcgatgtacttcaacatcctgcagacgctggtcatggccgcggtgatttacttcatcgcctgctggctgttgtcgaggctcgccgaatggctgccttcgcgcatgcagcagcgtacggccgcacccgccgaacccgagcccgtggcgccgatcgccgccggcgacccgtccaatgtcaaccagatcgctgtggccaaggaggtcgaagagctgccgctgggcggtacgccgcgcaaataccatgtgcatcaccgtggcaccaacgcctcgattcgcaactggcggcgcacccgctacgaacagggatatgacgccacccagcccgagtcacaggttgacccggaaaccggcgaattcccggcgttccgcaagtccgaagacgagtcagaggcctgacagtcagctcaatcgccgctaagccggcacgaagaatttactgagtgtttgactgggctccggctacgtagccttcacggaggataggttggaacatatgaagatgttccggcacctatcctccgtttttgctattgcgaccattgcgccgctggcgttggcggccacgctagccgtgacgcctgcaatcgcacaggccgaccagctgcccaacccggattgggtggcattgctctccgactacgaaaagaactattggcaggcccccaccgatgccgaacacggtggcaaggtgctcgacgccgatacaatgaaactcgacgaagatttggccgtggccattaaccacaaagccgccgaaaatctcgataaggatggcctgaacgcccaacgcaagcgtgcgctcgtcgactccgatctgcaagccgaggaagccatgccggacgcgctcggtccggtgcttggcaaatatatgagcgaagggctcaaatccgggaaactcaacgccgtcgccgatatcttctcctttaacgtggcctccacctacgcctcaaaacgtgcggccatgcatccgcgcccctatctgaaccgtgcggaaagcagctacggcggcactaacgatctcgccggactgcccgccacgcttgacatcaagcaatcaccctcatggctcgaacacgtgcccggctactcgaacttgcagaaaaacagttcctacccctccggccacactaccggcgcctattcgtggggtatcgcgctggccggcatgattcccgaactcgcgccgcaaatcatggcccgcacttcggaggccggcaacaaccgcatcgtgctcggcgtgcattatccgcttgacatcatgggcgggcgcattggcgcatccgcccagaacgggcagtactggcataacgaattcgcttcgtccatcgtgcccgcgtcccggcagctgcgggactatctggtgtcccgctgcgccgcggacggccacggcactaccctcgccgcctgcatcgccaacaccaaggcctccggttcgggcggctacaccaacgattttctggacccggtggccaccgagccggtcgcggaccaggcctcggccgtgcgcgtctacaccgcacgcctgacctacaccttcccgcaagacaccgcccagtccggcgctgatttcgtggcaccgcgcggggcggcggacgtgctgcgactggcctatcccgaactgcacgccgatcagcgcaacgcgattttgaaagccactgccttggattccggataccccctatggcaatcgagcgacggctggcagcgtatcaactgggccaaagccctgtgcgcccgcgtcaccttggataagcacggcgatgtggccaaggtcgagaccgccgaccaggtggcgcttgccggcccgagtgtggtcaatgcccagtacgccgacgcgggtaatcatccggcgtctgatggctcggcgggtgaaaacagcgccattgcggccgggccggatctcgccaccctccatgccgcgcaacgaccggcgttgatcagcgtagccatcggtaccgctgtaatcgcgattgtcggcggaatacggacggttcgacgca

SEQ ID NO: 962 - DNA, 28112 bp, Unknown
  R117_24m  MAG No. k141_17884
gcagctcatcgaaggtgccatcgaccgtatgcgactgcgggtccgttcgcgcgtggagaacgagattcgacttatcgagggatatgcgaaccggccaagcctgacccaaccgcataccatgctcgaaccgcatcagcggctaatcgacgattccctgcagcggcttgacatcggcctgcgacgcatcgtggacgatgcccagctcaccgtcgagcgagctcacgcctcactgaccgcactcagcccgcaatccacgttgaaccgaggctatgcggtggtgcagtcctccgatggccacgtactagacgatgcttcgcaggtaagccctggggatgacatcaccgtcaccttgaagaagggtgtcattaccgcaaccaccacatccgcaaccgcgtgacactccatacgcagccacgcatatataccgtatatacataaggagaacatcatgaccgaaaacgccacatccaccgacaagaacacccccgcctcgtccctggcggacaaggaacgcgagctcatcgcccagatgccatatgaagaggcgcgcgacaagctgattcaggccgtccaggcactggaaaccggcggcctcaatcttgaccagtcgatgcgtcaatgggaaatcggcgaggccttggccaagcgcgcccagggtctgctcaacgacgtccgcgccaagctcgaccaagcacaagccgagcaagccgccaacgaagccaccgcaggcacgcagtccaacctcgactgagttgcctcccggcgcggcatcatcgtgcaagcttgcggatgatgccgatgcgctcctgcatgacggagcagatggcgtcaatcacatcagcggacagccggcggttggtggcgagctgtgcccgtatcagttcaggcacctcgtcgagcatccccaaatcataacggtcccaatcgtcgataagtcccaactgccagtaggcgttgtccgcatcgccgtagtcgtcgagccagaacggcttcgccgggtagtcttcgttggtgatggcttcggggtccatgccgttccacaggctggcgccgctgtcaaaaatcggggccgggcgaatctcgaatgattcgacgtcacggatgagaccgaagttgttgtaatgccggtcggtgttgcgcagaagaaaatcaaggaacagaaaatcgttggtcgccgcatttgccgtatcacgacttacgccgagttgctgacatgcgtccagccatatcatcttgcgttcggtgttgtcgccgcgtcggaagatgcgcataacctgccctgcgggaatcagctcttgcgtgtcttcgagcatttcatcgcagacggagacccggatgcccttggcgcggccgatgcggtattcgacatggtcgatgccgaacagtcgtgccgtctgccaggcgatgcgctcgttgtccggctcctgaccggtgcgccctcccttgatcaggctgcggacgccatcgggaccgataatccaacgtttcggcaggtcaccggcactggtgacatccggggtgttcacgttgccgatgcgcgacgaattaccgaagaataaggcctgcccaagtcgttcgtcaaaatcgttgtggaaaaagttcagtttttcccacgtcagatcgggccggtcgagaggccgcacccaatactggtccgacaggctgagtcccaaggaacggtccagcagatcgttcgtcgaagcgatacccgaaccggcaaatacggaacgcataccgtcacgggtcatgggaatgccgcgagaacgccaccacccggtaatcgactcaccggtgggctcaggtttgccgtccacatacatgccgatcgggattcgggactcgtcgtagatctcccctgccctcagggcgtatccgccgcgttcgaaatactcgaactccattaccggatgggtacggcacatcagcatgcggttcatggtcatgtgcgcctcccgttattcagtccaccgacgatatccgcgtcatatcccatcctatccgctttaggactcgtatatgcggcccactgaagcttcagcgccaaatcatcagtcagcatcctttcccgcgtcaattactcatccgcggcatcccgcggctcgcacctgaatccggactggactgagttccgcttcccggcatacgatagtggtgattaggccacattggtagcagttatagaagggaaatcccatgtcaacgctgattcttgtattccatccgcacctgaaggacggctcgcgagtgaacgcccgtctgcttgccgaactcgccgcacaaggcgaggacgacatcatcgtgcgcgacgaatacgccgaatacccgaacttctccgtcaacgccgacacggagcacgagctactggaggccgccgaccgcgtaatccttcagttcccgttctactggtactcctcccccgcgctactcaaggaatgggaagacgaggtcatcaccgcaggctgggcctacggtggaggccacgcactcaagggcaaggagctcaagctggtggtcaccactggttccgacgcctccaagtaccgcaaggatggcgagtacaaccacaccatggaggagctgctaagcccattcgcagtcgtggcctacaaggtaggcatgaactatgccgaaccattcctggtgcagggcaccgccaccatcagcgatgcggagctggatcaggccgccgccgattatgtttcggcgattttggactgaataagctgaggccgggtgcaagtcgcacccggccttgttgtttcgcgggctagccgcggtctctcccagtcagcctgcggctgacagctccctcgtcagagagagcttattttttggatcagagggagttgatagctacttcttcaacggcacgtagatcacgtcgtcaatgagctcgcgatagtgctcaacgatttgcgcgcgacgggtcttcaggctcggggtcagcatgccgttggcctcggtgaattcgtctggcagaatctcgaacttacgaatcgactcggcgcgggaaacgccctcgttggcggcgttcaccgcacgctctacctcggcatgaacgatggcgttcttggccagcgaggccagatcgggttccggtttggcgccttgggattccaaccagttgttggcatccgccagatccagcgtgaccagagcggccacgaacggcttcttatcgccaataaccaagcactggttgaccacgggcgaggtcatcacggaagcctcaagcagacccggcgacacgttcttgccgccggcggtgatgatgaggtccttcttacggccagtgatggaaatgaatccgtcttcggagatatcgcccaaatcaccggtgtgcagccagccatcggtgatctgctgggtggtgacctcagggttgttgtggtaccccttgcacaccagcggtcccttgatcaccagctcgccatcctcggcgatgccggcggtgatgccgcacatcggcatgccgatggtgccgatgcgattgtcttccggcaagctcacgcacaccggaccacaggtttccgtcatgccgtagccttccagcaccggcatgccgatgccgttgaagaagtgggagagctcggaatccatcggggctccaccggtgacggcaaagtcggcgttcgggccaaagatggtacgaatcttcttgtacaccacctgctcgtagaaagcgtgagcaatacgaccgggaagcggcagcttctcgcccttctgctcggccttggaccattcgcgcgcgttttcggcggcgcgcatgaacatcttgcccgcaaaaccgctgccggcacgctgggaggcggcgttgtagaccttttcgtacacacgcggcacggcaagcagcagcgtggggccgaaggtctcgaagtccttgaccatggtcttcatattggagctcagggccagagaaatggtgccgccaaaactgaagaattccaggaatcgggcgaacacatggctcaggggcaggaacagcagcagacggcggttgggccatgcgccggcacgaggcatgtactgcaggccggagcgcaccaggaacgcgaagttgcggtgggtgagctccacgcctttcggggtgccggtggagccggacgtgtaaacgatggtggcgcggtcgtcgccgtgggaggcgctcttgtattcccagaattcggcatcggtgacgctttcgccataggtcttgatggcgttcaggccgcctgcttcgatgacgaacacgttgcgcagggtgggcacctcgctgcgcacggattcaatcttgtcgcgctgaccgtcatcctcggcgatggcgagcgtgaccttggaatcgttgaaaatccagctgacctggctggcggagttggtctcatataccggcacggtgagtgcgccgatggacatgatcgccatatccagagcggtccactcccaacgcgtgcgagacacgatggccacggagtcgcccttgttgacgcccagaccaatcaggcctttggccagatcgatgaccatgtcgcggaagacctgggcgctgtacggctgccaggtgccatcctcagttttatattcgatcatggcgccatcgggatcgcgcttggctcgctcatcgagcaaatcgaacaggttgatgtcgctgtcaatcggctccttgacgggattggtgaactgcttgacgatacgagtatcgtttatggccttatcagcgatgttttcagtcatactccccatgtaactccacggatgctacaaaacacgcgcgaaacaacggattgtccagaccaaatggccccggcaatccgttatttcgggcaaaccaggtaaatctgtcgcaccgtacattcagcagattactcggcggagtcattggcctttttcagctcgtcgcgaatctcctgcagcgtggcgagagtctgctcttcaacgctaggcccctgttcttcagcgtcagcctcatcctgggcagcagtgagatcacgaagcttattaatcggcaaaatcacacagaaatacaccgccacgccaacaagcaggaagctaaccaacgcgttaagaatcgcaccaaatgaaacagtcgagttgttgaacgtgatggtcagcagtccggaaagatccggtacgccgccaatcatgccgattaatggactgatgagattgtcgacgatggaattgaccacagcggtaacggcagagcccatcaccacacctaccgccatatcaatcatcgatccgcgcgacaggaatttcttaaagccattcaacggacctttatcggtcaaagcaacaactttgcgagcggttcctcccgtggccttggcaaagtcggtggcaatattcatgggattgtggttactcataacggcactccttacgaaattcagacacttcacttgtatccgactggttttcccacgactccattatgccgcttgttggaatatccctataccactgcggcgtcccgtacgtgactatgtacgagaacgccgccacccctgtttgctgagaacctgttagagctgcttagaactgaatgtaatcgacttccgtatgttcgccggtttccaagtatttcgccacatcatcaggaccggcgaaaaccagttcgaccgcttgcgcaatcatcagattgacacgatccattggtgtaaggttctcgaaatagccgtacaccggaattcccagcgcatgcgcatatccgatttcgaacatcgtgcccgggtcctcgtccataagattggcgaccacggctttagcagcattaatgccatggatatcgtccgcaaaacatccttcagggccgacttcttcgatctggctgacaaaccgcggcttgaacaataccttgccatgatcttccagtatcttttccaaacgttccatacttgccgtttgctcaggatcgaagaacggaccggccacatagaagtcatactgtttgtcttcactcatggtctctagtcatagcgcagccgcgtcggacgccagccgttattttcactgtatggacaaggggtcgtatcgtgaacattactacgggataaccgtcaatgactacgtacgttgcccccgatcagcacactccgccactttcgccccctcccgtatcgtcgagcacgcgaaccaagccgaccaaatagccgccatcccatgcgctgattaccgtatccgaatgctgcaatgccttgaacaaccgttcgggccactgcgccgattcccaaccaaccgacttgaacagcgcctcaacctgttcgacagtaaaccgcttctcttccgtgtattcgatagccatggaccctcacgataaccgtgaagccccacatgtctttgcatagtttcacatgacgggatgatggatggtggaacctatacgtttacacatgcctaatgcctatggctcatcaccgatgaatagaggctgagataccgtcatgtttccgaagccaagtgcccgagatcggattcgaaccgacgacacccgctttaggagagcggtgctctatccactgagctactcgggcaacgacgtttcattgtacacggccgcacgcccagtcgcatcatgttcgcgtggcagcctacataagacgcatggcagtctgtgtaagctacctggcagaacccgccaccaaggcatggccggttttcgtgctggtttggtgcgaactgctcttgcgcacggcgaaaagacaccgaaagacaagccgcacacggtacagtggcaaatcgcacgaaaagcaaggtaacagtaaacaagccggaggaaagggcagcatggcaaaggcacgaagtactaccacaggtgcaagcgtacgagctcgcgccgctgccaagccacgctctgccaaagccacggcacgcccagtatccaagtctgccgtgaagccacacaaacggcatcgtctgcttggttttctcgccacgatgttcgcgcttcttgcccttgccggcactgccgcccgcgcgctgcctgccgatttacaggaactgccatttgtgccgattgtggtatcggcaacgccctggttcacgttgcttggcctgattgccctactgttggccatcgtgtcgcggcgtatccttgccgcactaatcgccatcgccgcaatcgcatgcaatggctattggcaatatccgttcttctactcgaccgacccgctcccccaagccgcgcagaacgccgtggctgcggcctcccccaacaccagcgatgcctacgcgcgcgtcatgaccttcaatgtatacaaggggcaggccgacccacaagccatcgtcgaactagtccgcgatcagcgcgtcgaagtgctcgctttgcaggagaccaccgaggatttcgtcaaaaaactcaacgaggctggcattgagcactatctgccgtatgcgcaggtctcatcgtctgacggcgtattcggtaacggcctctggtcggccacgccacttgccgatccggccgacgatgacgtgaattccagcgcctcattcatgcccggcggcacggtggatatgggtggtcagcagattcgattcgtatccgtgcacaccaccgctcccgtacccggctattggcggcagtggaagcgatcgctggatgagttgggtccgatgcgcgggcatacggatacacggtatattttcatgggcgatttcaatgccacttacgatcacacgccattccgtgattttcttggcgaccggttcgtggatgccgcacgtgaatccggacatgggtttacgttttcgtggcctacgaaccgcgtgtatatgccgatgttcgccggtattgaccacgtggtgcttgatcagggcatgaaggccgggcaatgcaaggtggtcaaagtcgagggctccgatcatgcggcgttgttggctaccgtggcggttgggtgatttcgtattcctcggccagccgcatacactgggacacggcttccagaatcgcctcgatgccggacttcttgattgagccgtcatcctttaaatacttcatcaggcgcactgtggatttggtgctggcctcggggtcagggcgagcgccgggagcggcgtcgacgataagcatgtggatagtgttcgaaccgatatcaagcacaccaagtcgcgtggtgcgcgaacgcagattgaccatgatccctattcctgaccttacccaacccgtgatggccgaacaacgggccgaccatcgcaatcagccagccgtgcgccaccatggcgagtcgttcggccggcaaccaacaccgcgaggccagccgaacatcacacaaactcgactaccgtacaacaatcacaccggatgccgcgccgttcacaacgattcgacgaacgttccgagacgttccagcccctcggtcagggcctcacgtgaggcggcatagctcaggcgcacatgcgtatccgctgtggccgcaccgaagtcgcggccaggagtcagagccacatgggcttcatccagcgcgcgttcgcagaacgtccaggcatccagaccagtacgggaaatgttgaagtaggcgtagaacgcgccattcggctccacctcaaccggcaaaccgatgcgcttgagcccgtcaatcacaatgcgacgacgggcaagcaattcctgacgacgagcttcacattcggccaaactctccggcgtaaaacaggcgagcgccgcatgctgggtgggcgtgtgggcgcacaggtagtagttggtggccaggtcgtcgaccgcttccagcacggtggggtcgtcgggcagaatagcccagccgagacgccagccggtcatgccgaagaacttggagaagctgttgcacacgatggcaccgggatcgcaggccagtacggacttgacttcggtgccgtccggctcacggtcggccaaatcaaggtaggtttcgtccacgatgcgccatgcgccgcggctggcggccagcttgcacacctcgtccaatacgttgaagtcgatggtggtgccggtggggttggacggcgacgtgatcattacggccttggtcttgcttgtccagtactggctgcacaggtcggcggtcaggtggaagcgggtggcggccgaggtcggaacgtcgatgacccgcccctcaaaggagcgcacaagttcgcggttgcacgggtaggaggggtcggccacaatcacatcgtcaccggggtccacggtcagcgcggtggccaacagcagggcggccgaaccgccggcggtcacgcagatacgcttggggtcgatgtcaaggtcatgacgctcgcggtagaagtcggcgatggcttggcgcagttcaggtaggcccatggcggcggtgtacggcagggcccggccgtcgtactgttcgcgcatggcgtcgcgtacggcgggcggcgcgccgaaatcgggctcgccaaggcttaatttgatgacgctgataccttgggcgatcatcttgtctgcttgttcgccgaataccatggcacggaagggattgacctcacgcgctcggcgggacatgactggagacgcggccggagattggggctgctgcgctgcttcgttttccatatttcggttctatccgcctcacgggacaaggtttcttcttctataatcactgtaggtcgattgagtgtaccaacccgtattcaaggaggaataatgagtcgattcaatggcaaacgcgccgagttcgaggccagcggcgaaaagatcaacgtcgcgattctgggtgcgggccgcatagctcacaccatggccgacaccctgacccagatggctgaaggttcactgtattcctcatggattcacccgtatgcggtagcggcccgtgatattacgcgcgcgcaggcttttgccgaccaatggcattttgacaaggcttatggatcgtatgaggagttgacggcggacccggatgtggatctggtgtatatcgccaccccgcacagtctgcacgccgaacaggcgatcctgtgtatgaaagccggcaagaacgtgctggtggagaagtcgttcaccgcgaacgccgggcaggcacgtgaggcgctggccgtggccgaggaaaccggcatgctgtgcacggaggccatctggacgcgctacatgcccagccgcaagctcatcaacgaagttatcgagtccggcgagatcggcgaggtgaaagcggcgagcgccaacctgtgctatccggtgtccggcaaggcacgtatgaccgatccggcctgtgccggtggcgcgctgctcgatgtgggcgtgtatccgctgaacttcctggatatggcgatcggtgccgaccatggccgcacgctggatcatttcgatacgtcgatgatggccgccgaaaccggtgtggatgcacagaattccaccacgttgtattacgatgatggcacgatggccgtgtccaccagttcgatgctggtttcctccgatcgcggcggctacgtgtggggcaccgaagggtatttggtggtcaccaatatcaacaatcccaagtccatcgatatctacaacaacgatcacaagcccgtgcgcagtgttgcggtgccgtcgcagttgaccggttatgagtatgaggtggccgatgcagccaacgcgctgctggatggcaagatcgaatgcgaggcgatgccgcacgccgacaccatccgcatcatggagctgatggatgcgattcgcgaccgttggggcctgaagttcccgtttgaggtctgatttcagctcccctccagaggggagctgaaattattccgctgaatctgcatctccttcaacaatctgctcatacagccgtgcgaggcgttcgtcacgcacggctttcgttaattcgcactcccatacggtaattacacgccagccggcggcctccagttcagcccgctgcgcgatgtctcgattgtgattgcgcagtagcttcgtctgccagaattccacattcgatttcggcatcgaatgtttggaacagccttcatgcatgtgccagaaacagccgttgatgaacacgatggtgtggtatttcggcagtactacatccgggtggccggggtaacgcttgtcgttcttgcggaatcgcaaacccttgcgaaacagatagctgcgtaccagcacctcgattttggtgtctttgccacgaatatgcgacatcgtgtacgaacgggtgccccgctcatacttctccactggctgtttcttgcgattcacgcactccagactaccgtgacgttgcggcgaggatgaaagcctgaacgaacaatcacccatcttgcccgtccgtgtctcttatcgcgggcaatgatcatctgccggtcgagactgcacgattagactgaatcaaatggatgacatgatgattcgtagggccacggcggccgatattccccaaatcgacgaactgctgcggcaggtgctcgaagtgcatcatgccggccgaccggatctgttcaaaggcggtgtcaagaaatacacggacgaggaattgaaggcgattctggccaacgatcagacccctgtgttcgtggcggttgcgccatctgccaatgacggcactgacgtcgaacataacgccgactcccccgccaccgaccaagtgcaatggcatagcgccaagcgacgtctgctttgcgagatttgcgagagatgaatgcgataccagcgttcatggctatgctccttaatccaatatcaatggatgaacctgcactgccccgtatgtcaccatcataatatatcgaatatcaatataaaaatatcgaaaatcactttcaccattcacccacacacatcgcgacgtgatcgaccgttcttgccttgctcgcagcatccacgaccaacacgggaaagtcactttaaaaaagcactttatcaatgtggataactcggaagctagaaccacatacccccgttcagcttgccaatcagaaacctcatcccataccgtcagatgcacccgcacgcaacgacgcgtcagacaacagaaagaaggaccaatgaacatctctacgtttacccacaactcccacccggcaattcggtatacgcattttgtctagtgcgagattgagagttatgatgacacgaagaaaactcatcatcaagaaacttcggcaagcggcaaagcagcgagggctcgatttctatttgttacggcaaggcagcagacatgaggtttactgcctggacgggttgaggatacccatcccccgccataatgaagtctcagaacgaaccacgctggatatcatcaacgagagcgagcagaaactcggaaaggggtggtggcaatgagcaactatgacgtgcttgtgcaactcgatggccgatattggtacgttcaggtaccagctatcgaacggtcgacccaggccaaaggacttgacgatatcgagccaatggctaaagatctcatcactgtcatgaacgacgacgacaatccggagctcaaggtgacgtttgtgttgccgaaacaagccaaacaacacgtaacagaaatgttccggcagcgcgaaatagcaaaaaaagccaacgcacaagcggctgccgaatcccgactcgccgcacgggccctacgcaacgagggactcacgtatcgacaaatcggagctttattgggggtctcctaccaacgagcatttcaattggtcaacggcaaaacaaagcacaaaacgacagcatccgaatcgcctcagccaacaactgaatcacgctccccacgcacgcaccatgccacaccgctatcgactccggtctcggcttagcgaacgggtccacaaagcccagactgtttccatcaccaagctcaagagcaccgagcaggatcttctcatcccagcagattgaggagatcgtccttggtgagggtggcgatggaggcgggggcttcggtgagggcgctggcgccggtgccggcttcgtcggcaagcaaggaagcatcggtgaactggcgggcgagctcgctcttggtatgctgaagctccaagatgcgttcttcgatggtgtccttggccaccacctgatacacgttgacgtcttcggtctggccgatacgatgtgctcggtcggtggcctgatcctgcgcggcagcgttccaccatggatcggcgtggatgaccacgctggcaccggtcaggttcagtccggtgttgccggccttcaatgaaatcaggaaggcgggcgtatcgtccgcattgaactggtcgacgagttcgagacgcttctttttaggcgtggatccggtgatggtgtagtagcgtagtccttgcgcgtcgaaacgttcggcgatcagatcaaggaagctggtgaactgggagaagatcagcgccttcttgccttcattcacgcaggtttccaccagttcggtgatggcggcaagcttggccgactgatccttggcatcggcatacagcagccttggatcacagcagatctggcgcaacttggtcagctcggcgaggatgcgaatcttcgacgtgttgaaatcggcttcttcgctgtgttcgagctgcattctgagccgctgctcgtgggccgcatacagtttgcgctgttcgccggcaagctgcacggtcagcgtggtctccaacttgtccggcaaatcggtcagcacttgggacttcaacctgcgcttgatgaacacgcccaccaacgactgcaattggcgagacacccgggcggcctcaggattgacctgtgcggcggcccgaccttcggccgtgctgccatctgcagcccgggcgttggagatgggcaactcgtagcgctcatggaatcgcttgtatgagcccaatagtcccggcatcaggaagtcgaagatgctccacagttcggagagtcggttctcgatcggcgtgccggtcaaggcgaaacgatggtcggcggccacggccttgaccgctttggctatcttcgtggtgtgattcttgatgtactgggcttcatccagcgccatgacattgaaacgttgctcattggcggtgtaatcatcgacatcccggcgcagcaggtcgtatgaggtgatgagcacggtggggtcatccgcccggaacgcgcggccgatggcggtgcggcgctcggctttggtaccggccaccaccacggcgttgaagctcggggcgaacttggcgaattcggcaccccagttgtacaccaaggacgccgggcacacgatcaatgatggatgcggcccgccatcttcggaatcgaaagtaatatgaccggttacggctgattcactattaacagcattaccggcatccatgccttgagcggtcggcatgccactagattcgttgtggtatcgcgacagcaacagggcgataagctgcacggatttgcccaaacccatctcgtcggccaaaatgccgccaaaacccttgtcgcacaacgtgttcagccattggaagccttcgacctgataagggcgcagaatatgcttgagactatccggcacttcatacgacttagggtcgatgatcttgagatcgtcgatgtattcggtgaacgaagcgtccttgactacatcggagccgtcatccggcaactcaccatccagtaggaatgctcgaccgcccggcaactcgatcagcccggagttgagctgctgctcgctcagatcaaggtcgctggccaatcggtccaacgtgctgagattcgcgccgctgagtttgaccagcgtgccgtccttcaaatgatggaatcgttgacgccgacgatacgaagacagcaaggcacccacttcgtccggcggtacttcatcagcgaggggtgatatctccaccaaattgcctttgatggacaatccgactttgacgcttggcggcttgggcgcgatcagccggtcaaaagccggtgtggtgaagacctcccctacttccttcagtgcgggcaatccctcgtcaaaaagacgaacaatctgcgtggtgtcatcgcgatcgatagtggccgcatcagacacgaattgtttggcggtctttcgcgcggccggcgttcggaacccattcaccgtctgatgagtggcggccgcaacgcgcttgcgctggtcaggcatggtaaagaattcacgcactacatcaatcgcaagatgctcagcgtcgaaatcacgcccaatcacgccccgagacaaggggacggaacgctcatccctagcatgcaccgtcgggccatcgggtagcaacgggacaatggcatcgccgtagtgtgccttgacctcgcattgcacaccatgctcatcacgatccagataaaactggaggctgcattccgtaggacttaattcagccagctcgcgaggaatctcactggcctccaacagtccggcaccaaccagctgaggcaatagcgtgcgtgcgaacagggcgatgtcatcaccggcaatgacctgcccctcgccatcgggttcaaacaggtctcccaatagtcctcgcaacggaatcaatcgtttcgggcaacggacgaatcggcatcccgctgcgcttttacgctgagagcccgccatcatggcggataccgcaccggccggattagtggaggcgagcaacagccatacatccttgccaccatcaatcacggtttccaccgccggcactccggcaagcaggtatccggcatccggaccatacgtattgaaatcacgccgcgcaatgcgcataagaaaatctggctcgccaccatcaaccggcaccgatgcaggctgcccggagaaccatgtgttcaacacgagctgtacgcctctgccctcacgtacggacagcaaccgggccacttccggtgctgaaagtgtcaggtgacgatcgatggcgatatgcccgtaataccggtcctgctgctcggccgcacgacgcacggccatcgcgtcgtcaaggaagcccagcagtgggcgcgaatcatcgtcgaacatatccggcgtatgggtaaaggcaagcttctgcccataatccgtatagtcgccgttcgccatggtaagcacaaattgcggaatcgatttcagtacatagctggacccattggaagtcgatccgatcttgaactccacgctccacacgccatcgatgaaactcaatatcggaacaagctgcacctgccccaagcccacagtctcactatcgccctgatacccgccgcctcgggtgccggcacgagagccgtatccgctattcgtacgtcgtccacctgcgccatttcgtctttttgcagtatcgaatcggcgcatgagcgcattgcggcgacgcgctttggcttgagcatcttgcctatcgacgtgctccatatagtcgatcagcgtccgagacggcctcacagccccggcacggtacccttcaaaacgctgcggatcatcgcagaatatgaaggcgagcgcaatcatgtgcttgcacatgccatagccacggccgtaagccgggcatgagcacttgccaccgacggcttctcccgtatcgaggtcgaattgcacgctggtacgatacctactcgatgggctggtggtgccacgtagaataccgtcaagctcggcatacccggttcgatgattttcgctgtataccggattgataaccatggtggccgctttgcgcgcaatgctacgggcacgagcgagcacggcattcgacgatgacgattccacatcgttgcgtaacgcaaggatagggacggcatgggcttcggcacgcttcgcagccccggcgaaatggccttcgtcctcatcttcgaaccatacggaacgtccttgcctgaaacgatagggcataaccgcatcggcggcggacaaactgtccgttccaccaaacgttacggctctactgccggcagcgcctgcgccaccaagcattccatctgcctcgccagagataccgcctataccgctgctcttgccggcaaagagacccctgtcctcattagtgtcatctgtgtcatctgcgccataccgatcatcgtcgtaatcggcaccttcgtcgcctccccttttccaaggattgcgacggcgcaacgcatggccccaggaaacgccggaatcatcatcctcataaggcaggaggtcatcgtcatccgcattatcgggaacatggccaaatacaccataccctttgctcatgggcgagcctcctttccagcgaatgcatttcagtccaacacttctatcctagacgaggcgcgcggtagccttaatgtatggatgcagacaagccggcgcaacgcaaatcctatgcagggaacaccaccctcgaaatcttcgaggtgctgtggcgtcacagctactttggacatggcctgaccgtgcggcaaatactcgatgaacttgcccgtaaacaccagctggaagatccaagcgagctgccgaccgagaaaaccatacgaaatcagctcaaaaagcttaccgccacggaatttctcggcagacatatcgggcatctcaccgaaagcgaccttgccggcatcgaatgcaagaatccacaacccggctggtatcttgacgcattcctatccaccgccgaaatgcgactgctactcgacagcctcaccttgtctcgcatcagcctcgacaccatggacgatctcatcggtaaaatccgcgaactcgcaggtgccgctgggcaagcagtaggttaccttgagcacgtggccacctacacgcatatcaacggcgagttcctatccaccatcgaccaactgaatcaggccattgaagaaggccacggcgtaaccttccaataccgtgattacggcccggacggcaccctgataccgcataaaagccgtacgggcgcaggtcgaattacctacaccgccgacccttaccagatggtgtacaagaacggacggtattacctcatctgccatctacatggcgaggataatctccgcattttcgtggtcaaccgaatcgccaacgtcagcgccaaaggcaggaacggcacagttccactggaaaaaccagcgccggctgattttgacgcagtgaacttcatgcgtcaccgcccgtatcccgtagccgatgccccgattcgcatccgcatggccgtacgagacgaatccatgctcaacaatgtgttcgaatggttcgacgaccctcagatcaaacattcgccggacggcacacagttcgaagtcatcgtcgatgctcccgaacgcgccgtgttctggtgggcattgcagtattcctgggatggccgcgtagtgattcttgagcccgattcgctcaagcgcaaactctatgatgccgggcgtcgcatggccacagcctatgctcccgaatgatgcagcatcacatcgcacacctccttgccgagttgttcaccagcgaatttcaccggagaacctatcatcccatcgccaatcacgttcggtaattttttaccgaacaactcgatttcaagccattccacgaactatggcccccgcctagccgtacttgacgctaaggtggaaccatcacatgccgcgatgcacatgcaacgcaaacgcaacgatatgtaaggagcaactatgagcgaagagcgtaccgcatggggatggggtctggccagcgtagacgccgccggcaccaccctagacgtctggtaccccgaactgaatctcggtgaggcaccggccgaggccgatcgtccaaaccacaatttcggcactctggctcacgatgaagccgacgcccgtggcatccgccgcgtgccggtattcgtcgtcagccagttggacgagccgatcagcaacgccgcggacgcttacctgaaactccatctgatgagcatgcgcatggccaagccgaacacgctgaaccttgacggcatcttcgcccaactcgccaatgtggtgtggaccaactacggtcctttcgccgttgaggacttcacactacgcaaggccgatgtcgaacgcgcctccaccgaagccgctctcgctttcgctgctcaggccggactgcctgccgcagctcctgccaccaccgtcaacgtgttcggtgtggataaattcccgcgcatgatcgattacgtagtgcccaccggcgtgcgtatcggcgacgccgaccgtgtgcgcctcggtgcttacctatcttccggcaccaccgtgatgcacgccggattcgtgaacttcaatgccggcacgctcggcgtctccatggtcgaaggccgcgtttcgcaaggtgtggtcgtgggcgacggttccgatatcggcggcggtgcctccatcatgggcaccctctccggcggcggcaagctgcgcaactccatcggcgagcactcgctgctcggcgccaacgccggtatcggcatctccctcggcgataactgcaccgtcgaagccggtctgtacatcaccgccggcaccaagatcagcatctgggacaaggccaaggccgcagccggcgagccgctcgaagtcgtcaagggtgctgagctctccggcaaagacaacatcctgttcatccgcaactcggtgaatggacgtatcgaagcccgctaccgcaaggtgggaattgagctcaacgccaagctgcacaagaactgaaattgaaataatggagcgttatcttcgttgctcctcggtcgacgtacttccgtacgccttccctcggtacgcttcgataccgcacacattatttcaatttcagaactagccctgctcgttcttatgcagccgtcgcagcatagccggtttgcgctgtacatatagaaagcgcctcactggatctccagcgaggcgctttctcaaaccaacaatcaccgctcgtccatcggcatgaaatcgcgctcgaccggaccggtgtagacctggcgtgggcggccgatcttggtgttcgggtcggccagcatctcacggtactgcgcaatccaaccgggaatgcggcccagtgcgaacagcgtggtgaacatggccggatcgaagccgatcgcccgataaatcaagcccgtgtagaaatcgacgttcggatacaggttgcgcgatacgaaatactcgtcgttcaacgcaatatcctcaagctcggtggccacatcgaacaacgcacgctcgtcggacggcagtttctgcgtatcctcgcgctccatgatcttctcaagatacttcttggcaatcgccgcacgcggatcatacgacttgtatacacggtggccaaggccggaaatcttctggccatcctccttggcatcacgcacgaactcggccacagacttaccggaatcacgaatcgccttcaattggcgtagtacggcctcattcgcgccaccgtgcaacggtccggacagggcattgacgccagcggccaccgccgaatacaggttagcgtgggcggaaccggcgatacgcaccaccgaggtcgagcagttctgctcgtgatcggcatgaataatcagcaaacgacccaaagcatgcacatacaacgggtcagattcgaacggctcgtacggcacagcgaagcacatgcgcaggaagtcgtctacatagccgcgcgcgtaatcggggtacagcatcggctcatcgcgacgacggcggaagatgtacgacacaatcgtgcgggccttggccatgatgatcttggcggcctcatcgagctggtcggtgtcggagatatcggtggtgtccggatagaacgtggccagcgcattgatggcggaggcaagcacgctcatcggatgagcggagcgcgggaacgaacccatgaaggtacggaagtcttcgccaaccatcgtcttgtggttgatgtccgcgcagaactgctcatactcagccctgctcggcagctcgccgtggcgcagcagccacgccacttccagaaaatcggagttctcgcacaactgctcgatggggtagccacggtagcgcaggatcgaatgcttgccgtcgatgtaggtgattttcgattcgcactgtgcggtggtgaggaatccggggtcgagcgttacccagccgtcattgcgcagcttggaaacgacgatgccatccggccctgcactagccttcaccacgggcaggttgaacttgttcgaatcgacatcaagttgtgccgttgccattcgcgcaccttcctcttcatgaaccacttaccccaaacattaacgttcacgcgttcgcgaacgctagtgttcggtactttatgtcttctgtgttaccgccggcagacaccggtcgatacacgaaagccgaagtgcgctcatgctatcaaagcaaacgcacttcggcttgttacgtctcgaattcgcgggaaaaccgcaaacatatagacggttgatgagatgccgatcgcccatcacaggccaatcaggcacccgccatacgccaaacgccaatcagaggttggtgcgatcggtgaagatgatcgggccgttctcggtgatggcgatggtgtgctcggagtgggcaccgcgcgagccgtcggaggcacgcagggtccagccgtccttcggatcctggaagatctcgtcggtggtcttgaggaaccatggttcgatggcgatgaccaggccttcgcgcagcttgtagccgtggtgggcgcggccgtcgttcggtacgtgcgggtcgccgtgcatgatgtggcccacgccgtgaccgccgaactcgaggttgatcgggtagccgtattcgcgcgcgatgtcgccaatggtgttggagatgtcgccgagacggttgccgggcttggccacgtcgatggcggcggcgagcgcttcctcagtgcacttgatgatgcgcaggtcttcggggtccgggtctttgccgaccacgaagctgacggcggaatcggccacccagccatccacggagatggcgagatcgagggagacgaggtcgccgtccttcaggctgtaatcgtacggcacaccgtgcagcacggcgtcgttgacggaggtgcagatgtagtgggcgaacgggccggtgccgaagtcaggagcgtagtcaacatagcaggattcggcgcccttgcggtccacgatcttcttgtggacgaactcgtcgatttcgagcagattggtgcccaccttggtggtctcctgcagttccttcagaatgccgccgacgaaacggccggccggcttcatttcctcgatttcacgaggggtcttcaattcgatcatgaggttctttctaccttgttgagacttgttctcaactctagcccagcccggggtcaaccgccagcgatccccaacggcggcggccataagaaagcgcccggcaggttcacaacctgcacgggcgctttggattgattgtccggagattgattgtctggagcgcgagattacttgcgacgcttgccaaaagtgaacgcgcgaatcactgaagtaatccccatcaccaccatggcacatccgccgaagataatcatgaatacggcggagctcagcgggctcatcagcaccacgaagccggcgataatcgagatgatggcataggcgatggcccagccggagcgcgggatgcgccatgattcgactagagccatcacgccttccataatccaaccgaaaccgaccatcagggtgatgagtaatgccaaggtctgaccggtcataccgtagtttcgtacgactacgacgcctccgaaggtcagcagaatgccgacgaacacgtccagcacacgccagccgcccggcagacccggctccacgagagcgctgacgatgcgcaccacgccggaaatcacgaaatacacgccgagcaacaatgcggccaaagccagcgtcttgttcggcaccaacaacagcgcagcgcccaaggcgatggcagccacgcccaccacgccgtaaatgatgcgaatcttggtcttggccttttccggcagccattcctcgatcagatggaatggactgaaattgccgacataccagttggtctgctgccagccgggttgactttgatcgccccatgaaccattcggctgcccgtccgcttggctattcgattggccgtccgcctggtaccgccgaccgtccggaccccatgctggctggccgttcgggccatagttcggattgtaggcgtacgggccgtagtacgggttctggttcggtccgccttgtggctggccgttctgcgcctgctgattctgagtgtcttgcgctcccggcgcaccttgcggaggatattggccgccatgattgctgtcatacgcgccatactgcggttggcccggttggcccgccggattcggctggctcggctggctctggttgggctggcccgtctggccattccactgaccctcgtttggattgctcatcgtaactccttaactcaaggtccatattcaggttccacataccatgttaggcaagttacctaatttgaaccatcactacagttaggcaatccgtctagttcactgacagcgcaatacccataacgcaatatctgcatcaccaacgcttctcccccgccgcgattaggcttagggccatgaccaacgaaaccgaaacgctgacgtcgggcatcgacccggcatcgttctcctccgtcatcaagccgaccaatgacctgttccgctacgtgaatggtccatggatcgacacctaccgcctacccgacgatcgttcgcgctacggctccttcgacaagctcgccgaagacgccgaaaaccaagtgcgcgacatcctcgacgccgacgactgcccggccaccaaatcgcaggctctgtatcattcgttcctgaacaccgacgccatcgaggccgccggccttgacccgatccgcgatgagcttgacctcatcgattccgccatcgacaaggccgctctcacgcgcgtgctcggcaccatcaacccagccggcggccccgacctgttcggcttggccgtttacggcgaccccggcgacccggaccgcaatatcgcccaccttgagcaggccggcctttgcctgccggacgaagcctactatcgtgaggaccactacgtccccgtgcgcgaagcatacgtggcgatggtcgccacccagctggtgaacgccgggtacgcgcccgccgccgaatccaacggtggcgatgaactgccggccaacaccggcgatgacgagagcaatgctcccaccacggttcccagcgaagccgcacttgatatggcccgacacttccttgccgtggaaaccaagatcgccgccaatcattgggacaatgtggccacgcgcgattcggtgaagacctacaaccccaccgattacgccgatttggccgccacgctgaagaacttcgatctcgcttcctggatcgacgcctggcagaccgcctatgacgccaccgaggccgccaaggctcagtcgatcgatttcaagtctgtgttcgcgcgcatcattgtgcacgagccgagcttcctcactggtcttgatgcgttctgggccgaggccgatctggccgaccttaagctgtgggcccgtgttcacatgattctgggcttcgcctcctccctgtctcgcgacttcgacaccaccaactttgacttctacggcaaggtgctctccggtgccaagaagcagcgcgatcgttggaagcgcgcggtgagcctggtcaacggcgtctgcggtgaagatgtgggccgcgagtatgtgcgcctgcacttccccgaaagctcgaaacgccgcatggaagagctggtcgccaatctgattgacgcctaccgcgtgtccatcgccaattccgattggctgggcgaagacaccaaggccaaggctctggagaagatctccaagttcacgccaaagatcggctacaccaaccactggcgcgattactcggcactgagtgtctccgcggatgcgctgcccgccgagaacgccaaggccgcgaacctgtacgagaccggctaccagctggccaaggtcggcaaggcggtcgacaaggacgaatggctgatgaatccgcagacggtgaacgcctactacgagccgagcatgaacgtcatcgtgttcccggccgcgattctgcagcccccgttcttcgacccgaaggccgaggatgcggcgaattatggcggtatcggcgcagtgatcggacacgagatcggccatggcttcgacgatcagggttcgcagtatgacggcgacggcaagctcaacaactggtggaccgacgaggatcgcaagaacttcgaggcccgcaccggcgcattgatcgcccagtacaacagctttgtgccgctgcagctggcagagaagtacgctgacgagtctgataaggcgccgcacgtgaacggcgcgctgaccatcggcgagaacatcggcgatttgggcggcgtgaacatcgcgctcaaggcgtatgcattcgcgctcggcaaggcggcaggtaagcccgacgccgaagaagacggctcccccgccgccatcaaggcactgctcgataccgcccccgaaatggacggattcaccggcctgcagcgcttcttcctgagctacgcctccatctggcgcaccaagaaccgcgacgagctggccgaacagtacctgcagatcgacccgcattctccggccgaattccgcaccaacggcatcgccagcaacgtggacctcttctacgatgcctttggcgtgaccgaaggcgacgccatgtggctcgcacccaaggaccgtgtacgcatctggtaatccccgttatgtaagagaaaaccgctgtgcttgcctcgattacaggcgaacacagcggtttttcatgatgtatggttggcactcagaattcggattcgccgggatcggaagattcggcgaaaccgtcgacgtaggtttgttgggctgcggactgtggctgattagcgccagcgtccggttgcgacatgacggcatcggccatggacgcagccgctgactcggttgatggcgacggcgattggccggaatcggaggtgaccccaaattcgacggggccagattccgacgaggtcgcatacgggtccatacccacaccggatgcggcaccgtccacactatattgcgttggcctcatgtgcggtgacgatgctcgttgcccgtttccgccatccatgccttcggcggcaccgttggcattgccgttaccgttgccaccattgcctccgttcccattaccggcacgctgtggcttgatcagcgacgtggtgccgaaggtcaggtcatgcccaatgttggtggcttcgagaacggttctactgcgcggttcgccttgctcattggtccactgctcggtgatgagtgagccgaccacaatgatgcggtcaccgcggcgaaccgaactggcggcgttcacggccaaagcacggaacgctttgacgcccacccatgcggttccgtaatcctcccattgtctggtagtcgggttgagtcgactgcgggtgctgcccatacggaatgtcagcacgcggaaactctcagttccgcctagtgtcggatcaccggccacaaagccggtgacggtcactgctgcttgttgatttgccatgatcggtcctttcctcggcctgctggcctgttgtttggatgtggaccgccggagcctgtctccggcttcattgccggcttgcacgccccagcggtacctccactgtgaggcatgacgtttgaagtgcacaagggcaactggcaaatgtggatactgtgacgcagttgaaattttaagaatgtggataagtttcggttatccacaacaaagcgccattctgcgactgggcagaatggcgcttgatgcgattaacgccgaggctgagtaagtgggactcagctgagggcggcgaagcgctcggcgagcgcgtcggcggcttcggcggcgggcacggcgaccttgttttcgccgttgcggtcgcgcagttcgatggtgccgtcgttgacgtaatcgcggccgaccacggcgaccagcggcacgccgatcagctcggcatccttgaacttgacgcccggagacaccttcttgcggtcatcgtaaataacctcaaggcccttggcctcaagctcggcgaccagcttctcggcaccttcaaacgccacggcgtccttaccggtggccaccacgtgcacggcagccggggcaatcacggacggccaagccaagccggcttcgtcgtggtgtgtttcggcgatgcaggccagcacgcgggaaacaccgatgccatagcagcccatccacaccggcacggccttgccgttctggtcgagcaccttcaggtccagtgccttggagtacttgagacccagctggaacacctggccgatttccacaccacgctcgaagctcaacggaccggaaccgtccgggctcatgtcgccgtggcgaacctcaacggcttccaccacgccgtcggccttgaagtcacggccgtacaccaggttgtagtagtcgacctcgttctcatcggcaccagtgaaccaagcggaacccttgaccacgtgcgcgtcgaccaggtagcgaaccgggttcttcacgccagcagcctcggcctgcgggccaagcaccatcggtccgatgtagcctggcaccagttcggggtgctgcttcaggtcttcttcagtggcctcctcaagctcggcgggagcgaactgggcttccagtcgcttcatatccaccgtacggtcgccgggcacgccgacgacaatcacttcacgccacggctcgtcatgctcttcatcctcagggtgcttgacggtaatcaccacgttcttgaggatgtcggaagcctgccattcacggccatcagtacgcgggtggtcggcgttggcacgctcaatcatgttatcgatggtcttagcatccggggtggcttccttggaagcggcgggagtggcggaagcatcgatttccggcagctccggagtgctcagggcctccacattccatgccttgccggaaggtgccagcgcgaaggtatcttcgccgatcggcatcggagccaggaattcctcggatgcggagccgcccatcgggccggacatggcgaacacaggtacgtacttcaggtcgaggcgctggaagatgcgctcgtaggcgccgcgctcgtcatagtaggccttgcgcatgccttcttcatcgatggtgaaggagtaggcgtccttcatgatgaattcacgaccacggatcaggccggcacgcggacggaactcgtcgcggtacttggtctggatctggtacagggtgacgggcaggtctttgtaagaggagtacatgtccttgaccagaagggtgaacatctcctcgtgggtgggggccagcaggtaatcggcctcgtggcgatcc

SEQ ID NO: 963 - DNA, 4421 bp, Unknown
  R117_24m  MAG No. k141_18040
aatctgctcgaactgaccggtcaccgggttgaatgcctgggtgggctgctgctgcggttccaccggcgtggtgggcaaatcacgttcggcttccttgcgggccttcatattcgacaggtccgtcaatgggttgaacgcggctgccaccggcacgccgccgttcatgtaggtcaggatgtcggtcttgaattcggaggccgtggcgtagcggttctggcggtccttggccatggccttggcgcagattgaatcccacatcttcggcagccccggcaccacggcggatggcggcgtggcgacttcggagacatgctggtaggcgatggccacagcggaatcgccggtaaacggcgggcgcccggtaagcatctcgtagagcacgcagccggcggaatacaggtcggaacgcatgtcgacggtctcgccgcgcgcctgctcgggagaaaggtactgtgcggtgcccaccacgccctgcgactgggtcatggtggttgcggaatcgtccagagcgcgggcgatgccgaagtccatgaccttgaccgcgccctgctcggaaatcatgatgttgccgggcttgatatcgcggtggataatgcccatgcgatgcgaatagtcgagcgcgttaagcacgcccaacatcacctgttcgcagtcgcgctggctgagtgcgccgttgaccttgatgatgtcgcgcagggtctggcccttgacgtattccatgacgatgtacggcaaacgctcggtatcgccgctttcggaagaagccagttcttcgcccgaatcgtagatgttcacgatgttcgggttgttcatctgggccacggcgtgtgcttcgcggcggaaacgggccaggaagatgtcgtcgttggccagatcggcgcgcatgattttcacggccacggtacggcccagacgggtgtcaagagccacgtggacctcggccatgccgccacgaccgatgagctggccaagctggtagcgtccgccggccaatgcggtgggcatactggtgctcattgcttattccctcccaatcttgaggccggggcctccaaaacaatgcgtggcgtgctggtcactcggcgcggcagtcgattgccggacgtggccatggcggtgtcggccatttcggtctgctgatccagcagacggcgttcgatgcgtgccagcgtacgggacaccaccagcgcgtctttcgggcgatccaacgggtccttggccagcatcgacatgacaaattcgcgtaactggacgtccaccgagttcggcagcggaggcacgggattgttcacgtgcgctgcggcgatatcgaccggagtggtgccggtgaacggacgatgcccggcaaggccctcgtacgccactacgcccagtgaatagatgtccgattgcggcgtggcctgctggccctgcgcctgctcgggggagatgtattgtgcggtgcccaccaccatgccgtcctgggtgatctggccttggccggtggagtagctcacgccgaaatcggtgatcttcacttcgccggtgtcggaaaccatgatgttggccggcttgacgtcacgatgaatcacgccgtgcgagtgggccacgaataggcctcgcgcggtctgaatcagaatgggcagcagttcgatgggatccatcgcgcccttgctatggaacagatccgccaacgatttcgaggggacgtattccataatcagaaagccgatgccgtcatgctcgtagtattcgaacaacgcagcgatgttcgggtgcgccagattggcggaattatgggcttcggcacgcaggcggcgcagcttggcctcggcgttggtcacgtccgagcgcagcgccttgatggccacttcacgtccgagctgaatatcgtagcctttccagacctcgcccataccgccttgcgcaagacgcgaatcaagacgatatcggcggtgaataagctgtccttcgataagtttcactgctgcaaagcctcctgcatcatcgcgcgcatgatcgggccagcggcgagcgaaccgtgtacatctgtgttatgcaccaacaccgcgacggcgatctgcggattgtccgccggcgcgaaaccgatcacccagccgtcgatggcagagttgtcgataccgatttgtgcggtaccggttttggccgccaccttgatgccgtcgaccagctgcggattggcctcggtcaccacgctctccatcatcgtggtgagcttgtctgcggaatccttgctgaacgcgttggccatggtttgcggtttggtctgcgaaagtacggtgagatcggcggcgcgcacacgatcgaccagcgtgggctgcatcagtttgccattgttggcgattgcctgcgcgaccatcgccatctgcaacggcgtggccgtggtgtcgccttggccgatggatgccagcgcaagcttgtcgtcggtcggatcagaggggaatgtggacgcggtggccgtcatcggggtgcccgtggattcggtgccgtcaatggtgatggtgctgccgaacccgagcttggcggccatgtccgaaaccttgctcgcgccgagtttcacgccaagctgggcgaaagcggtgttggacgaccatgcgacggcctcttgcagggagatctgtccgttgacgccatcgccctgtgcctcgtcgttcggcagctgtgtggcggttcccggcaaggtatagctggagcctgcaggaatcttcgtgtccgtctgataatcgccggtttccagcgcagccgaggcgacgatggtcttgaacgtggaccctggcgggtacagctgcgaggtggcgcggttgattagcgggctattttggcccgcagagagttcgttgtaggcctgagacgcggctttggcgtcatgggtcgccagtttgttcggatcgtagctgggcgtgctcaccatggcgaggatacggccggtgttgacttcgatggccaccgccgcaccatcgcgcgtaccgagctgatcgtaggcaacctgctgcagcttggggtcgatggaggtttcgatggacgcgccctgattcgtagtgccggtgagcatggccttggcccgctgccagatcaatgaatcggcctcaccgttgagcagcatgctgcgggaggcttccaggccgcgatcggcggtctggttgatggagaagaagccggtgaccggagcatacagcggaccgttggaataggtgcgcaggtatttgaacgcgtcgttgaccggttcggatttggccatgaccgtgccgtccgaggccagaatggcaccgcggtaggcaccgagctggtggtacagcgaacgggcgttgcgcggatcgttgttcagcgcgttggcccgtaccgccatgatgatggtggacgacaggccaagaatcacgaacagcgcgaccacggcggtgaaaagctgacgaagatatttgttcatacgcgagtgcctccgttaacgggaggaagcgggggaatcgtaccggtaggcgtgtacggttcatcggcgccggcatacgccggagtggtggcatccacaataggctcggcgatgggggccgcagcagagcccgcagaggtcacaattgcgggcacttcgggtgcctcaagtgtgtctggcgcgtgcttggtgatgtccacaatggggtcgtcaaacgattccgcctcggactgcgacgccgtagccgacgcgctgcgaggctgaacgatcggctcagtggcgcgggctcgggcctcaagttccttgttgcgcagcacggccaaagcctcgtactggaacgtatccgaggtcagttccggctcgggcgcattggccgagttcgagatgatgatgagcagggtcgcgagaatatagttggcgatcagactggagccgccggccgccatatagggcagggtcagaccggtcagaggaatcaccagcgtgatgccgccgaccacggtgaacacttggaaggccatggtgaacaccagtccggaagcgagcagcttgccgaagccatccttgattttcatggcggtgataaagccggaggcaatgatgagcaggtagagcatcaaaatggccaggacgcccatcagaccgagttcctcgcccagagaggcgtagatgaaatcggagttcgcaaacgtaacgagcgaaggatggccttggccgagaccggtgccgagcatgccgcctgatgccaggccgaaaatgccggtgaccagctgccaggagccgccgggggtcttgttgtattgctcgttgctgaacgggtgcagccaggcgtcgatgcgctgacccacgtggctgaacatgcctgcggccagcacggcacccgcggcgaacgcgatcagaccgatgatgatccagcttttacggccggtggccgtgtacagcatggccacgaacatggcgaagaacataagcgaggtgcccagatcatgctgcatga

SEQ ID NO: 964 - DNA, 16793 bp, Unknown
  R117_24m  MAG No. k141_18053
ggcgatcgtcccctcccgtcgcacccgcgaccccgaggacgtctccacctcttggcagatcgacgcctatgagttcgatgtgccggtgatcggcgcccctatggattcggtgaccagcccggccaccgccatcgccatgggtaagatgggcgcgctcggcgtgctcgatttggaaggtctgtggacccgttacgaggacccgaccccgctgctggacgaaatcgccgggctgccggccgatcaggccaccgagcgtatccagcagatctatgccgagccggtcaagccggagctcatcacgcaacgtctgcacgagattcgcgccgccggtgtcaccgtggccggcgcgctctccccgcagcgcacccagcagttctactccaccgtggtggacgcgggcgtggacctgttcgtgatccgcggcactgtggtctccgccgagcacgtctcctccggtcaggaaccgctgaacctcaagaagttcatctacgaccttgacgtgcccgtcatcgtcggcggcgcatccaactacaccgctgccctgcacctgatgcgcaccggcgcggccggcgtgctcgtcggcttcggcggcggcgcggtctccgccacccgccagaccatcggcgtgcaggccccgatggccaccgccatcgccgacgtggccgaggcccgccgcgactacatggacgaatccggcggccgctacgtgcaggtcatcgccgacggcggcatgggcgactccggcagcttcgtcaaggccctggccctcggcgccgacgcggtcatgctcggcgcgccgctggcccgcgccaccgaggcccccggcaagggcacccactggggttccgaagcccgccaccagacgctgccgcgcggctaccgcaccacggtcggcacggtcggcccgctcgaacaggtgctgttcggaccgagccaccaggcggacggcaagaccaacttcatcggcgccctcaagcgcgctatggcctccaccggctacgtcgacgtgaagaacttccagcgttgcggcatggtggtcaacccgtattccgcacgataatcccgattacccccccctgaaaatgggggtttgccctccatgcaggaggcttagcttgccctaaggcgcgctcaagtcgtttgacttggcgcgcctttcgtgatgttgtagtacaaacgctcgccgatgatggtgagttgcaagggggcttgaaggggtcatcatggagtattcgggatttttccacggcacatatcagtacgggccgttgccgagttatgacggattcatcgttgtggagctgtcggatcgcccggtgcggtatcatatccaacccacattcataggcgggctgaatgcgaaggaatgtcattccatggccatggctgcatgccgcatcgcctgcacatcggcggacgcgatacgtggcaaactcagcgtcgcacatctcaacagagccatgacaaaaccatgtctggaacggctgcaaaccatgcaatacctgctcggcacccacatggtcactcatccggagctcaaagcgaaattctgctatctgcccactgtccccacattgatcgacggcatgatcaccggcaaggacacgctggaaatggcggtattcatgaccatcggccaggaaaatctgcgagtcaacctcaaactgaagttcatcggttctcgatggatgtgcatctatgccgatctgggctgaccagacggccccgccctcacaccgattcctacgctggcagcggaagacggttctgccgtgtcataggctggttcgcctatagtagtgaccatgcgtgaacatgtagaagaacccagatatgtcaccaccgatgacgacaccgtctactcgctgctggccaaacgagcagctcacacgccggatgacatcatcgcggaatggcaggatgacaacacccaccaatggcgcggcgccacagctactgaaatgctgtcccgcgtacgcgaggtggccaagggcctgttgggacttggcgtcaaagccggcaccatggtgctgatttactcgcctacctgctatgagtggggtgtggctgatttcgcttgcgcggcaatcggcgctgtggttgtgcccgtctatgagaccgattccgcccgtcagaccgcgggcatcgtcgaggaagtcgatcccgccatcgcctttgccggcgacttccagcgcgcacagacgcttgagcagatccgtgtcaatcatccgggcatgaaatacgtgttcaatttcaaggccgatggccttgacgctgtcgctgacttcgggcatggcgtatccgatgagacgttggatgcggctatcgctcgtatcaaagccgatgatctgcttaccgtggtctacacctccggttccaccggcaagcccaagggcgcgatgctctccaaccgcaattacacgcacatcgtgcttaacggctacgagattctgcgtggcatgctgtacgacgacaaccgtctgctgctgttcctgccactggcgcactgcttcgcccgctacatccagtacgtgtgcatcggtggctgcggcgtggtcggatacattcccgacgccaagcgactgctcgccgatatccgcagcttcaagcccacctacctgctgggcgtgccacgtgtgttcgagaaggtgtataacgcggcctcgcagaaggctggtgccggcatccaggggcatatcttcgcccagtcggtcaagcacttcgtcaaatggagcaaggatgagcaggccggccgcggccattcgttcatcgagcgcatgcgccattcgttctacatggccacggtgggcaaatccattcgttccgctctcggaccgaacctcaaatggctggcctgcggtggtgcgccgctcaacgtggatttggcccacttcttcaacggcatggatgacatcaccttcatccagggttatggcatgaccgaaaccgccgctccgatgctcgtcaattgggaggacgacaacgaggtcggttcggtcggcaagcctgggcctggcatgggcgtgcgtcttggcgaagacgatgaaattgagctgaccggcccgaacgtgttccttggctactacaagcagcccgaactcaccgcacagacgatgactgccgacggctggatcaaaaccggcgatctgggtcgtatcgacgaccgcggcttcaccttcattaccggacgcaagaaggacatcatcatcaccgccggcggcaagaacatcagccccgccccgatggaggatgtcatcgacacctgcccgatcgtggctcatgcagtagtagtcggcgacggcaagccgttcgtgtccgcacttatcgagctcgaccccgaaatgctgcattcctggctggaaggtcagggcctcaatgccgacatgacactcgccgaggccagcgacaacgacgcggtgcgtgcctttatccagcagtacatcgaccaggccaacgccaatgtctcccgcgctgagtccgtgcgcaaattcgcggtgctggatgaggaattcagtcaggagcacggcacgctcaccccgagcatgaaagtggtgcgtcccaaggtattgcagcgctacgccaccgtcatcgaagaggatctgtacgcgcccaagccatccaacaagccgctgcccgccactgccaagatcatcgacagcacgctggagaccgtcaagaaatcctccgaatcggtcaagcaggcgtccgaacaggtcaaacaggcctcggaacagatgaaaaccagcgtgtctgattcgattgctagcgtgtcggagaagatcaagaagtcgaaggctgaacccgaagagggcgagaccggcgattccgccgacaatgccgacaatgcctctgacaccggcagcaagccggaccggccggctgacgagaagaacgaggagtaacgagaagtggccatccgtgagatcagggtcgtgcccgacccagtcctgcgcaccccctgcgatgagatcaaggaaatcaccccggccgtgcgccgcctggttgacgacctgctggaaaccgtggacgatccgggccgagcgggcctgtccgccaaccagatcggcgtgagcctgagggccttctcctacaacatcgacggcaaggtcggctacgttctgaaccccgtactcgaggagaagtccggcgagcagtatggcgatgaaggttgtctgtccgtgcccggcttgtggtacaagacccgtcgtgccgactacgcgcgcgtgcgtggcatcgacctggacggcaacgaggtcgtgctcgagggctccgggctgatgggccgtatgcttcagcacgaatgcgaccatctcgacggccacgtgtatttggatcgcctggaaaaggaagaacgccgcgaagccctgcgctacatgcgcaatcgtcaggcgaagtagtccatacccggctcccgctggcgggagccgccgaacgtagtgagactgagggtggttctgccggtaccgcccgtaactcccctcagtcgcctacggcgacaggctcccctcagagaggggagcctgtttttcttagtaccggctccgtgctatccttgaaacttgtgtgccacccggcaacggacgcagtcgctggcgtccggaaccacccaatattgtcaaccggcacacaacaaattcgcgtcatgctcgcgacggcctgtgtcggtcggctgcacaactcgtgaaaccgggggagtagctgcacgcaggtgcgcatggccaggcaagaaccgacaatgaaaggtagtaataccatggctcagatcactatgagcgatatgctgaaggctggcctgcacttcggccaccagacccgtcgttggaacccgaagatgaagcagttcatcctcacccagcgcaacggcatccacatcatcaacctgttcaagtcgctcgacatgatcgacaaggcgtacgacttcatcaagaccaccgtggcccacaacggcaccgtgctcttcgtcggcaccaagaagcaggctcaggaagctatcgccaaccaggccacccgcgtgaacatgccttacgtctccgagcgttggctcggcggcatgctgaccaacttccagaccgtctccaagcgcgtcaaccgcctcaaggaacttgaggaaatggacttcaccgacgtgcacggctccggcctgaccaagaaggagctcctcctgctcgagcgcgagaaggacaagctcaacaggcagctgggcggtatccgcaacatgaaccgcaccccgtccgcgatgttcgtcgtcgacatcaccaaggaggccctggctgttgaggaagctcacaagctgggtatcccggttgtcgccatcgtcgacaccaacgccgacccggacaccgttgagtacccgatcccggccaacgatgacgccatccgcggcatcgaactgctgaccagcctgatggctgacgccgtcgccgaaggtctgctggagcgctccggcgccaacaaggccgagggcgaagccgccgagcagccgatggccgcttgggagaaggaactcctgaccaacgaggctcctgccgaggcttccgctgaagccgccgctccggctgccgccgagggcgaaaccgccgaggcccccaaggccgagtgatgctctacgatgggaagtgcctgaataagcgcttcccatcgttcatgggtaagcaaaatttctcaaggagaataatcaatggcagcaattaccgccgcactgatcaagcaggttcgtgaagacaccggcgccggcatgctcgacgtcaagaaggctctgaccgaagccgaaggcgacgtcgcccgcgccaaggaaatcatccgagccaagggtatcgccgcagccggcaagcgtgaaggccgcaaggctcaggaaggcaccatcgcctccaaggtcgtcgagaccgccaatggcgagaccggctacgccgtcgagctgaactccgagaccgacttcgtggccaagaccccgaagttcgtcgagttcaccgaggaagttctcggctacgccgtggacgccgacgccaactccgctgacgagctgctcgaggccaaggccggcgacaccaccgtcaagctggctgtcgaggaggccgccgccctgttcggtgagcacgtcaaggtcggccagttcgccaagatctccggcgagcacgtcgaagtctacgctcacaagaagtccgccgagatgccgccgagcatcgtcgccatgatcgccaccgacaaggccggcgccgccgtggctcacgaagctgctctgcagatctccgccatgggcgccaagtggctgacccgcgaggacgttccggccgatgtggtcgagtccgagcgtcgcgtggccaccgagaagtccctggccgagggcaagccggagaagatcgttccgaagatcgtcgaaggccgtctcaacgctttcttcaaggaagtcgtgctgctcgagcagccgttcgtcaaggacccgtccaagaccgtcggcgacctgttcaaggaagtcggtggcaacgccaccgcattcgctcgtgtcgaggtcggcaagggcgaagaggagtgagcctaaggcttactccacgcgcttagcgtaatttcaacgaaacgccatccggttattcaataatcggatggcgtttcgctattccaagggtgtcgttgctagggggtgtcgtcgtaaaccgatacgcttgtctacggataatttcgcactttcggttttgagaaaggcacaatatgactgatagcgacaagccgcgcagagttctgctcaagttgtccggcgaagcattcggtggtggcaaggtcggcatagatacccatgtgattcgtcgcattgccgaggaaatcgttccggctgtacaacagggtgtgcaggtggccatcgtggtcggcggcggcaacttcttccgcggtgccgaactgcagcaggccggtatcgatcgttcccgcggcgactacatgggtatgctcggcacggtgatgaactgcctcgccctgcaggacttcctggagcaggagggtcaggccacccgcgtgcagaccgccatcaccatgggacaggtcgccgagccgtatattccgctcaaggccatccgtcaccttgaaaagggtcgcgtggtgattttcggcgccggtgccggcatgccgtacttctccaccgacacggtttccatccagcgttccctcgaaatccactgcgacgaagtgcttatgggtaagaacggcgtcgacggcgtctacaccgccgacccgcgcagggacgagaacgccaagcgttttgaaaccctgagctacaatcgcgccctcgtggacaatctggcagtcatggacgcctccgcactgtccatggcccgcgacaacaagaagcgcatccgcgtcttcggcctcgaagagccgggcaacgtgacccgcgccctcgtcggcgatgaaatcggtacgctggtctccaccgccgaatcgcgcgtggccgagtaagccgcaaacgcctacaatcgaatcaaacgttcatagacgaacaacacagacgaacaccaacacacaaggagtgaatatgtctcttatcgaccaggccaaggaacagatggccaggaccgtggaaaacaccaaggaaaacttctccggcatccgcaccggtcgcgcaaacccggccctgctcaacggcatcaccgtggactactatggtgcccccaccccgattaaggccgtcgcctccatcggcgttcccgaaccgcgcaccctgtccgtcaccccgtttgacgcttcccaggccggtgccgtcgaaaaggccctgcgcaactccgacctcggcatcagcccgaaccgtgatggcaacgtcatccgcctgaccatgccggaactcaccgaggaccgtcgtaaggagtacgtcaagctcgccaagggcaaggccgaggacggcaaggtcgccgtgcgcaacattcgccgtaagaccaaggaaaccatcgacaaggccgtcaaggacggcgagatgggtgaggacgaaggcgatcgcctgctgaaggatcttgacaaggtcaccaagtccgttaccgacgagatcgatactctgctggagaccaagcagaaggagatcatggaggtctgattcagaccaggtccggagaattatggaacgcaacgaacaactccatgaagaggccgaggagacgctcgaccggatcaacaagaagaccggccgcaacatgccgcaggccatcgccacaggcgcggcactggtcatccttattgtcgcgtgcctgctgctcagcgtcgacctcttcgtgctgctggtagtcgtgttcatgattctggcgctgtgggagctcagggtggacttcgccaccgtaggcctgcacatcccggtgttcatgctgtggctgtgcgcgtccttcaccctcatcgccacctattattccccgtaccatctcatcacgatgtcgctgagtatcatcgtgtcgattattctggtcgccatcgcggccagcgcaaaaatcagcgtcggcaaccgcctatctctggcggttgccggcaaactgtccaacacggatgccagcgcgcgcctcgaatcctcgttcaatcatgagggcggggaacagcatcattcccggctcagccatgtggctgtgtccgtgcttaccgtgttgtacattccgttgctggccagctgcatcatcatctcgctgactttcaatgggcatccgattgcacacgccatcatgctggtgttcctgcccgccctctccgatacgggtggtttgtttgccggtgcctggctcggcaagcacaagctcagcccgcgtatctcgccgaagaagtccgttgagggcctgatcggctcgatgctcttcgccatggctggcgcattcgccgtattcgcatgcacgtatgatgcctcgaaatgggccactcgttggtgggtgccgatcgtggcgggtattctcatcggcgccgtgggcacgttcggtgatttgtgtgcttccatgctcaagcgcgatatcggcatcaaagacatgggccatctgctcaagggacacggcggtgtgatggatcgtgtggattccattttgatgagtgcaccgttcacctgcgccttgctgtgggtcaccggactgtgattcgcatgcctcgtgcatgaacaatgtggcatcgtgtgtatatcgcacggtgccacatgtcatatatgggggaaatcatcgttcaatatgcgttcgccatgggctaagacatgggccatctgattcgtatgcggcacgccgtatggtggattctgatatttctattgcatgtttgactattttctgatattgagagcgaagcgaacccatcatgaccacacagcatcctgacactccggaaaccggcattactcccggcggcacatcaggtgccttccgtgacgtgctatccaaggaccatgcccgccgtggcaagccgccgctgcactttgtggatatgacgcccgagcagcgcatcgagaaagcgaccgaactcggattgccgaagttccgagtcaagcagctcgccaaccattactttggccatttcgatgtgaatgccgctgaattcactgattttccggcagccaagcgcagcgaggccgccgccgcgttcttcccgcagctcatcaccgaggtgacccgccaagtggcggacgaaggcaccaccatcaagaccttgtggaagctgttcgacggctcccacatcgaatcggtgcttatgcgatacccgacccgcaccacgctgtgcatttcctcgcaggtcggctgcggcatgggctgcccgttctgcgccaccggcaagcttggcctgacccgtaacatgtccaccggtgaaataatcgaacaggtgcgtgtggccgccaaaatgatgcgtgacggcgaagtggccgggggagagggccgcctgagcaacatcgtgttcatgggtatgggcgagccgatgggcaactacaactccgtgctgtccgccgtacgacagatttccgccatgcctcccgaaggcttcggcatttccgcgcgcaacatcaccgtatccacggtgggcgtggtgcccggcatcaagaagctcactgccgaaggcatccccgtgcgtctggccgtttccctgcatgcccccagcgacgaactgcgtgacgagctggtgccgatgaacaagcgtttcaacaccacgcaggtgttggatgccgcgcacgattattggctggcctccaagcgccgcgtcagtatcgaatacgcgctgatgcgcggcatcaacgaccaggccgagcatgcgcagttgctggccaagaggcttaaccattacggcgacaactgggcccacgtcaacccgattccgctcaaccccatcgagggctcgaagtggaccgcctccaagccgggagacgaacagcggttcctggagatcctgcaccgcgcgggcatcaccgccacactgcgtgacacccgcggccaggacattgacggtgcctgcgggcagttggccgctaaggagcggtagttacttcagcgcatccttgattgcgtccacgaagtagtccaaatcagcgggcttgcgggacgtgatgagcttgaagccgttggcgtcgtccacgtgcagctgctcgtcgacgtaatggccgcccgcgttctcgatatcggcggcgatataacggcagggcgcggcggtcttgccagccaccagacccgcgttgaccagcagccacgcgccatgacagatcgcggcgatcggcttgccttcgtgcgcgaactcctgcgccagcgcgatcgcatcctcattgacgcggatacgatccacattgcaggtaccaccgggcaccaccagtaggtcataatcagcggtctgcacgtcgctcagcagcgcatccggcgtcagcgtctcgccttcgtagcggtcgtgctgcaccgtctcacacgggtccaaggtagtggcggcaagcgtcaccttggcaccggcggccttgagatcgcgcagcgggcgcgtcagctcggattctcatattccagaaacgggtgcggcgcatgtaacgggcggtaggtagtctgaaggactgtaatgcaaagccgaacaggggagtgaagcatgtcgttggcggtacgagtcatcccgtgcctggacgttgacgccggtcgcgtggtgaagggtgtgcatttcgaaaacctcaaggatgcgggcgacccggtggagctggcggccgaatactatcgtcagggcgccgacgagatcaccttcctggatgtgaccgcatccagctcccaccgcaacacgatgattgacgtggtctcccgcaccgccgaacaggtgttcattccgatgaccgtgggcggcggcgtacgcacgcccgaggacgtcgactcgctgttgcgctgcggtgcagacaaggtcggtgtcaacacggcggccatcaatgacccgtcgcttatcagccgcgtggccgaccgtttcggcaaccaggtgctggtgctctccgtggacgcccgccgcgaaaagggcgagcaacacacgcaatccggcttcgaggtcaccacgatgggcggccgcaaatccaccggcattgatgccatctggtgggtcaagcgcgccgagcagcttggcgccggcgagattctgcttaactcgatggacgccgacggtaccaaggaaggctttgatctcgagatgattcgcgccgtgcgcaaggaagtcaagattccgatcatcgcctccggcggtgccggcaaggtcgaggacttcccgcccgccatcgaagcaggtgccgacgcggtgctggccgcatccgtattccattacggcatcctgaccatcgccgatgtcaaggcggaactcaagaagcacggctacaccgttcgctaaacgaatacaccttgctcccgctggacgaacaatccagtggattgttcgtagcagtgcgctatgcacatgtcgcacataatccgggagctgtcagcgaagctgactgagggtggtccacataaggaagataggtatgacagacactacatacgacaattccactgaactcgatccccgtattgccgcacgcctgaagcgtgacgccaagggcctggtcgctgccgtcatccagcagtacgacacacacgaggtgctgatggtcggctacatgaacgacgaggcattacgccgcacgctgaccaccggccgcgtgaccttctggtcccggtcccgtcaggaatactggcgcaagggtgatacctccggccatgtgcaatacgtcaagggcgtgtccctggattgcgacggagacgcactgctcgtcgaagtagaccaagtcggtgccgcctgccacaccggcaagcgcagctgcttcctcgaaggcggccccctgtccgtggtcgaaggccaccgcccggccgagcagtagaacgggcttccctgactgggggaagccgaacgaccgcgtactacgaaacaagacatcgagttgtaagtaaaggagcgaatatgagcgaatgcagcgtcaaacacctgaagtggggcgccacctggcccagtcgcggccagttccacgaactggccgacgccggctaccgtgtgattccgatcgtgcgccgtctgctcgccgactcgctcaccccggtcggcttctacgagcgtctcgccggcagccgatccggcaccttcatcctcgaatcggcggaatacggcggcacgtggagccgttacagcttcatcggcgtcaactcgatggcccagctgcgctccaacaacggtcaggccgactggctgggcaaggtcccggttggtgtgccagtcaccggtgacgtggtcgaagtcgctcacgccacgttgaagactctgaaggccccgcatgtggaaggcctgccgaacctgaccagcggtctggtcggcacggtcggctgggatgccatccgccactgggaaccgaccctgcgcgccgaagctccggacgagaccggccagcctgagaccgtgctcgccctggccaccgatatcgccgtggtcgaccacgtatccggttcggtgtggctcatcgccaacgcggtgaacgtggatgataaatccacccgcgccgacgtcgcctacaacgaggccgtcgctcgactcgaccagatgcagcacgatgccgccaccccggctccgggcgagtcccgcgtcaacatcttggacgaaacggtcgcccagcctgagctgcgcttccgcaccgagaaaagccactacgagcaggccgtcgaacgcgccaagcagcacatcgtcgacggcgacgtgttccaggtggtcatctcccagcgtctcgacatcgattcgcctgccgacccgttcgacgtgtaccgtgtgttgcgcacgctgaacccgagcccgtacatgtatttcatggcgttgaccgatgctcagggccgcgacttcaacgtgatcggctccagcccggaaaccctcatcaaggtggacaacggccacgcgatgaccttcccgattgccggatcccgccctcgcggcgccacccctgaggaagacgaaaaattcgccaaggaattgcttgccgatccgaaggaacgcagcgagcacatcatgctcgtcgacctgtcccgcaacgacctgagcaaggtgtgcgtgccgcagtccgtggaagtcgtgcagctcatggacatcaagcgtttcagccacatcatgcacatctgctcgacggtcaccggcaaggtcgaccccccgctgaccgcattcgatgtgttcaagtccgcgttcccggccggcacgctttccggcgcgccaaagccgcgcgcagtcgaaatcatcgacgagttggaaccggccgaccgcggcatctacggcggcaccgtcggctacttcgatctctctggcaacatggacatggccatcgccatccgcaccgcgttcctgcgcgaccatgaggcgagcgtgcaggccggtgccggcattgtgctcgactccgtgcccgctaccgaatggcaggagacgcgcaacaaggccgaggccagcgtcgaatccatccagatcgccgcccagctgcgcgaactgtaacgttcaacgcatagcgatgcccctgctgacaactgctgtcagcaggggcataacaatatgcgtatcagtgggtttcgcccatgatgtcggtggcgtcggttccggtgctcacagcggcctcgatggcggcttcgatgccgcgcgccatggtcgcgatttccatggtcggcgtgccgttcggcttgcccacgccctgcgcggtcgcatacggcacatgaatgaagccgcccttgacgccggggaatttgcggtcaatcagatacaacacgttatacatgatgctgttgcacacatacgtgcctgccgtatacgacatgaatgcgggaatcccgtggtcattgatgttcctgaccatggccttgaccggcaacgtggcgaaatacgcggtgtcgccgtcctcacgcaacggcgtatcgaacggctgctcgccatcattatcgggaatacgcgcctcggccaaattaatggccactttctccacggtcagagccgaacggccaccagcctgaccaatgcacagcacatagtcaggctgctcgcgcaccatggcttcctcaaccacggtcgcactgcgcgtgaacaccgtcggaatctccagtttcaccactgtcgcaccggcgatttcatccggcaacagcttgactgcctcgaatgcggggttaaccggctcgccgccgaacggatcgaatccggtcaccagaatcttgctcatcattagctccttatttcacggattgttgtggtatttggacaacgaggttattgcgcgatcagcatatagacgatctgcaccacaatcatcaccaatgcgggcagcacctgcttcttaatcacgcccatgcggtccttcatatcgagcatcgcgacgggcacgatgttgaagttggcggccatcggcgtgcacagcgtgccgcagtagccacaggtcagcgccagaatgccaatcaccgtcgggtccgcaccgtaggcgagcacgaatggcgcgccaatgcccacggtcattacggtaatcgcggcgaaggcattgcccatgatcatcgtgaacagcatcatgcccacactgaatacgatgatgcccagcgtgacgttgcccttcggaataatgccgccgaccagcgtggcgatcacgtcgccgacacctgcggctgtgaaaatcgcgccgagactggccagcagcatcggcagcatgcagagcgcacccatggcagacaacaggcgttccgaatcgttgaggaatacgaccggcttgttgtcatgcgagaacgcgaacagaatcacggcggcaatcatcacaccgatgcagcagccggtcagggcgctgacgctgggaatcagggcgccgataatggcgaacacgcccagacacagggcgggaatgaagatgcgcatgccgatgtgctggaagttcgtggccacttcggcggtgctgggagcgctcgaatcggatgccgagcccttacgcacttggcggaagatggcgggaatgaccatgatgataatgagcacgccgtccgcaatggccggaatccaacggccgaatgcgatgacgataccgagcgccgtccagaacacgaaagtgccgtagcgggccttgttggttttatcgagtaggttgcgtacgcccgcatacacggacatgaaacccatgaaaatatagaagaactcgaggattttcgtgccgacggtcacgctggggtccatgaagaacgacatatcaggcctccttgccggtggtggtagcggtggcggcctgagcggcggcttcggcaccgtagtacttcttgcgcagtcgtgtgtccttgatgatgtaatagacggctgtgaccgccacggcaatcaccgcgacaggaatctcgataatggccatgcgcaacagttcgacgtcataacccagcggcttcaacgtggactgcacgagcagcgcaccggccgtacccacgaacagcacctggccaaagaaccatgcgacgttctccatgccggaagccatgcccttgagctcttccacatactcgtcgttcggctcgtgaccggacgcttcaatcgcacctaccgccatcggcatgatgaccggacgcacgaacccggccacgccaccaaaactcacgttgaacgcggcgaacacgagacgcatcacaccatacagggcgatcaccataccgggcgtcgcattcttcactttgccgatcagctgcgcggctgcggttttcagaccgttgcgctccaatgtgccggtgaccagcaacacgatgatgaaaatcgccatgctgcggttcgagacgaacgacgtacccaacgtggtcaggaagccgtcgacgccaatgccgccgaccagcgcagtcaccacagccgccacgataatgatcagaatcgcatcaagtttgagggcgaaacccacaatcacgatcacgattcccaataacacgagataatttggttccatgtgggaaatccttcctatactgcacacgcattgcgccgcaagcgtgcccggatatggatagtgtacgacggaaatcacgattcaactgtcttatcgcgcacattgcaggttattgcatgagtctacgggcgtataagcgtatggacgcatgagcgtcggctgagcccggtcggcatggtgttcgctatgatggacagtcggactttggtaagagacagtattcgtaacaggcaagtaggttattcatggctattgaggtgcagggacttgaaattcagatcggcgcgcgcacgctgcttcaccccaccaacttccatgtggccaagggagacaagatcggtctggtgggccgcaacggcgccggcaagac

SEQ ID NO: 965 - DNA, 8809 bp, Unknown
  R117_24m  MAG No. k141_18196
ccaccaggccgtacttcgcgccatacacgaaaccccagatcaacgtcgacaccaccgccggcaccgcgtagggcaggaacgtcgagatacggaagaacctcgtgccatgcagcttcatcgaatccaacgccagggccatcaaagccgacaggcacagcatgatcggcacctgcacgcacgtgaacagggccacacgaccaacactgctccagaactggccatcacccaacaggcgcgcgtagttctcgaagccgacgaacttggtgccgccgatcatctgcttcttgaagaacgaaatataaacggcgtacacgatcggcacgatgaacacgaacacgaacaccaccgcaaaaggccacatgaatttccatccacgccaatcggccttgtgcttattcacacgagccttgcccgaatgcacgggcgcagctgcgatatcggctgaagccattcccaacccctctccttcgaaggttgaccaaaatgtttgcgttatcatcataacaccatttgtaacattgtccaatcgtgttgagtaccgtgttgaattaagggtttctcagtcactctgctacaatggtcacgaagacaacgatgttatcgttaccgtaagcgtccctaagataagcgttgtaaacgaaacaccgacattaatgagtcaagcgagggtgaaatgtcgagaccaacacaggtgtccatgcaagacatagcgaaagccgccggcgtttcgccacagacagtgtcccgcgtggcgaatggcagcgatgcggtgaaacccgaaacacgccagcgtgtcgaagctgcaatgaaacgccttgggtatcgtccgaattatgcggcccgagccctaaagcacggccgcttccaggatatcggcgtggtgatgttcaacaccaccgcgttcggcaacgcccgcatccttgattctattgtggccaacgcggccgatgacgattattcagtcaccatccagaccatgcgccacggtgcggaacgcacgctttccgccgccatcgatcgcatgcagcgtcagccggtggatggtgtcatcgtagtgctggaggaacgcatctccgatttcgtcggatacaagcctccgcgagaacttccagtcgtgctcatctgcgaatccgccgccgaccactgccccaccgttgacgccgaccagtatggctgctcgaccgctatcgtcgattacctgatgggcaaggggcacaagaccgtctaccacattgccggaccgtccacctcgcgcgccgccgaaagccgcgcccgcggctggcgagaagcgttggaacaaatgggagcacgcgtaccgagcatgtacatcggcgattggtgcgcggattcaggctatcaggccggcgtggcgttggcccacgaccccgactgcacggccatctacgccgccaacgaccaaatggcatacggcgcaatgctcgggttgcagtcagcgggcaagcgcgtgcccgaggatgtcagcatcgtgggcgtcgatgattcgctggtagatatggttccgcgcttgaacctgacgaccatgaagctgcgctttgacgacattggcgccaccgccttctccatggtccgccgtcaatgcgaaggcgagaagataccggtcggcgtcaaaaccgtaatcccgccggaactgatcgaacgcggttccgtgcgcgacatcagctgacgagcggcatgtgctggcatccactggtacctgtcagtgattcacctgtcagtgatccataggcaattccgcaccgaccaatcgactcggttgtgcaatattctgcacatttccaactatgtgcagaatattgcacactttactatactgtgatatattttgcacatgattgtcatggatatcgccgaatacgcgcggcttatcaaggatgaaaggcaacgccagggcatcagtcagaccgacatggcccaacggctgggcgtgtcacgtcgctggctgatcgaatttgaacacgcccgagtccccaatcccggattctccaccattctcagcgctctgactgagcttggcttgtcgctggatgtctgcaaaaccccgcagcccgccgaactctatgaatggtgacaccatgagcgaaaacactctcaatgcatttctcggcgaaacacccatcggccagtttcgaagaacaaacgatggcagcattattttccaatatcacgattcctatcgttggtcgcaatcacccacaccaatatcgctttccatgcccattaccgcagccgaatattcaggcgacatcccgcgtaatttccttgaggccctggtcccggaatcccctcaggcccgagatgaagccatgcgattgcatcatgcccgatcgacaagcgcatttgatctgttgcaagccatcggattcgatgccaccggcgcattacggctgtccgccgacccgcacttgcccatagatgacgattcgcttattccaatcagcgattcgcagatcgcgaatcgactacgcgcagccgcccccacaggcatccagtccgcaagcgtagacgagcattggtcggtcgcgggacagcagggcaagatcgcactgaggaaccgcaatggatcatggttctccaccactggaatcgcgcggacgactcatatcatcaagcccggcataccgacccttccacaccaagcattcaacgaacacatcaccatgcgcattgtggaggcgatgggaatacccgtggcccacacctcttttcacatctttgatggggtcccagccatcatcagcgagcggtatgaccgtatagtgtccgccaatggtacggtgacggccctgcaccaagaagactttacccaagcgctgggcattccctcatcgctgaaatacgaggaacacaacggcccaacgtccaatgcatatgcggaaatgttgcgcaagcacggtctgcccgatcaggccgaaagcaatatccgagccttcaccgacggcatcctcgccagttatctcgtcggggcaacagacagccacgccaagaactactcgctattgctcgatggcgcgtccgtgcggcttgccccgctctatgaccttgcttcggtgttcccttatttggggcatggcaagcagatcataaatgccactttggcgatgaacatcggcggacgccgagatcttcttcaattacgccgcaaacatctggaacgattcgcacagcggatgggattagatgaggaatccgtgattttacgattccacaccttggtggataggctgccggaggcattcgacagcaccgtgcaacccgctcacgacgttatcgcgagcattggtgcgcaggaattcatcgatagctatcgcaagcgcatcatgatggtgtacgacgatgcaatgagctggatggccagtcgaaagggacagtgattcggacgggcggggattggtctcgccatcccccccctaagaaatcagatcttaagcggcacacgggaaacgaattcgcgcttctcgcctgttattggatcggtgaatcgtagcacacgcgccactaattgcagcggctggctgaaatcgtcgtaggggcgtgtctggatgcgcgggtagaagtcgtcgcccacgatgggcaggccgagcgaattcatgtggacgcgcaattggtgggttttgccggtgcgcgggtggagtgtgtagcggcagatggggtgatttcccggatggggaccaccctccggcgcttcgcgccacctcccgccagcgggagggaaacagaggtcgccgcgctcgatgagggtttcggcgttggccaaacccggttcctcgaatgcggccatcgtgccgtgttccttggtgatgtgcgatcggcgcagcaatgggaacgggcgtggcggttcgacctgcatgatcgtgccgaatcgtgggccgctgatcggccggcagggtgccaggcattcatagatcttgacggcctgccggttctggaacagcatctgatacgcgccgcggcaggccgaatcccgcacgaacaccaatacgccggcggtcatgcggtccaatcggtgcgctggcgtgatgtccggctcccccagccgctcacgcaatcggatcagcgcggtctgccgataccacatgccgcgtggcatggtggccagaaaatgcggcttgtccaccacgatgatccgctcgtcctcatacagcacgtccatctcaaacggaatatgaggctcgtcaatcacataccgatgtggcttactcaacggtcacggacttggcgaggttgcggggcttgtccacgtcgtagcccttgagctttgccatgtccatggcgaacagctgcagcggcaccacgtcaaccagcgggctcatcagcgttgggcaggcggggcgccagaacaccacgtcagcgtaccgttccacatccgggtcgccctgctcggccacggcgatgatgtacgcgccacgagccttgacctcctcgataccagagatcaccttggcgtgcaacacattgcggccgcgctgcggcggcacgatgaacaccacgggctcaccctcgtccaccagcgcgatcggtccatgcttgagctcgccggccgcgaagccctcggtgaacgtgtaggcgatttccttgagcttcaacgcgccctcaagcgccaccgggtagcccacgtggcggccgaggaacaagaaggagttggcgttcaccatgcgctcggcggccgcctggatggtcttgggctgggtgtcgagcacccactgaatcttgcgcggcatgtctttcagggagtcgagcatctgatgaatctcatcgcggaacatcgcgcccttgacctgcgccagatacaggcccagcaggtaggcggcggtaatctgcgccacgaacgccttggtggatgccacggcaacttccgggccggcgtgtgtgtagagcacggcgtcggattcgcgcggaatggaggcaccctgcgtgttgcagatggccagcaccttggacccctgttcgcgcgcgtggcgcagggccatcagcgtatccatggtttcgccggactgagaaatggccaccacgagcgtacgcggggtcagaatcgggtcacggtaacggaattcgtgcgcgagttcgatttccacggggatacgcacccagtgttcgatggcgtatttggctacctggccggcgtagctggcggtgccacaggccacgacgatgattttgtcgatggccttgaagtcgtgttcgtcgatacgcacttcatcaagggtgatgtcgccattcgtgtcgaagcggccaagcagggtgcgctgcactgcggcagggtcttcgtgaatctccttgtccataaaggaatcccagccgcccttttcggcggccgaagcatcccaatccacggtgtaggtcttcgggttttcgaccacgttgccgttgaaatcggcgacgatgaccttgtcggcggacacgcatacggcctgatcctggtcgacttccatggcgcgcttggtgtaggccacgaatgcggcgacgtcggaaccgaggaagttctccccctcgccaaggcccacgaccagtggcgaatcatggcgggctccgaccacgatgtccggctggcggcagtcggtggccagaatggtgaacgcgccttcaagcatgcgggccatacggcgcacagccttgaacaagtctggcttgccttcgtccgcgataatcttgtccacgatcttgccgagcagcttagcggccacctcagtgtcggtggcggaggcgaatcggtagccttcggcttgcaggtcgaaacgcagctgagaggcgttttcgatgatgccgttatggatgatggccaccttgccgtccatgctggtgtgcgggtgggcattcacgtcgctcggctcgccattggtggcccagcgcgtgtggccgatgcccaccgtggcgagcggcatcggcttgcgctcgatgtcttcgaccaggttcttcaaacggccggccttcttgcgcacgaccaccttatccatgccgggcgcggtcagcgccacaccggccgagtcatagcctcggtattccagacgttccaggccttgcaggcagacctccaaaggcttgccgcatgccgtttcaatatttcccgcgtatccaacgattccacacatggctcaccagcctagcggacgattattgcgcaaagcgaatccaacccgccgcctttgcaggattggaacatgccccttcgtgaaaagcgtacgctgagttcatcagcgtacgcttttggagctgcaacaacgagccttcctacagcacgtgctgtaggcggagccgtaaagcggggagcccagtgggctccccgtaggcgacgccgaagcacgacagtgctgaggtaatataacagccttcctacagcacatgctgtaggcggagccgtaaagcggggagcccagtgggctccccgtaggcgacgccgaagcacgacagtgctgaggtaatataacagccttcctacagcacatgctgtaggaagtccttaaacctaggctcggtggggtggtcgatgatgtcggggccgcccttttctacgactacgccgccgtccatgaacacgatctggtcggcgacttcgcgggcgaagccgatttcgtgggtcacgcacaccatggtcatgccttccttggccaaggaacgcatgacgttgagcacttcgcccaccagttcggggtcaagggcggaggtcggctcatcgaagagcatgatctccggcttcatggccagagcacgggcaatggccacgcgctgctgctgaccacccgacagctgggaggggtaatagtccatgcgatcgcccagaccgacgcgctgaagctcggccacggccaggtcacaggcggctttcttggactggtgctgcacgtggatcggggcttccatcacgttctccagcgcggtcatgtgtgggaacaggttgaagcgctggaacaccatgccgaggcgagagcgctgtgcggcgatctccttatcgtccaaggtctgtagcatgtcctggccgtttttggtcacgtgcttgtagccgatgagttcgccgtacacctcgatggaaccgccggtcagggtttccagctggttgatcagacgcaggaacgtggacttgccggaaccggagggccccagaatcacggtcacagtaccgggcataacggttagatcgatgcccttgagcacatgcagcggcccaaacgccttgtgcacctgcacggcctcgacggcaggaatcacggaaccgtcagccgccttgcgcacgaccggagcggagttggtgatgtcattcgtagtcataatcgcgctcccgccttatgcattcaatccgacaaatgtggtctggttgagcttgtccacgtcatccttcggttcaccgtcggtcttacccggcaatggcgtctgcttgcccttggtgcccaccggtcgggcatcgaagcccctgccgaagtgcgcctcgaggcgggactgcacaaccatcagaatggaggtgatcagcaggtaccagaagcaggccacgagaagcagcggaatcggcttgtagatacggttggcgatggcgttggtggcgaactgcagttcgagagtgaacggcacggcggtgaccagcgaggtggtcttcagcatgccgatggtctcgttgccggtgggcgggatgatgatgcgcatggcctgcggcagcacgatgcggcgcatgatgagcgtgcggttcatgcccagcgccttggccgcctcggtctggccggggtccacggcttcaaggccggcacgcacgatttcggacaggtaggcggcctcgttcagggccagaccaatccatgcggcgttgaatgcggtgaccaccacgttggagtcgatgctccagaactccaccgaggtgaacggaatgccgaggctgatcttaggaatcagcacggcgaacagaccccagaaaatgagctgcgtgtacacaggcgtgccgcggaagaaccagatgaagaaccagctgacgccgcgcagcaccggattgatggatttgcgcatgatggcaagaatcaccgacaggatgatcgccacgaccatggagatcacggtaagctccaaggtatagcgaatgccttcaagcacgttctcgttgaacaggtacttccagacggtgggccaatccagtcgcggattggtaatcaagccttgaatgagcatcgcggcgagcagtaccacgatcactgcggccacaatcgggccggggcgcttgaccggcaacgccttgatgcggttggggatgttcagcccctcaccgtcgacttctttcttcgccataatctggttccttggatgtgttaggcagcctgaactgcaagttgcaactagcgttgaaccttagtgcacgaatggggcgactgtgttacaaacagtgcgccccattcgaattttcgcgacagcttgtcgactattcgacggccgggttgatttcggccttgtccagtgcgccggattcgacgccccagtgctggagaatcttagtgtaggtgccgtcgtccatgagcttttgcatggccttctgcacggcttcggcggtctgggaatcgcccttcttgatggcgatggcgttcggcacttcatcgaagtccttgccgagctgttccagctgaccatcggtctgggcgatggcgtagccgacaaccggggaatcggcgaagaagacgtcggccttgccggtcaccacagcggtggtggcgtcggtctgctgcttggaggactggatggtgatgtctttcttgccgtccgccttgcactgcttggcggtcttgttgatggcctcttcctcgacggtgccggtctcgacggc

SEQ ID NO: 966 - DNA, 30839 bp, Unknown
  R117_24m  MAG No. k141_18270
cctcgaggaaggcttggccatcgccacccagcacccggagtggctgctggaaaagaacggcttcaatctgctcggctcacgctccgcagacggccgcgtgccgagcatctggatgagccagaacgcaccgcgactgggagctgtctggcccaattcccgccatacctggctgggcaacgcgtattgcacggcccgtcgcggggtgagtctgttccgttgactccgccagtgtgcgttttctctgtacaatgaaaggcatattgcatcatttcatcagagagaagacgcgatgaactgtgataggtgcggtgctgtcaatgacgataggttccgtttctgcacggaatgcggtgctccgctggcaccgaaacttgccgtgggacacaatacggtcactgatgttccgcctgtgccgatgccacccgccggtcccattcccggccccggtctcagctctagcctcggcccagcgtcgtctgcgcccgccactatcgcggtaccgcagacgccggtaccgggccataagcgtcgccaaggccgctgcggccgttaaagatatgggtgtgccgatttatgccaagcgagtagccgcaacatccaaggccgatacgaagaaagtcgtgtatacctacccggctgggggcagccagtggacgataatggtgcgatttatcttggtatcccggatccctcagtcgagggcatgccggccgacgttatcggtatggataaggatgaggcgaaaaccgcagtagaaaacgcatcgaacaacaagatcgaggttattctcgagccgcgattttccgccaagaaggattttggcaaaatcgtagcttccaattacatttttggtgcgccgtttgaggcgagcaatgaggaaaatgattataaaatattgcaaccgatacgtctgtactacggtgtgggagccgacaacactgaagatgtggtgaccaccggttcaggtagtgattatgatttcgacccgcacgcggattatgccagcactagcaagagtgacaggagtttgccgtatatctcggctgcgggcgaatggcgtgttacgggcacctattgcaaggatggtttcttacctggctcgggtggatgcatctcgctgatttcgaagggtcaagacggaatgaaatacgggtccggttacccgtatttggtgcgcaaaggcgatgagtccaatggcatatgggacgatcgggtcacactgtgcacgcccaccggagacattggcgggtgcattctgcactacaaggatggttcgattcccgataatgaaaccaatatgcgcaaccacttgttggccaaacagtggggcatgttcgagatgtaccgtggctacggatggccggtatgcgacggcacggtctaccgaggctatggggagacggaagggtgtgaccatggtcaatatgtgaggactgatgatatccctgatggtcagcaatccggtgccacctacgaaatggatgacttctacgtttacttcccggtgggatcgaagatcagcaaactcgaggattccgactatttctccaacaaggcgctggctgcggcgaacaaggcggggaagccagacaccgaccggccgttcttcatcatgcgcgaccccaagggatacaagaccacaagcgtcgaagcatacaagaacggcgagcaaaccgccaatccgtttgtacccggtataccgatgagcggtggatacaacccgctagtgaagatggatgtggctcccagcgccgatgcgtcgtctgaagactcggccattgccaatacgtcgcagtcgagtaagaagttcgttgccgcaggcctgtatctgccggtgtaccttgcctctcaaggcaacggcaatgcggaaggattggcaaatacgatgatgaccggcatggataacagtgccggcaatcaggctgtcggggcccttggcggatggagtgctgtcaattcatggctgagttcccatgggcacagaggcaccagcttcaaccgtgatttcggtgatgtacaggccagcaatgctggatatgagaattacagtaccgctcgtgacgcggcccgcatgctggttgccgttgatgcggtcggtggcactggtctgatgaacactgatattgcttcggagggcgtggtgattccgagcggcatgaccgtgcatgcacatcgtggcatgggcatccagaacacgtggaattacttcgccatcgtggaggtgaatggcaacaaggccgcggtctctgtggtcacgcaaaaccaaggtcaggatcgtgccgctcagctgatgagccaagtgcttgcctcggtggatagcacgttgcgcaaatagtacaagcagtatttgcacatgcaactgtgtatacggaccacgccttttggttggcggctgagtggggactattccatcgcgttcattttccagtagaatgaggctatagtgcgtcattcgaccagagagaagagcaatgatgatctgtaagaattgtggtgctgacaatgatgggggaagccggttctgcatgcactgtggtgcgccgctaaccgacgtgagtgctcctgctcctcaggcggcggccggcccgattccagtgccgctgccggacaatactatgacggtgcttgatcacccgccgctgcccggcccaaacgatgggaacgcctatgggcagcccggcgtgccgacatcgagcggtgtggcaggagcgccgaccgcaccgggagcaagtcatactgggtcgatcgcaccgggagcagtgccgcaggccgctccgggtgctcctgtcgctccgggcgcagccacgccgccgagcggcacaacgaccgcaaccgccacattgccgaatctttcgggcaagcgtggcccgaatacgctgattatcgcgctcgtggcggtgctgctggcgttgatcgtagccggtgtggctttattcctgacgtatcgtgccgaggtgtggggtggtaagtcgctgcctgatccggcgtccatcgcctccagcgtcaccgataagaacggcaataaggcatcggtggtcaaggccaaggatgtgaccgagacgttgaaggccaagggcctgaacgcgaagacggttccggtgttctccggcgaggatcgcggtgtgttcctcggctacgagggcacgaatcctggcgctcgcgtcaaggccggttccacggtggtggtgcaggagtcggccggtcccggtgtgccgaagggcacggtcggcaaggatgtgaacaaggtgacgaacacgttcgcgaatatgggcgtgccgattcactataagaaggttgtgatttcgccggacagcaagactccggaagggcaggtcagcgtcacgtacccggctcccggtgcagggctcaccgatgacgagaaggacaacggcatttacattggcgtggcctccaagggcgatggtatcccggtggatattcttggtgcggacaagaacaaggccgtcagcgacttggagtcgcaaggctacagtgtggatttggaaccgcattactcgtcagagaaatacgtgggcaagatttccggctcgtacccggctccgggatccacgttgagttccggccagtcggtgaccttgtattacggcatcgataagtccagcaacatggacgtgctgagcaaaaccaactcgtatgacaacatcaagatggccagcatccacgcgtccgcaatgatcggtatgtactgcaagagcgaggtgacggatgccgccaaggactgcatcacactggagcaatcctcgatgaatccctttggctccacttcatccgaggattatcagtacctgcaaatcaaaggccatgagcctgaagacaaggccgatgtgttgggcctgaccaacttctctcaggacatcagcggcgcgatgctggaagcggattcggaatacggcatggccgcggacaaattgccgatgaaaaaccatctgctgttgaaagactggggtatgttcgagctgtacgcgggcatgggtctgccgaactgcggctcaaaggtgatgtccgcttcgataggcgagtactgcgtgaacggcaactatgaacgggcgtcgttcgacgatggcgaaatgacgccaccggccggggctgagaacgggtcgaccggcatgacctacgacatgaaggacttcctggtctacttcccggccggttccgatgccaagtcattggatgattccggttacttcgacgccgccgaactggcgaaggccaataagcagaaggccgtggataccagccgcccgtacgttctggttcgtgacaagagcctgtacagcgagatcagtgtgagcgccagccggggcaaggatgtggacccgtttgtgccgaccaacagcagtatcaataactatcagaacgcgctggtgccgatgaggccggctcccagcgattcgaccgtctactatctggtggagcagaacggcgatctcgactgggattccctgccggacgccgaggtcaagggcactggcgataaggccgcttccggtgagacgaccggtgacaagtccaaggacagcggcaaacgagacgccacattcaaagaggccatgaaacaggcggcaggtaactatagtttcggttccggtgtcggcgcatggggaaccgtaatgaaagtcaataaggatggcaccttctcaggctcctaccatgactcggatatgggggccacgggagacggctatctcataggaaacgacgtcgatacgctgaacggcaaggcattgctcaacgtgacgagcggagcagataagggatacacgttctacgatttctcgtagtgattcagctgccgtgcggagcggcggggaacgtgaaggaccggcgcgtatgctgtgcgaaacagcattacgtccctagactggtgaggcatgacgaacctgcgattccgcgaaaacggcagcttccgcgtgctgcaaatggccgacatccaagacggccccaacgtgctccccgataccatccgccttatccgtgaagccattcgcaaagccgacccggatctggtggtgttcaccggcgaccagatccgcggttacgatcctgcctacatcgacactttcctgcgccgccgtggcgaggaaccgggcgctcgcgtgcgtgcggtcaccgaggtcgaggccaagctgcgcggaatcaagcggcgggccagagaccgcgtgaacaatcgtctgctggccatgaagtccgacggcagcgattccgacgcccaacaaaccgcgtccaccgcgtccacgctggtctactccacaacatccgatccacaggatgtgccgacgactttggacgagctcatggacgagacccgtgacaaagtccgccgcacgtttgccggcttccttggcccggtcatcgaagcggaagtgccgttcgctgccacctacggcaatcacgatttccagtgcggcatcctggccgacgagcaggacggcatctaccgcgaattccccggctgcctgaacccagtcgacagccttgagccaggcacttttgccctgcccattgaggcttccgacggatccgggcgcgtagctatgtccgtcatgatggtgaattccggcgattacgccggcaagcccgaagagaacgacgcccaatacccggcctatgtggtcaatccgcgtggtcttgatttggctgattccgatgggtatggcacgccaagccccgaggcgatcgattggctgggagccgtacagtccgaacttggcgaacgcaacggcgacggtaagccggtgcctgccatcgccttccagcacattccgccgcaggaattctacgattgcctcaaagaggttcccgcatggacgccgaacgcggtggaaggcgcacgtacccacgccggtcattgctacgtgctcaaccatgagatctgccggccgggatcgcggctgggtgaggcgattggctgtgcagacgagaacgtcggtgaagtggacgccttgcgtgaagcaggcggctacttcgcgctgttctgtggtcacgatcacaagaacgccttcgtgggccacgcgcatggcattgatttgggctacgcacccacctgcggattcgaatgctatggccccaagtcgcgctatcgaggcatccgcctgtttgaattccatgaaagcaacccggccggctacgtgacccgcatgctcacctggggtgatctggtgggccgatactccagcaacgaggtgcgcgtctggttcgaggaccactgcgtgaccggtgccatcagcatgcgtaacgaattgcgccgcccgcaggtattcgcagtgctggccggtgccatgagcctcggttttatggccgtcatccgctcgttggtgaagaagcgataaaaacacgtgaggccggtatgaactggcctcactgagtattaagcgttggatccgcctgaaccctgcttaactgttatttatttctgggtgcggataaaaacaccagagccttcggtgttaatcagcatccaatcggatggtccatccggcgttccacgcttgacgagcatggcctgtgcttcagatggcaacgcatcgctggaggttccagatggatatccggtgaaggtgccacacgggctgaatcctgacttgtcggatttggatttgtcgtcaattttgaaagccgacgcatcacacttcagcgttaccgtgccatctgaattggatgtggcggatgcaaacttaccgctgaacttggtctggatacgtggcgcattcgctgcggaatcgccactgctcatatctgcctcgtccacagtgccggagaagttgccccgatcatccaacgaaatggtggtgaaggcgctgccatcgccagcaatcgtgtaagcgtattgggcaccggccaaatcagaaaacaccttcagtgaggccgcatccggtgtgccggatttcttactgctcttgttggaatccttggaatccttggaatccttggagttgcccttgtccttggtgctgggcgccttcacgtccgcgtccggcagggaatcccaatcgggttcggacgcttcgaccagatagtaggcgtcggcgtcgcttggggccggcttcatcttgacgatgtcggacttactgccgttgtatccgttgtagggcaggaacggattggcgccgttcccggcaccgttgtatggagcggtggtagtgtcgtagagcttcggatcgcggtacagaatgaacggtcgattggtgtccaccgccttctgcttcttggctgcggcaagcgcgtctttgtcgaagtagcccttatcttccaacccctgcaagtcggagccggtaggcactacgaggaacagatcctgcatgtggtattcgccggatgtgggccaagaatcacccatatgcacgccattgccgtcatacattttgccgttggcccaaaagttggtcaggctgatatgcggcatgagctcgaaggcgccataatcttgtgtgactaggtagtcggctttcggactgttgcagtacgcctgctgaatggcgtcgcaggcaatcagagtaccgtcgtaatcgctggtatagtcagcattatcactgccgccttcagtcaccttgtaattgtcgatggtgatgcacttcccatcattagtgcaccactggccgtcggctgcgcgtgtggtaccgagcagcgcgtcaccgcctgtttcggccaaatcatggcctgtaaaggcttctttggtgtcgctggcatcgatgccctgatacagggtcacgtcttcgccggaagacagggacgatcccggagcggggctggcgccggaaaccttacccacgtaatccttggaagagaaacgctgttcaacggtaactgtgtggccctcagactcgagctgggatttgacggtatccacatcctgacccatcacgtcgatgggcagagcggtgtcgtcacccttggcggccacgccaatgtagatgcccttgtctttctcgtcgtccttgaccccagtgccggcggcaggataggtggccacaaccgaaccttcggggttcttcttggcgtcagagacaaacaccttcttatagtggaccggaacgcccatatcggcgaacgtctcagtcaccttattgacctgtgcgcccagagtgtctttcggcacgccggggccggcggattcctgcaccacgaccgtggagccggccttgacacgagcgcccggagcggcgttcttatagccgatgaactcacccgaatccttgcctgagaacaccttctccgttttcgcgttgagtcccttggccttcagcgcggccgtgacatccttggccttgacggccgacgccttcttgccgttcttatcggtgacgctggaggcgatggatgccgggtcaggcagcgacttgccgccccacacctcggaacgatatgtcaggaacaaagcgacacccgcgatgatcagggccgccagcaccgccaccagcatgatgatgagtttgtttgggccgggcttggtcgcggcggttgtggttgccgttgccggggccgtctgcgtggccgtggcaacggtcgcagtgggctgcgtagccgccggtgcggagacgaccgccggagccgacatgccagcagcaccctgcggcataggaatcggcggcactgccgcaccgccggggccggggactgaagcggcagccggagcgggagtcgctcccgctggcgtgggcgcaaccggcgcgtcctgcggtgtcatggaagcactcgacgctgcagtattcgcttcggtggcggtgagcggcgtgccgcatgtttcgcagaacttgctaccttccgcgttgtcggtatggcaattggggcaaagcataaatggaatctcctatgaatcaacgagactgcggagccgaacaataatggtctgactggtgcggccatcggcaaacgcagtaaaaacactgccccggcaaatatgtcggcaagtgtagaaggacgggattgtttcagccgcgcgcgttgtagtcggcggacagatcgttcatcgcatgcagcagcttgtagaagtagaccagcggtcccacgatgatgaaaattcccaagacgtcccacagccagaaggtggctgcggtaacggtgggagtcatgccgcgggcctgctgctcatcgccaatacgggcgctgaggcggtggtaccacaccagccagccgatgcccagcgtcaggccaccgatcaggaagaacatcaggcagtagtgcatcgtgcgcttgccgtcacggcgcgaagcgatgaggttcagggtctcgcccacttcgctcatttgccagatatcgtaaatgccgaaagtaataatgccgagcaggatgtacttcagcaggctgcgcttggtgcgcagttggttgaccgggcgcgggttataggcggcttgctgtgctgcgggctgctgtgggaatgtcggctgtacggcagccggagcctgcgccgggaactgcggcgcggcaggctgagcatattgtggcgccgcgaactgcggcgctgcgggctgcgcggggcgtggtgctgcaggctgctggaagaccggctgcggtgctgtaaattgcggagctgcgggccgctgaccgttcggttgagggatttgcggcatcggaggcatacttggatttgtcataatggacctcttctctcgctgtggaagcccatgcgcctccacgcatagttgcaagtctagtagtactgcgccgggaagcgctacgtgtgctggcatattgtgagatgaacggggtgttggaatgggccgtcgctaggatggaggaagttacgcatgttaccaatgcgtaaacgaatatccaataagcgattgtatgaatggttcgcacagtaaaggaggaacaatgggtcagggtcaatcatccgtttttgatctcgcggcagtggctgcggcgtccaatggggggaacaacgacccgctgctgcctccggcacgattcatcggcgatccgcagaagccgagtcgtatgccgtataacaagtacgccgcctacgacaagcagatcccgtttgattacccggagcgcacgtggccgggcaagcgactgcagcgcgcgccgcgctggtgctccgtcgatcttcgcgacggcaatcaggccctcgtcaacccgatggattccgagcgcaagctgcgtttctggaacctgctcgtctccatgggattcaaggagatcgaggtgggcttcccgtccgcttccgaaaccgatttcgacttcatccgtatgctcatcgagcgtgagctgattccggacgacgtgaccatcgtggtgctcacccagtgccgcgagcacctcatccgccgtacttacgaggcgctcaagggtgccaagcgcgccatcgtgcacttctacaactccgtgtctgtgctgcagcgcgaggtcgtgttccgcaagaacaaggaagagatcaagaagctcgccaccgacgccgccgaactgtgcaaggacctcgagaacgaggccaagggcatcgacctgtactacgagtactcgccggaatccttcaccggcaccgagccggagtacgccgtcgaggtgtgcaacgccgtgatcggtgttatcaagccgactcccgagcacccgatgatcatcaacctgcccgccaccgtggaaatgaccacgccgaacgtgttcgccgacgaagtggagtacgtctccacccacctcgacgaccgtgactccgtggtgctctccctccacccgcacaacgacgaaggcatgggcgtggccgccaccgagctggccgtgctggccggcgccgaccgtgtggaaggctgcctgctgggcaacggcgagcgtaccggcaacgtcgacttggtcacgctgggcctcaactggctcacccaaggcatcgacccgcagattgacctgtccaacgtgcccgagatccgcaagacggttgagtactgcaaccagatcaagatctccgagcgtcacccgtacgccggcaacttcgtgttcaccgcgttctccggctcgcatcaggatgccatcaagaagggtctcgaggctcgtcaggtggccgccgagcgcgctggcgccgatctcgacagcttcgtgtggcttgtgccgtacctgccgatcgacccgaaggacatcggccgcacgtacgaggccatcattcgcgtcaactcgcagtccggcaagggcggcatggcctacctgctcaagaccaaccacaatcttgacctgcccaagcgtctgcagattgaattcgacaagatcgtgcaggactacgctgacacgaccaagaaggaagtcaaggacgaggatatctggcgtctgttcaaggacgagtacctgccgatcgaacagtccggcatgaccgccgccggtgtggttgtgggcgatactcatgacgcctcgctcgcgccgtggggccgcttgaagctgctcaaggtggccgtcagctccggtgaggatggctccgataccgtgctcaaggctcgcctgctcgaccgcggcgtgaacgtcggggtcgatgcgcccgtggagcgcgaggtctccggcatcggcaacggtccgatcgccgccttcctcaacgccatttccaactttggcgttgacgcctcgattatggattacgcggagcacaccatgtccgtcggcaccgacgccatggccgcctcgtacgtggaatgccaggtcggcgaggccgatgatgcgcagatcgtgtggggcgtcggcatcgattcgtcgatcaccaccagcgctctgaagtcgattatctctgccatcaaccgttcccagcgcaagcgctgagcgctaacaacaaaacaaagctccctctgattgcatcagagggagctttgttgtctgtgcttacttactactgggtgacgccgttggtgccggtgttcccgccggtgcctccggaattaccattatcgttgccggtattgttcccgttgttcccgccggtattgccgggattgttgccattgttgccatctccgccggtagtggtgccgggataattcggacactcggtggaatagctcggattggcgaggcactgctgggcgaactcctgggcctgctgttgcttcttggcttcctcttcggccgccttctgctgtgcgtcctgctcagcctgcttctgcgcgtcttcggtggactgcttgttggtgttgttggacaggccgctgctctgtcccttgcccaagccccaagtgccgtcgggtccaccgatcttgccattgtctttagcggtcgggaactgctccacctcggtaccttgcaaggcctgagccatgaactcctggaacaggtgggcggggtatccagtggaagagatgccgtatccggagaaggccggcaccgcctgcggattgcccttatcgtccgggttccagatagcccacacattcatcatgctgggggtgtatcccacgaacgacgaagccatttcgtcgttggcggtaccggacttgccggcgatgggtcggcccagcatgttggatgtgccggccgccgtaccgtacgtggtggtgccctgcatggccttctgcaccaaagcgcagtcgttggcatcgaacaccttggtgcctttgctgggcgcgttgtacatgtccttattgttggaatcaagcactttggacaccatgtgcaaggtgctcttcacaccattgttggcgatggtcgaatggccttgcgccaaatcccacacggtcagggcgttgatgcccagcacgttgtacatggagttttcatcgatatcgccctgaatgcccgcttcatgggcgattgcggccgtgcgcttcggcgtcagatgctcattgacgttcatgaacaccgtgttcaccgagttggcggtggcctgatacagattgatgttgccccagttgttctccagagcgttattcacctcttgatccaagccggtgaagtgctggtgggaattgccgttgaacaacgtatcgaagctgacgccggattgcgcggcccccagcaaagcgaacggcttcatagtcgaacccggttcgaatacggcctgatcggcattgttgagctgcttggacagataatctgaaccggcgtatacggacaatacttcaccggtcttcgggtccagcgctatgccgccgatttgcagggattcaggcatgtcgtccagacgggtgtcgccgatggactgcataaggtcctgcttgctcttgtcgatggtggtgatgatcttgtatccgccggtatccaaatcctctttggtaaaggccttggactgcaccagctcacggcgcaccatatccagcagataaccgttcggccccgcgtattcgttttgctgcgccaccgcggcagtctgcgggaacttggcatcagtgtgctgcttggcagtgatgtaaccatcctcctgcatgatgttcagcacacgcttgaagcgcgatttggccatatcggcgttatcggccggatcccacgtggacggtgacggaataatgccggcgatcatcgccgcttcagacagcgtcagatccttggcgtccttattgaagtatgccttggccgctgcctggatgccgtaggagttgcggcccagatagatggtgttcatgtaattgcacagcacctcgtccttggactcggtttgcgcgattttgatggccacgatggcctcgcgcgccttgcccacataggatgtggtttcgcccatgtaataccgctcggcatactgctgggtgatggtggaaccaccttggcgcgtgcccttggtcacattattaatgaatgcgcgggcgatgcccctcagatcaagacctttatccgtgtagaacgtacggttttcggacgccacaatcgcgttgccgatgtagtccggcagcccctcgcaagagatgattgaacgattctgttccgcgtaggagccgatcgcggtggtgccgtccgcgtaatacacggtggttttctcggccaacgcgaacttttcgggttgcgggacctcggtggtggtgtacaggtatgcgaatactgcgataccggccagcaagcccagtccaatcagggagaagaagatgcccagcacccatttcagtacacggtgcttgccttttcctgtgttctttttcttcctgttcggggctcgatggctattggaagccttgtggcttgcgtggcgggaacggctctcctggggcgtataggggccctcctgtgcggagtggtcggctctgctttgcgcggtgcgcggttgcctcagagcggggccattgcctcccgaatgtgcacgacgagtataagaagccatggtgtccaccgtaactgttggccttgaacaatcgtttgacgtgagcgtaaccacacgcatttatgccggtatttttccggaattcttacaattgggcacgttccttgatgctgcatgaatattgcctgaatgcgctggttggcctgccgtgcgacccggcgcgcacgtttcgtgtcgctgcgctggtccatacgtctccatagacttatccccagcctccacgcggcgctatgtcacccaactcccccagggcaggaatgcagcaagggtaagtggcctctgacgggtgcgtggaggttttccatttgtgcggatttggccgtgagctggcacgagcacggctccctgtccggggcgcggccgtacagtcgaacgtatgaatgacgcacagacccctagaattcgcgacccgcatgcggcggtcaatctggtcggctcaggcgcagcgcagcctgactcgtcgtcgaacgttgttgacccattggctgcgctcggcccggtctccggttcagatgcatcggcatccacatcaggctccttaggggatttcaggccgctgggcatggacgatgcggatggggcatctgatatcgaccgtggcttggcccggcttgacccgcttaccgtgcgcccgcgaatctccagccgcgtactgtgcgtggtattcggtctgctcctgatcgctattggcttcggcgtgtggtgggggtgcgtgtttaccgaaaacggacaatcgtacgacgaactggtctggaaaaacctgcacaacgatgtaccgtcctggaccaccggcatgatgaacgccgtcgcacaatcctggctggttatcgctgtcagctgcacaattgccgcaatcggcattattacggcgctgattcgacgccgctggtggttggccgggcaaatcgccgtgttcgccgtggtctgcttggccgtcacccgtatcaagggtctgttgccgcgtccgttcatcatcaacactgaatcgcctgccgctaattccgcgccttccggacacacgatgctggccgcagcctgtgcggtgattctgctgcttaccgtgcctcgcgcggttcgagctttggcgggcgtcatcggcgtggtttgggcggcgaccgtcggtgtctctgtgatatacgggcaatggcatcgcccttcggatgtggcgatgtctatcctgctggtggcgggattggccctgctcgctctggcggttacacgcaagtccggcatggacgagccgggccaccgcgtctcctcagtgagtgtgcagatcgtcggcagcgtgttgattaccgggggcctgctgttgctcgcctacagcggttatgtgatctggcaggtggtgccggggctcaatgtcagcgccagttgggcggttcagggggcgaatgtcagcgctgttgtgggcattacgggtgtggccatgctcgcattcggactgttgctggccctacgtcagatcactgcagcgcccttaagcaggctgggcctgatcggcgctccgccggcaccgcccaaacggtaaaacatgaggtgcgaacggccgaatttgcccggcacaacggcggaatttggcagttggatatgattcatgagtattatgacgccagaaacgtcgtgtgtttcgcgcaatacataaggagtgggtatggctaccaaactggtgattgtggagtctccgaccaaggcccacaagatcggtgactacctgggcaaggggtacaccgtcatggcgtcggtcggtcatatccgcgacctcgcgcagcccagccaggtgcccgcggcagacaaggccaagttcggcaagttcggcgtggacgtcaacgacgggttcaagccgtattacatcgtcgacggcgacaagaagcgtacggtcagcgaactcaaatcggccctgaagaacgccgacgaactctatctggcgactgatgaggatcgcgagggcgaggccatcgcgtggcacttggtgcagaccttgaaacccaaggtgccggtcaagcgcatggtgttccacgagatcaccaagaacgccatcaacgcctccctgaacaacacgcgcgacgtggacggcaatatggtcgacgcacaggagacccgccgcatcctcgaccgtctgtacggctatgagctgtcgccggtgctgtggcgcaaggtgggcccgggcctgtccgccggccgcgtgcagtccgtggccacccgcctgatcgtggaacgcgaacgcgaacgcatggcgttcaggcgcgcgccgtactgggatatcgtcgccatgttggccgcgcctgacgcgctgggggagcgtgccgaattctccgcccgcatgatcgcgctcggcggcaagcgactcgccggctccaaggatttcggtgccgacggccagctgaccccggacgggttcgcggcgaacgttcgccagcttgatgaggctggtgccactgccgtggctgaagcgctgaggaccgccgatttcactgtgatgtcgatggaaaccaagccgtaccgccgccgcccgcagccgccgttcaccacctcgaccttgcagcagaccgccggcaatcgcctcggcatgggtgctcgcgtcgtgatgcgcgcggcccaaagcctgtacgagaacggctacatcacctatatgcgaaccgattcggtgacgctgtcgcaggaggccatcaccgccgcccgcaacgccgtctcctaccatttcggcgacaagttcctctccgccgagcccaagcagtacgccaccaaaaccgctggcgcgcaggaagcccacgagtgtattcgcccggcgggctcgcgcttccacgacccggatgagctggcttccaaacttcccggcgaccagctgcgcctatacacgctgatctggcagcgcacgctcgcctgccagatggctgacgccaccggctccaccgccaccgtgtgcctgtctgcgccggccggccccaccgagggcgaggccgtgttccaagcgtccggcactgtcatcgaattccccggctttatgaaggccacgggggagggacgcaagcccaaggccgccgttcccggcgctggggctggctcggaccaggctgctgccggcaagacggacgtcaaggccgtcaggggtgacgcctccgaatccaacacctccctgccgccgatgagcgtcggccagcaggtcgaggcaagcgacatcgaaccggacggccatgaaacccagccgccggcccgctacaccgaggccacgctggtcaagacgctggaggccaaggagatcggccgcccgtccacctacgcgagcatcatctccacgattatggatcgcggctatgtgtatgagcgtggccgtgcgctgatccccagctggctcgccttctccgtgaccaagttgctcgagacgaacttccccaagctggtcgactaccagttcaccgccgagatggaaaacggccttgaccgcatcgcccacggcgaggaatccggccgcgactggctcacccacttctacttcggttccggcgagggcgccgcccgcaacgccgacgaggcgcacgaaggcctgcaacagcaggtcgcgcagctcggcgagatcgacgcgcgcgccatcaacaccatcgacatcggcgacggcctgcacgtgcgcgtcggccgttacggcccgtatctggaagacatggagcatctggacgtcgaaggcaacccgaagcgcgcgtctctgccggacaccatcgcgccggatgagctgacggtggccgtggcccgcgatttgatcgacaaccactccggtggaccgcgcgagctgggcgttgacccggtatccggcggtaccgtcgaggtgcgcaatgggcgtttcggcccgtatgtggcgctggtgccgccggctgaggcttcggctggcgctgctggcgatactgctggtgcttctgcggccaagaagggttcgaagaaggccgcggccgccgccgcgtcgcgcccgaagatggcctcgttgttcaagacgatgagccctgaatcgctgtcgctggaagacgcgctaaagctgctgagcctgccgcgcgaagtgggcacatacgaggaaaccaacgccgaaaccggcgaggtatccgaatgcacggtggccgccaacaacggtcgctacggcccctatctgaccaagacgggtgccgacggcaagtcggagacccgctcgctggcctcggaagacgagatcttcacggtcgatatcgacaaggccaaagaactgttctcgcagcctaagtacggccgcgggcgtggccgtggtgccgccaagccgccgctgcgtgatttgggcaaggacccgaacaccggcaagaacgtgaccatcaaggacggccgtttcggcgcgtacatcaccgatggcgagaccaaccgcacggtgccgcgtcagtacacgcctgaatccatcacccctgatgacgccttccgactgctcgccgaaaagcgtgcggctggtccctccacccgtggccgtcgcggtgctgggcgtgccggtgccgcgaagtcgggagccaagggagccaagaagggcgctgcttcggctgcgaccaatgccgccgaggccaagcgcgccggacgccgtgccgaggtgaagaagctggcgaacaagggctggtccaaccagcgcatcgccgaaaagctcagctccaccgccgccaccgtcaagaaggatgtcgactggctgaccgccaacgagggctacgagcgccccgccgtaattcccaagcgtggctgagcggaattattgctctacttgcgtttcaaggggctgatttctcgttttgagaatatctacttccgcttcaaggggctggtcatctgctgaaccacgagtatgaacggctccgcgccaacgtcattccgccgttttgggacgttgtctacttgggtaacagcccctcgaaacggaagtagaccttcagaaaagaccaaatcagccccttgaaacggaggtagagctggtttaactgcctgttgggcacaactctgcgcctaacgctaaggtcaatagcatgagcggtctgtttgtttcgtttgaaggtgtcgatggcgtgggcaagaccacgcaagtcgagcggctgcgtgcgtatcttgaggctcaggggcgtaccgtggtcgttacccgtgagccgggaggcactgcgctaggcaaggccattcgccaactgctgttgcacggtgtggatgggggcgccgtcgacatcgcaccgcgcgccgaggcgctgctattcgctgcagaccgagcccagcacgttgccgaaaccatccgcccggcattggagcgcggtgaagtggtgatcaccgaccgctatttagactcttccttggcttatcaggccggtggccgcgaacttacgccagaagagattcgagccttaagcatgtgggccaccaacaacctgctgcccgaccgcacatatctgctggatatggatccggcgctttcccacaatcgtcttgagcatgccgaagatcgcatggagtcggccggcagcgacttccagtcccgcacccgtcaggcgttcctcggcttggccgtggccgagccgaatcgtttccacgtgatcgatgccagccagtccatcgaacaggtgtggtccgccatcgaagcggacattcagacactgctgcgggacaatgttgcagatgtggatacggtgatggcgcgatccggggcgtctacaggagccgtgacgatgggcggtgtccgatgagcgtatgggattcactagtcggccagcagccggtaatcgacatgctcagtcgcatcgcgcagggcgacccgggtcagatcacccagtcgtggctgatttgcgggcctcccggctccggccgttccaatatggcccgagcattcgcggcggcgctggaaagccccgaccacggcatgaacgatgagcccacgcgcgtcacccaacaggtgctcgctggcacccacccggatgtcacagtgctggccaccaacaaagtgaccatcggcatcgaccaggtgcgcgagatcatcaccgcctccgagcaaatgcctgccacggcaccatggcgcatcatcatcatcgaggatgtggaccgcatgctggagcgcaccaccaacgtgctgctgaaggagatcgaggagccggctgaacactgcatctggctgctgtgtgcgccgagtgcccaggatgtactgcccaccatccgctcgcgcacgcgcatcgtgaacctcgccgtgccctccacccaggcggtggccggattcctgacctccaccaccaatgtcgagccaaaagtggcgcagcgtgcggcccgtttggccgagggacacatcggcatcgccaagttgtacgccactgacgagcaggtgatgacggatcgcgacgaattggtggtgggcgtactgaacctcgctcgcgcctcggacgcggtgctgctggccggcagccttatcgacaatgccaaggcccaggccgaggcggacgcaagccgcatcaccgccggccaggaagcggaattccgccgcatcaacggactggcaccgaacgaccgcatcccgccgaaactgcgtggcgcgttcaaccagatcgccaagaaagacgatgtgaagcgtttggtcacccgccgtacgcgcgacgtattggatcgtgcgctgaactccatcgcctccatctaccgggatgtggcggtgctgcagaacaatgcggaggattcggtgggcctcatcaacctggagaaccgctcgccgatcaccgaattgtcggtgcggttgaaccgggccggtgccgtgacccgtctggacgaagtggcccacgcccgcaagcgtctagccggcaacggcaacccgctactggtattcgaatccctcttctgcgccctaattccataacccgacgcaaccagccccctctgacgagggggctgtcgagcgcggcgagactgggggagagacccccgtaacgcacagcccccagtacgtcacacatatgagcgatactgggacatatgaagatttccgccgatttcaccgtcattccggacgattttgccaaggccgccgcgcctgagtacttcaacggcggcgtgccggtcgtctccttcccgttctacatcggtgatgtgaaccccgaggcccgttacctgcactgggagttcgtggacccggattcgattccggtctgtggcttcgagtggattcactggtccgtggccaatctgccgattgacgcgctgatgtacgacttcaatgattcgcatgcgttggccatcccgccggacttctcccgtcagctgccggccatgattcccgagaccgtgcaaggccgcaattcttcggcctccaagttcttgggccgcagcactgacccaacggtgatcatgcggtacaacggtccgcagccgccggacaaggaccacgagtactacctgcaggtgtgggccaccaagaagccgttgcccggcttgaatcagggcttctggctcaacgagctgttgcacgcgctgcgcaacagcggcgaagcgcccgacaccgacggcatcttcctgaccggtaaggcgtgatttttagttggcgtatgtgagctccctctgatgagggagctggccgccgtaggcggactgggggagagacagctagagtgactacccctcagtctcgctttgcgagacagctcgtcctgcaattacggacgggctaccgcccgcaacatctgtggtgggacttatctcccaccctcgcctacaaacagcccaccgggctgtttgctgaacggctcagcctgacaaggggagcttgaataagagaaaggacaccatcacactatggcctgcaccacgattctggtaggcaaagacgcgagctatgacggttcgaccatcattgcccgcaacgaggattccgcgaacggcgagttcaacccgaagcgcttcatcgtcgtgaaaccggaggaacagccgcgcgaatacaaatcagtgatctcccacctgaccatcactctgccggacgacccgctgcagtacaccgccgtgccgaacgcggacctcaaggaaggcatctggggcgaggccggcgtcaacgaggcgaacgtggcgatgagcgccaccgagaccctgaccaccaacgagcgcgtgctcggcgccgacccgttcgtggaatacacgccggccaggggagatgagcccgaggtgcccggcggcatcggcgaagaggacttcctgaccatcgtgctgccgtatgtcaagaccgcacgccagggcgtccagcgcctcggcgcgctgcttgaggaattcggcacctacgagatgaacggcgtcgccttctccgactccaacgaaatctggtggctggaaactgtgggcggccatcactggattgccaagcgcgtgccggacgaggcctacgtgaccatgccgaaccagctcggtatcgacgaattcgaccttgaggacgccctgggcgaccaagaagcgcacatgtgctccgaagatctcgccgaattcatcgaaaccaaccacctggacctcgcggtggagaacaccaccccgttcaacccgcgcgacgccttcggctcccactccgactccgaccacgtgtacaacaccccgcgcgcctggtacatgcagcgcttcctcaacccgtacgacgaggtgtgggacggcccggacgccgaccacaagcccacctccgacgacattccgtgggcccgccagcccgagcgcaaggtgaccatcgaggacatcaagtacgtgttgagctcccactaccagggcaccccgttcgatccatacggccagctgggcgatgagcgcacccgccacatgtaccgcacgatcggcatcaaccgccagagccagcttgcggtgatgcagatccgcccgtaccgcccgcaggcctcccgcgccatccagtggatggcatacggctccaacccgttcaacacgctggtgccgttcttcccgaacgtggacaccacgcccgcttaccttgaggacaccaccacccgcgtgacgtccgagaacttctactgggccaaccgcatcatcgccgccctgtgcgatggcgccttccgctccacgtccaacgccgtcgagcgctaccaggagaagaccggtgcgatgggtcaccgcttggtcgccgccaccgacgagcagatcgcccgtctgggcttgacggccgccgaggaagccgcgcagtctgccgctgaagaggaattcgaggccgacaacgtggatggcgatgtgcagccgatgaccccggacgagaccatcgccgcgctgcgtaaccccgaggtgcgcgagattctcgccgccgccaaccagaccatggccgaccagctcaaggaggaaaccgacaagctgcttgactccgtgctgtacactcgcagcatggaaatgaagaacggcttccacatgtccgacttttagtccgtattgagctcccctccctgaggggaactgaccgcgaagcggactgagaggctaagctgttaagaaacagcccagtgggctgtttctaggcgaagaggcggcggcggccgccccaccaccccgctccgccatcatcaacacagaaaggcattaaatgaccaccatcgaagacttcaccagccagtacggcctggtccagaagatcgacgcattcggttacatgaagtacctggctgagaacccggacgccccgtgcaagcacggcaaggtggtgctcgtcaccgccgatacgccgctcaaggcatcgcgcggcgaaggcaagaccaccacgaccatcgccttgatcgacgccctgaacaagcgtggcattgatgcggccgccgtgctgcgtcagccgagcatgggcatcaccgcagccggttccaagggcggtgcctccggcggcggcaaggcatccctgacccaccccgagctcatcgactggggtctgtgcggcgaaatgggcgccatcgaggcggcccagaacctgctcgtctccttcgccgagaaggccatcgatgaaggcaagcttgacacgattctcgtgccgcgtgtctccgaggtgccgagccgctccctgcgctccaccgccgtggactacggcaagggcaacgtgccggagaaggtcgtgctcacgccgacctgcgagctcatgcagatcatggtgctctcccgctcgatggacgagatttccgagcgtgtatccaagatgatcgccggcaccaaggacggcaaggccgtgaccttcggcgagttcgtggacctgtggcgcatcaccggcattctggccgacgcggtcaagccggccaagaccgagaccgtgaacggctccccggtctacgtgcacggtggcccgttcgccaacgtgtccatcggcattccgacgctggtttccgtggaaatggcctgcgctctgcatgacgtggttgtcgtcgaagccggttacggcaccgacgccggtgcccagaagtggctggacatcgcctgtcgcgagtatggcgcgcagtggccgtccgccgccatcgtggtgacccgcgcctccacctggcgcgacgatcccgagctggcctggcgctacccgttccacgtgcagcgcctggagaacctggacattccgaccttcccgctcatcaacctgtgggaaggcgaggacgatcaggtcccgtccctgcaggccaccgccgacgagctgggcttccgcacgccgatcgtcggcaatctgttccgcgacggcggcgaggcgctggtcccgcagcttgacggtttcgtcgatgcattgcagaacggctccatgccggctgaaccgcattcgcacaagggcatggccctgaccgagaacgccaagtgggtggccgagaacgcctacggcgtaccggccgagcgcgtgatctacaagccgggcttcaccgagtccgtgtccgaggccatggaactgtgccagagcgcaggcatctcgctggatgatctggcgttcgtggcggtcaagtccccggcgaccatgaccgacaacgaccgcgcccccgaagaagagcgcaccgtgaccctgaagaaggtcgaggtgcatgccggtgccggtctggtccacgtcaacctgaccaccagcctcaccacccccatgcccaagattgtgtgatgacaggcatgaggtgaggtaactcgttttcgaggggcggatttccggttttccggaggtctatctgcgtttcgaggggctcttcgattgcgaaacccggagtatgaccattgaaattgcaatgtttatactccgggtttcttgttttaaaagccccttgaaacgctagtagagcttctgaatgttggaaatcagccccttgaaacgtagaaagcccgccaccggcgggctttctacatctgagcttccctctttgagggggagctgtcagctaagctgactgaggggagccagaatacgcaaactagttgccaccctgagccattaaacggaaagcccactgggctttccgtaggcgatgcgaacagctatgctgcgaggggaatggtggcaactagaagttgccgccattccagccccaatcggtggtggcggtgtagcggatgtaggtgcggtcctcgggaatgccgagtgtggagttcagcgcggccataatgctttcggtcagcttttcccaagcagagcccggcacagagcggccgaatacgttgacctccacataggcggcgggctggtcatcgctaccaccgaagtagattggcatattgtcctcgaacgggcacatcagccagccttcggacttgcccggcacagcggtaatcgccttgccgtaggcggccttcagtgcctcacgctgctcgggggtggtggacacggacacatgagtgtgaataacgggcataattcctccttgattcggttcacttccagtctagcctcagcggctgctgttgaacatggcatgcggacgtaggaagctgcttgcagaacggaccggggcaaggccaattggggatattattggcctttccagccaatacacgttccgcagtcagcccaatagtgttgaatactcttgtgagaaaactgattgaacagctgatgaagttcggcattgtgggcgttatcgcctttgttatcgactggggtatcctcaacctattggttggcatattccacatgcacaacgtgctggctgccaccatctctttcatcatctcgctgattttcaactatctggcgagcatgaaattcgtattcaagcatcgtgatgacatggcacgctggatggagatccttatcttcgtggcgggcgctgtagtcggtctgttcatgaatgacgcgattatctggatttccacctatggtatgaaccatgatgcctatgtatcgcagcatgccgaatatctgttgcgcaccaatatcggcaagttggtggccactgccgtggtaatgatctggaacttcttgattcgcaagtggctgctcgacgatacgcacaccaatgcgatgaaccgtctgaagtccgctgaaaatcgactgaatgccgaggagcttgaagccaagtggcagaacagcttctcccacaagctcggcatctggtccttggagcacacgcccaaaggctggccgaagtagcgttttgacgtatgctaagccccctcgtcagagggggcttagcatacgtctcacacactcacttcagtcagggtcggctgctcggtggagcccttgatctgcttgaagccgatcagtgcaatcaccagcgaggccagtgccaaggtggtcaccaccatgaagcctccgtgcgagcccatgcggtcgatgaactggccggcaatcgccgaaccggcggaggagccgatagaattcatcgcacccatccacgccatgccctcggtcaagcgagagggcggcaccagatgcagcatgagctggttgccgttgatccacgtcggggcctggcatacgccaataatcaagtagatgatcatgatcacccacagatgcttggcgaacaggaacgtactgatgccgatgttcaccacggccaggcagaagtagaagcgcttccacagggcaatcgaccagttcttcgcgccatacaccaatgcgcccatcagcgagctgaaggagaagcaggcaaacacaaagcccgtgtactgcttcatattcgcttcggtggcaaacgcgatgatggagatgcccgtagccgactggaacgcgcccaaaccgaaccaggtgacgcacaccgcaatcagacccggaccccaaatggacgccttcttgcccgaacgcgcatcggcgaccgcctgcttaatggctgcgttaatcgtggcctcatcggtcacgccttcacgctcaagacggcggcgggtctcctcggcggcggtttccaccttcagcgcctcagccttggcggcctcgcgctcacggtattccttgcgggagatgccctcggcacgtgccagcgcggtctgcgacggtggctcagtggtcagctcggtcaggaacatcagcgcaccgaccaccacgcacatgccggtgaacgagaacgccagcaaaccggagatcacggccagcgtggaggccagcggattaccgatcacccacatgcattcgtcgagcacgccgcacagcgacagcgcgcggttcgtgcgctcccggtcacccttaagaatcttggtccagcgcgcgcggctcatcgcgccccacggcggaatggcggccaggaacggcgtcagacagtacagcacccattccggcgcgcggttggtaatcgccgtcaccagcgcgatggcggccacaatccaaacgataatcgtcggaatcgagacctgcctctggccgaacttgtcggtcagcttgcccagcagcggcgtggccacggccagcgcaatcgcctgaatggcggtgagcatgccggccagcgaatagttgccgtaataatgctgtacggaaatggtgatggtcatgccgaccatcgggaatggcatgcaggcgatgaccgagccgatggaataacgggcggtatgcggaatgcgcagtagttccgcatacccaccaaagactttgtggcctacttccttgatgccggccagaatggtgctcgagttcgagttggacgagttattggacataacagcactacgctcctttccgctcccgattggatgtcccccgctggcgtggcgttgccggcgaagccctcatcgaatgatgtgttgtccatggtcgcgcaaagtttgcgtcggattttcccatccgcatatttgcgtcacggatactctacgggtgtccactccgcgacacgcggtagattggagatattaagacaacgttctcatgcccttcagggcgggaagcagaaaggcggctcatgagcgctaccaccatccatttcgtccggcatggcaaggtatataaccccgaccatctgctctatgagcgactgcccgacttccatctttccgaccttggccgtcgcatggctcaagccaccgccacgtacttggccaagaatccccaaaccaatacgattgcagccgtctactcctcgccgctcgaccgtacgcgcgagaccgccggcgcgattctcgatgcgctgaaccccgtgcgcgaggctcgtggcgaggcttcgctcacgctcaccactgatgaacgggtgattgaggccggcaacgagttccgtggcaagcgcatcggccatggcgagggcgcgctgtggaagaacggcaactggaagctcgtcaccaacctgtacaagccgagctggggtgagtcctatcagcacatcgcggcgcgtatggacgacttcgcccgcgagaaggtggcccagcaccccggcgagcagattgtggtggtcagccacgaatcgccgattttcagttatcgccattatctggagaccggccaccccgagcactggatgttcctgcggcacacggcgctcgcctccgtgacctcggtgacgtacgacaacgaaaccggccgtgtgatgtcaatcacgtatgtcgacccagcagccaacgtcaagtaacggcacactggtgttaggacattggctcccctcagagaggggagccaagacgcactgcaatcgagtggtggacgcaaaggagcatagatgaccattgaactcaatcgtgaggcaatcgcacaggtcgcggcattgccggcggtaactgaggccgccgaagccggctcggcgctgatcggcctgtggccgctgaccgaagccatgcagatggacaatgacgcaaagtacgcggagaacctgcaggtgcgcgtcacccgtgcattcgcccgcatcctgaccggcgaggacgtcaccgtgccggacgccgagttcgtgtatgagggcgccgatgagattcccggccgtccgcagaacatcgtggacgccctgctcgccgccaatgacgcctacgacacgatggccgactacgccgagtccggtgatgccaggctgatcgttgaggcggccgacgtgttgggaatcgactgggattccgcgacggcggaatcggtgagggaggcggtcgcggccatggaagcccaggtcgaggccgacgctgaagccgatggtcgtctggccacgtctgccaagcccgccgatgtggctgttcggttcgccaccgcgctcgccgtgtgcgatgcgttattgggtgaggtgtccggtgatgctgtggccgatggttcagcggacagtgtcgccaatgctgccgccaagattctgccgattctgctctacgtcaacgaactgcgcgagcagtgctcggtgccgcgcatctgcctgaccgacgagcagatcctcgggttgcttaatgcccgtgccaaagccgccgacgcagacaccctgaccgccaccgccgaatacatcgctcctctggccgttgccgaatggaacaagcaccgtgaggatgtgctctggaacccggacgaggctaagcgtcaggccaaggaagaagacgaaaagcgcaataaggaggctctggccgccaagttcgcgcatgtcaaggatgatcccggcaaagagaccgtggagttgtaaagagtaagggcgttgctctggccgatgcttcgctcgtaacggttagaggcctggtgcctctccctccgtcatcgctttgcgatgccacctccctcgtcagagggaggtggggttactgcttatcgattaccgagccgcgatcggtcagcgtcgggtccacgtagatgtggcgggttgtagaatccgggttttggatgcggttgatcagcaggttgatggccgcctcggccagatccttatcggacgagcgcagtacggtcagcgggcgggagctgggcgtggcaaagccgttgacggagagcatcgagatatcgtccggtacgcgcttgccgcggcgctccagggtctgcgcgatggcgatcgccagataatcggagtgcaccagcatggccgtcacgcccgaatccagaatggtgtccacgatttggttgacgtccctggtgttgtacggctgaatgccggtgatggtgaacgggcattcgatggcgtcgctttccgtcacgatttgcttccagccatcctgaatcagctccgaagtcggtgtatcggtgaacgccgcgcccacacgggtgtgaccgtgttgcaggaagcgcaccgccgccttacgcacgccatagggatggttggtgcgcactgaatcg

SEQ ID NO: 967 - DNA, 11803 bp, Unknown
  R117_24m  MAG No. k141_18334
accaatggaacatagtttcattcgaggaagaggagcgatgaagttgcgtattaccccagtattcccggtcaaacgtttcgccgccgtgtctgcacagaacgtgaagaacgtgcagttcgattacacgaacatgcccacgtacaacacgatcaccaagtagcgcgcactgccgcactgatcggcggcacttgccgcatacatgaatggccggtgtgctgcggattccttaccaagaatccgcagtacaccggccattatgatatatgccgcaatacaggggggcaatcagccctgcaccttaccgccttgcgcgctacggtatccgaagttcatcatctcgctgttgtaggcgaccacgccacggccgaccgccggcagaacgatcatgccaccatcgccatgatgcgcggcgacttcgtccaaagtggccgtcgcggcatcctcgacgttctcgccggcgaaacgcacacgatccgacacctgatgggcggcgaccaccttgatgaacgcctcgccgatgccggtgcaggacaccgccaccgtggactggttggcgaacgtgccgcaaccaggcagcggcgaatcacccacacgaccgtgcatctggttggtgatgccgccagtggacgtgccggcggcgatattgccctcggcatcgcgcgccacggcaccgatggtgccatgcttctcccactcatcgccaccggactgagcctcggccaaggactgacgacgctgttcggtgatgaagtactcgttgctttcggtcgcgacgccccaatcggcgatctcggcatcggtcgggtccgcgaacagcacatgcttggtctgctctttgacggcacgcgccgcatcgatcgggttcttcacggtgcttacgccggtgaccgcaccgacctcgccatcgccggtcatcaggcaggcgtccatctgggcgatgccatcgctggtcagggcggcaccacggccggcgttgaattcgggagcgtcttccatgacgtggatggcggcgaccacagcctcatgcgccggtgctccggattccaacaactggtatccggcatcgagggcgcgctgcagatcaagttcgacctgggcgatgcgttcaggcgtgctgcgcttgccacgactgcccgctccggcgtgaatgataagcgtgatgccggtttcgctgcccgccagttcagtggtcaccggagaaacggaggatgtggtcatatcgtgtccctttctggagtcagatggatgtgctgacgccaacgtatcgttgcttccgcatgtatgatagccgttgatggccgcgaccggttccgcatttcgcatcatcggctcgcgatggcgtgactcgttactgcgccacctcgccactacgccaggggcaatgcgatgccggctcgatcggccaggtcacgcaacgaccacgtggtctgccccgttcgcccgacaacgctatgcgcatgccacagcgaactgatgatggcttcctcgcttattcattcgtcgaatgcacccatcgatgtgggtatgcagccatcaaaaaactcgacaaccgcaatgagccagtcacttggctacatctgtgctatcgtctcgccaatgattcgaatgccggtatcaatgtcagcagcatccgggcgcacaaagttgagacgaatatgggaatcatccatttcgtcaacgtcgaacacgctgcccggcatgaacgtaacgccttgggaacggcaggattccaatacatccagagagcgcacgccgtccggtaaggaaacccaaatatagtagccgcctgcaggcacggtccaatacacttcatccggcgcataccgctccaatgctgcgattgctgcatctcgtcgaatgcggtaagtcttgatcaaaccgcgcaaatgttcggcgatgcggccttctttaagcagttccaggcagatgcgctgcgatgacgtgctcgtatgctggtcgaccatgcgccgcagagccgccagccggttaatcacatgcgggtcggccacaacccatcccgtgcgcaggcccgaagtgacggttttcgagaacgtcgacaaatacatcacgtatcccgcattctccatgcccttaagcggtatggggcgatgtgcgtcggacgattccccgccgtaccacaaatcgccgtaagcatcgtcttccacgatcagacactgatagcgccgcgccacgtcgatgagttcgctgcgtcgttcgggcggcagcgtggtaccggtggggttttggaatgtcgggacggtgtagatgagcttgggccggaatcgcgcgcaatacccatccaacaggtctgtacgcataccgtgctcgtccactggaacgccgatgatgcgcgcatccgccgagcggaaggtctgcaatgccgggaagaacgtggattgttcgaccagcacgcagtcgccggggttgatgaacgcgcgcacgatgaggtcgatgccctgctcggagccggagagcaccatcacgttgcggacgccgcattgtacgcctcgtgtgcgcatatgttcggcaagcagcgcacgcaactcttcgaatccctcgataggtgattccggttggccgtcgaattcccgcgattcgaacgcctcgatgctcaccttgcgcagcagatcgtccgggatatccgccgggttcggcgaaccggtggcgaagtcaataatggtgtcgccgcgctgcgcccgctcggccgaggcgatgtcatggtaggtaaaccggttggaataatcagagaacaacaccgaccatggcggacgcacgacggttggctccgggccctgaaccgagcggctttcacgaatcgtatggaccgccgcagagctgctgccctggtccgtcgtcaagaaaccagtggaggtagcacgttctacgtcgccggaagaggaggcttgcgatgttcccatttctgccgacgatcgtgttgttcgcgttattgcattcccgaagtcactgtttgacgtgtgcggtgttcggcttgcggaggcagccggcagcacgaacgtgcctttgccgactttggaggagataagaccttcgtccttgagctgctgatacgcctgcaacaccgtggtgcgattgacttcgagacgcgaggacagctcgcgttcgggaggcaggcggtagccctcggccatcgcgccggagacgatctgttcacgcagctcggcagccagctgccggtacatcggcaccttgctgcgtcgattcagctcaagctgcatggcagatcgtctccttgattcgtcagtcggataccagtctaacggcagacgaatcgactacagcgacaggaagagctcgtggatgcgggtatcgtccgtgagttccgggtggaaggcggtggccaggatattgccttgacgcaagcccaccacgtggccatcgacttcggtttcgaccgtggcctcagggccgaccgacaccacgtacggtccgcggatgaataccagtgggaagtccgtgatacgctgcggatcatccgctgcaccaaaatcggcggtggcctggaaactaccgagctgacgaccataggcgttgcggcgtacgacggcgtcgagcgcgccaaagtagacattgtcgtcattgtcgagctttttagccagcagaatcatgccggcgcaagtgccgaataccggtttgcctgccttgatgtgggcggcgatcggctcgaacagtccggtcgaatgcaggagcttgccctgtgtagtggattcgccgccaggcagaatcacgcggtcgatggattcatcgaaatcctcggccgcgcgcagcagtttccacggcgcaccgagcttgtccagcaccgccgcatgttcggcgaatgcgccttgtacggccaggatgccggtcacgccgtgcttgacgttttcgacgtccgcggactcttctttggaaatatattcaacagctacaaccatgttgtcctctccggcttcgactcccgtcactcgccgcgagcggccatgatggtctgaatctcgtcctcgttgatgccgaccatggcttcgccgaggttttcggacagcttggcgagcagatcggcgtcctgccagttggcggtggccttgacgatggcggcggcgcgcttggccgggtcgccggacttgaagatgccggagcccacgaacacgccttcggcaccgagctccatcatcagggcggcgtcggccggggtggccacgccaccggcggcgaagttcacgacgggcagacggccgttgtcgtgcacgtacttggccaggtcgtagggcacggccagctgcttggcggcctcgtagacctcgtcgtcgcgcaaggccacgagctcgcggatctgcttgttcatggtgcgcatgtggcgcacggcctgaatcacgtcgccggtgccgggctcgcccttggtacgaatcatggcagcaccctcggcgatgcggcgcagcgcctcgcccaggttcttcgcgccgcacacgaacggcacgtcgaactggttcttgtcgatgtggtacacgtcgtcggccggggaaagcacttcggattcgtcgatgtagtcgatgtcgatggcctgcagaatgcgggcctcggcgatgtggccgatgcgcaccttggccatgaccggaatcgagacagcttcctgaatgcccttgatcatggccggatcgctcatacgggagacgccgccggcggcacgaatgtcagcggggatgcgctccagcgccatcaccgcgcacgcgccggcatcctgcgcgattttcgcctgttcgggcgtggtgacgtccatgatcacgccacccttgagcatctgggccagattacggttgagttccgcacgattctgcgtcatgagtttcccttcgttcgacgctgcttggtatcgcgcttcattattgaacggattggattggccccacccaaaccagtccaatttggatggggccaatctgcaacttctgcacccatccaatccggcaaccggttgtatggccttatgcatccggcacgtattcgaagatgcgcgcaatcagtgggaggtattagccgacggtgttgccgtagatttgggcttggaggtctttacgggcggtttccatgcgggtgatctggccgaggagggttatcttctcttcgccgtcgggcagctgggccatgcggcgtttggccaagccgatctggcgcatgaagcccatgtccagtagccgggtgagcagttcggtggcatagcgctgctcttccggcgtggcagggcgtagctgtactgcggcggcaccgccattcacgccaacacctcctcccgacacgttggcctgcaccggctgcgcaccgctaccgatgtcgtcgccaggcagtggcaacggcatgacggccagctcgttgatcacctgattcagcatcggcccgccggccttggtgaggttgtgcatccacagcccctgcggggtatcgtcggatggcagtccgccggcggccgcgatcgcctggaacagggtgcggaacaccgaagtcatgaaatggtcgatggtcagctgcccgaacatggtgcggtcgatggcgcgcggcacctgaatcagcacggccatgaactgctgttcggcgatgaatacggcgtcgtcgatcttgaaatatgcctgttcggcggcgtcacggcgctccaacgccttgcgcgtggccggattggcgtatgggttggtgccgggttccacacgcggctcgtcacgctcgaatcgacgtttgggcgtgtaggcgtcctcatcgcgtacatgcatctgccggcgcgcgttcatcacctcgcggcgcatcacctcaagatccacgccgatacggcccgcggacttgcgcgcgtaagcgtcccatagggagcggtcgcgaatctgcgccaccagcggggccacggctttcatcgcacccacttggccgggcgtgtaggtcaggtcgaaccggccgatggcggcgtcgatcacgaagtcatacaacggtttggcgcgggcgatcagcgagcgcaccgcctcgttgccccgttcgatgcgcaggtcgcacgggtcgagattgtcgtcggccacggccacgaaggtttgggagaggaaggccgaatcaaggccgaaggcatgcagcgcggctttctggccggcggcgtcaccatcgaacgtgaacacgatgcgcgagctcaacggctggtccttgaccttcaacggcccgaccagctggaccgcgcccagcgaatcgtcggcgatcaggcggcgcacaatcttggcgtgctcggcgccgaacgccgtaccgcacgtggcgatggcggtgtcaatgccggccaagtgcatggccatcacgtccgtatagccttcgacgatcaccacctgtcgcttcttgacgatggcggatttcgccaaatcgatgccgtaaagcacctgggttttgcggtagagctgcgtgtccggcgtgttgatgtatttggcggcgatctgatcgtcttcgtatagtttgcgcgcgccgaagccgagcgtgcggccggtcgaatcgcggataggccacgtcacgcggccgcggaaatagtcatagatgccgcgctggccttggcgggccaagcccgcgtcgaggatttccttctgcgtaaaccccttggaggccaagtggcgcacaagattatcccaaccttggggcgcgtagccgcaaccgaaacgttcgcagtcggcttgggagaagttgcggcctccgagcagcttgcgggcgggcagtgcttccttggtcaggatctgggagacgaagaagcgttgggcttcctcgcaggcttccagcagtcgggtgcgcttggagccggtgttctcgcggttcgggccgttgccgctgttctcgtagtgcagctcgatatggtacttgtcggcgagcagttccacggcttcgcggaagtcgatgttttcggattgttcgacgtatttgaatacgtcgccacccaagccgcagccgaagcagtgccacacgccgagtgaggggcgcacgttgaagctgccggttttctcgtcgtggaacgggcacaggcccacgaaggtgccggtgccggagggcttaagcgttacggtcgcagatacaatgtcatacaggtccgcggcggcgcgcaccttctcgacatcctctttcttaatcattccgaccataagtctctagagtaccgcctcacctgagacacggtaaatttttaccgtcggttatcatttcttccgcgaaactcccttcagtcgcctacagcgacagctcccctcacccgaggggagctggctcgcgcagcgagactgagggaagcacccgtccaacacgccctcagcacaagatggagtgcagggccagagcggagttgtcggtcaggcttgcgacctgatcgatggcgacgcgcaggcgctcgttgtcattggtggattcattccaatcggccaggaactggctttccaaagcgtcggatgggagcggcgaatcggccataagcacatcgaccaaatccgatacgatcttgagctcctcctgatggaatggctcgcgctcgcgaggcgccatgacgaagtacacggcgatgcccttcaacgccacgatctcgtaattcgtgtcctcgggaatcacgatgttcgcggaataccgggtcaacggcccgggcccatacgtgtcgcgcgtggcggtttccaccgaccagcagaagcgaccgatcaaatcggacgtgatgttcttgagctgtgccaacgattcgcgcgaaccattgaaatgtgcagggaacaaatgctctcggcgcaatcgcatgaacgcggccagcagcttgtcggcatcccacttcgccccataccatgcgcgcgtctgctcgatgatgtggtccagcatcttcggatcggcgagcacaatcggatcgaacgcgccggtggcgatggaatcctcgacatcatgcacggagtaggcgacatcatccgaaaggtccatgatctggcattccatgggcttggtggcctggggagcgccgattttgagccagcggaacaccggttcgtcatccgggtagacgcagaacttcttcgaccgctcccccttggggtgtcggtcggcttcggccaaggtccacgggtatttgacggccgcatccaaggccgcacgggtcaggttcacaccggccgaacgcccgtccgggtgaaagatcttgggttcgagccgggtcaggatacgcatggtctgtgcgttgccctcgaagccgccgatattgctggcgatgtcggcgagcgcacgctccccgttgtgcccgaacggcgggtgaccaaggtcgtgggccagacaggcgcagtcgaccacgtccggatcacagccgagcaatgcgccgatttggcgaccgatctgggcgacttccagcgtatgcgtcagtcgggtgcgggcgaaatcgtcggtaccggcaatcagaatctggcttttcgcgcccaaacgccgcaaagcggacgaatgaatcagtcgcgcgcgatcgcgttcgaaagccgtgcgcgacttggatttgggcggctcgggtgcccatcgctcctcgtcgaaggcgttgtagccctcatcgctcagcacctgttccccatccaacgttgtttccatatgccaagcataggcacacatatcggccgcagtaatcccgacttcccgaatatgtgccactgacgtcaactcaacggcacatattcgggagattggggccgatttcccgaatatgtgacgctcagcacatgtcagtggtacatattcgggaagaagggattacggggtgccaccgtatggcggtaatgcaccttatagcagcgtggcggggtcgagcttggcgaggtcggcggcgggcagtacttcggcggcatgctcgtaaaggcgcgggatgcggttgcgcaggcaggtgaagatctcgtagctgatggtgtcggcggcgcgggcccaatcgtcggcggtaggctcaacgtaatcctcgccgcggcccgggccgaacagttcgaccgtgtcgccctcgtgaacgccgagttcggcggcggatccgtgcaggtccacgatgaactggtccatgcacacgcggccgcacacgcggtagagcttcggaccttcagtggtcatgatgcgcaccgggccgcccggcttctccacgtgcttggcaccttccatatcgaaaccggaagcggagcggtggatgccatcggcgtagcccagcggcacaatagcggtcgaggtgttgttcggggtcaggtaggtgcggccataagagatgccatggccggcctccacatccttgaccgtgccgagctgcgcctgcaggcgcatggccggggtcagatgccagtcgcgcggggtgcccatcgcgggatcgggctcgtagccgtacaggccgatgccggggcgggtaagttcgaagtgaatctccgggcggtccaaagtggccgccgtgttggccaggtgacggatctccggcggaatgccggcctgttccatgcggcgcgtgaagtccttgaacgttgcgatctgctggtcggtggaggcgacgaattcgggcacatcgggcgaatcggccacggcgagatggctccactgacccacaatatgcaacacgccctctttggcgagcggcacgagtttggcgagcgcggcgtcgaatccagccggcgtgaaaccgttgcgaccgaagccggaatcgaccttgacgtgtacgcgggcgggcttgccgagcttgcgtgcggcggcggccacggcatcgatgccgggcagggagccgaccgatacgtcgatatcggcagcgatcagctcatcgaatggcacttcggtgccgttgtagacccaagtcagaatgcggcaacggtcggggccgatgccgagtttgcgcagcagcagtgcttcatgcgattgcgcggtgccgagccatgtcgcgccgccggcgagcgcggccagtgcggcgggcagcagtccgtggccgtatgcgtcggccttgaccacgcccatcaccgccgtgccggagttcgggccgccgaccacggagaccaggtgggccatgttgtcgcgcatggttttgaggttcacgatggcctgtgcggggtattggcggcgggtggccgcatagttggccttgccctgctcggacgagaatgcgatttcgggtgctgcgttcatgctcataggcacctattgttgcgcaggaatgtgacgtgtggtcacaatcgtttgttttcgcccggcagtcgtacactaatgaccgatatgcggtttctcggaagccgcctttgattcccggcgttgaggcgtgccgggatcccggaaatccgtccggtctagccccatatcttaagtttcatgagagaagaacatggatctgtttcgtaagaaaagcgtggatcagcttgtcgccgaatccactcccctgaagcgcacgatgcgcaccttcgatctgacgatgctcggtatcggcgcgatcatcggcaccggtatcttcgtgctcaccggcaagggcgcgctcaccgccggcccggccctgtccgtatcgttcctgctggccgccgtctgctgcggtttcgccggcctgtgctacgccgagttcgccgccatggcaccggtgtccggctcggcctactcctatgcctatctggcgttcggcgagctcatcgccttcgtgatcggctgggatctgattctggagtatgctctgcaggcggccaccgtgtccgccggctggtcgggatacttcaacaagttgttggaaggcttcggactgcatctgccggtcgagctgaccgccgcctacggcaccaacccggacgtcaccacctacttcaacctgcccggtttcgtcatcgtgctgatcatcacgtgggtgctctcgatcggcatcaaccagaccaagcgcaccaatgacgtgatggtgctcatcaagctcgccatcatcgtgctgttcatcgtgtgcgccgtgtggtatgtcaagccgtccaactggcagccgttctccccgtacggcatctacactttccagcccggctccacccagccgtacggcattgtgccggccgcatccatcgtgttcttcagcttcatcggattcgacgccgtgtcctcttccgccgaggagaccatcaacccgaacaagacactgccgcgcggcatcctgctgtccctggccgtttccaccgtgctctacatcgtcatgaccatgatcatgaccggcgtggtgccctacaaggagttcgccaagtacatcgacgccccagtggccggcgtgattctggagaccggcatgaactggctcgcggtgatcgtgaacctaggcgccctcatcggcatgaccacggtgatgctcgtacagctgtacggccagtcccgtatctgctacgccatgagccgtgacggcctgttcccgaagttcttcggccacgtgcacgagaagtaccgcaccccgttcaagggcacctggttcttcggtctgctgaccgcgttcgccggcggcttcatcaacatcaacgtgctgttcgagctggtgaacatcggtacgctgtccgcgttcatcatcgtgtcggccggtattctatggatgcgcaagacccagccgaatgcgccccgcggcttccgcgcgccgggcgtgccggtcaccccgattctggccatcgtattctgcttcgtgctcatcgccggtctcaactgggagacctgggtgcgtttcgccatctggttcggtctgggcctgatcgtgtacttcggctacagccgcaagcgctccaagctcggccttgagcagaaggccggggctgacaccaaggtcgctgcgactgaggactgaggtctatcggctgaccgatag

SEQ ID NO: 968 - DNA, 3685 bp, Unknown
  R117_24m  MAG No. k141_18423
cagccacactcaccactcgtggcgctgataggcgattctggtggtgtcgaccggccggtcgagcagctggatcaggccgcaacgggcgaagccggagctttcgagcacgtgctgcatggccttgttattggggtgggtgtcggcgcgcacgttgccgtagtgcttcagggcccacctgatgcagtcgcgggccgcgtggcgcaccagaccggatgcggcgatgcggtggatggtcacataggtgtcgttgtccagccaggcgccgtcgattttggcgtaggtcggatccttgcccgggcacagggcgaactgggccagaatgcgttcgtggccattgcaggtgtcgaccagcagcatcgtacgctggttggcgatgtcgtcttcaatcaccgattcacgcggaaattcgttgccccactgggtggggttgccgttggcggccatcaacgcgcgtgcgcgtgcgtagattttctgcatctgcggcagatcgcgcatggtggcgtggcggaaacggcggcctgtcgccttgtttgcagcgttcgactgagtcacttctcacctctccgacatgccgggttgccggcacggtgaccggcgactaactgacggccaacctaccatgccgtaggcacaagaaatcccgtccgcgttgcatgacggacactaataaacaatggcttccgtccgcaggagccggacagtccagccgagttgaggacagccaccctcagtcggcttcgcccccggctcccgccagcgggagccgaatcagaattgaatcgaatcagacgaatcagacgaccttgcgctcgaacgggtcggagctgatgccttcctcaaggatctgcttggcccattccttggcggcgaacaggctgtggtcgcgatagttgccgcagctcttctcggtggtggcgggcacgtcatcccatgtggccttgtatgcgatgaactccaacgattccttcaacgccttggccacatcctcggtggagtgggtgccccaggtcagcaggtggaagccggtgcggcagccgaacggcgagcagtcgatgtagccgggaatgcgttcacgcagcagcacggcgatggtgtgttcgatggtgtgcaggccgccggtggggatggcctgctcgttcggctgggtcaggcgcagatcgtaattggagatcacgtcgccgtgagggcccgtttcggtgtcgatgtaacgcacgtacggcgccttgaccttggtgtgatcaagctggaatgattcgacgacgggcttttcggccttgtcttctgccatgctgttgcctttctacttgctgagtgttcggtcatgaagtatcgaacagtcatcgtagtcgcgccagcccaagaacgcccgcaaatactccgcgggtcgctataggagattgttatgacgcactcccggcattgaacgaggcgatggtttgcatgaagcgctggccgtagaggtcgagcttgtgttgaccgacgccgttgaccgccagaaattgcgcgttggtaaccggcttgatgcgggccatgtcgcgcaaggtcttgtcggagaacacgatgtacggcggcttgccgatttcctgggcgatggtgcgtcgcagttcgcgtagcttctggaacagcgattcctcgtcatcgtccgggatatacgagcccagcgcatcgccgggaacattggcggaatcggcagtatcagccactcccccgctccgaccggaaccggccgccgccgacttgcgttccacccgtttgatctcatagtggaagtcgggagcggcggtttcggccgcccgcgcaccgaacatgacgattggcatacgcccttcggcgattgacaggtacccgtccgtggccatctggctcaacacgtcgcgcacgcgagcctcgttcacgtccttgagcatgccgaaggtgggcatccgctccgggttcagccatgccagatcctgtgcccgcgaaccgcgcaggatcttgacgatcttgccggaaccgacgcgctgccccacgtcatgcacgcaacggctgatcgcctgcgccacgcgggtcacgtcgatggtctcgaacgtgctttcgcagttcgagcaggcaccgcatctgccggactgcgaagagtccgccgcaatgtcttcacccgccgcggaaccagcattcggcgacaattcctgaccgaaataccgggtcatataccggtgcaggcagtcggtggtgcggcagtagccgaccataccgtccagcagccggcgcttggactggcgaacgatctcctgctcttcgggagtcaatcgctcgttctcataatcgttatccagcaaccgacgccgggtgacgatgtctgactcattccacagcagcgtgcatcggctgggctcgccgtcacggcccgcgcggccggcctcctgatagtaggcttcaatggattcgggtagattgtggtggatgacgtaacgcacgttggacttatcgatgcccatgccgaaggcgttggtggctacgaccaccggcaccttgtcggtgatgaagtcgcgctgggccacctcacgcgcgtccggcgacatgccgccatggtaggcgacggccggatgccccatctggttcagcgtgtcggcgagcgcttcggtggtcttgcgggtggcgcagtagacgatgccggattcgtccggatggtcggccacataccgcgccacccatgcggccttgtatttggtctccagtttgaccacatcaaaatacaggttcggccggtcgaatccggtgacggtgacggccggattccgcaatcccagcagtcccacgatgtcccgacgcacccgttcggtggcggtggcggtgaacgcacccaccggtggacgctgcggcagcccggcgatgaaatcgccgatacctaagtacgacgagcggaagtcctgaccccactgggagacgcagtgggcttcgtccacggcgatcagcgagatcggcgtacgggcggcaaagtcgcggaatcgcccggtttccaagcgttccggggccacgtacagcagtttgatctgcccggcggcggcttgggcgaacaccatcgcctgctcgtcgggagtttgagtggtgttgatgaacgcggccggcagaccgaggtcgttcagcgcatcgacctggtcgcgcatcagggaaatcaagggagatatgaccaaagtcgcacccgggctgagcgcggcgggaatctggtagcacacggacttgcctgcgccggtgggcatcacgcccaagacatcgcgtccggcaagcaaagcctcgacaattccttgctgtccgggcctaaacgagtcatagccgaagtatcgtgtgagcgcctccagcgccgcctgatgtgctgtcataaacgaccagtgtaggccgaccgcggatggatttcatcgtataacggaatacctcgtaccgatgtacgtagcccttccgtattattatgcgtcgaggaacgctattcccggcatatcacacgatatgccgctttgagagaactaagacggggcattttatggccaacaatacattttccttttcctctcctgacgatcaggagacggcggtgctgcagcctgtggccgccgatgggctgttcgcagccgcggccacaggtaccgccacgccacagcaaagcgacaatggcaccaataaccatgccgacaatacagcctatgtgggtgaa

SEQ ID NO: 969 - DNA, 3624 bp, Unknown
  R117_24m  MAG No. k141_18587
agttcatgccgttcgcggccttgaccggatacaaccaggtcattgagcaaacagcaaaaaacgccgaaaccgccatcgcccaggccgaggcccaaggcgataccgatttcggcgcttaacaatcgctcccgttggaggaagccgcagatccgtcagcccacgtgacgctcaaagtggtggaagccagtgatcttgtcgatttcggccatcgcgtcagccggaatcacaaagcccgcggccttcatgttgttctccagctggctgggcttggaggcgccggcgatcacacagctgatctccgggtgctgcaggatccacgccatggaaagcaccggcaggttcgtgccgagctcgttggccacaacgcgcagcgtctcggtcagatcggtggtctcgtcgaatcggtggcagaagtacatgtccagatagtcggtctgcatgttcttcagtgtctgatcaatgctctcgaagatatgcttgcgggacaggccgcggtcgttcacgccttcgccggtggtgacttcgcgggcgcaacgaatgaaatcatcaatgacgctccagcggtatggtgtggccgaaacgtcgaatcggatggcgtattcggtctccggcccgcaatccagcacatgcaaggtgcgcagccgttcgccgtcaagcagcgctggcaggaaccgctccgggcataagcaggcacccatgccgtaatggcatagttccagcagcgtcaatatgttgtccgaacgggcggcgactttcggctcgaatccggcacgacggaacagaatctcgccgatgcggccatcgatgtcctgcggattgcccagcaaaaacgggcagtgcgccaacgaagatagatcgcctggagcaatggcgcgttcatctggaatcgtgttggggatggtggaatcgttggcaatattagtttggctgttcgcggttccggtggtgactaaatccagtcataatgattgcgcaataaccagtaccatacgttcgtcgtagaatctggggttatcttgagtcatggctcgtgcgaatagcattgatgtttgcaactgcgggtcatgagatgaaatctgagatgaggtcgtagccggaagaggagaggatcacatgctggaagcgggcgcgatgttgctgttctgtgcggtgctgtttgccagcgtcgccctcggctggtcgattattcccgcgctgttcgttggtgtgctgctgttcatggggtatgggctggttcgccggtgctcgctgcgcgcgatggcgagccgtgcggccggcagcgtacggtccgcggggaccgtggtggtgaccttcgtgctcatcggcgtactgacctcgctgtggcgggccagcgggaccatcgccttcatcgtggcccattcgactgcggtaattcacgccgccacggtgattccgctgtcgtttctactgtgctcggcgatgtcggtgctggtcgggtcgtcgttcgccagtgcggcgactatgggtaccatctgcatgtcgctgggattgtcgatgcaggcgaacccggtgatgctcggtggcgcgattcttgcgggcgtctatgtgggcgatcgttgttcgccggtttccaccagtgccttgctggtcaaacagcttacgcatacgaacctgttcagtactattgcctgcatgctgcgcactggtgcggtgccgtttgtgctgagttgtgtggtatacgttgcggctgcggtggcggagtggctgtgtgcaagcggtggttccggattcggtgcggctagagcggctgtttcaaccaacacaagcagcataaccgatatcggcggattgttctcatcggcctttgatttgcattggcttaccctagttccagcattactggtcatcgtgttggcgttgctgcgtgtggacgttcgcctgcttatgctcgccagcattgccgcctcggtcgcgatatgcgtgggcgtgcagcacatggaatgggcggaactgttgcggctgcttattttcggttaccatgcgcaaaatccgcaggtggccgcactcctggacggcggcggcatcctctccatgctcactgtgatggccactgtctgcatctcctccgcctacgctggcatttttgccgagacgcggatgcttgctcggctgcagcaggtcatcgagatgctcggtcatcgcatcggcgcatgtggcgccaccatgattaccgcgacttgcgcggcggcgctcgcctgcaaccaaaccctcaccatcatgctcactcaccagttgtgcggcgggctatacggcgacgacgaatccgaacgcgccgcgcaagctatcgatttggaagacagtgccgtggtgatcgctccgttgattccttggtcgatcgccggtgcagtgccgctcgccaccatcaacgcccccacgttgagcttggccgccgcaaccttcctctacctgctgccgctgtgccgaatggcggtttcagctgtgcgtcaccgccgtgcaataactactaatatatgagtgattttgggcgtatacaggcgaaattactcatatattagtagtttggcgaacaactatattgtattctcgaaaagcttcgcgataggcggtgataaggtccggcaaacgcattgaggcgttggccgggctggtggagggcagttgggtcataccgatggcgatgccggcttcggtcaggcgcggctcgataagtttgcggtaaagttgcgctgatttcgcgccggttgcgaagatgtgggcgattggagcgccgcgcaagattggtgtcaagtcgttgggcacggcattgcggatgctggcatcgctggctccggtgatatcgcaagaagcaatgacatcccataacgcaatgtggtggcgcagagcaaacgcacgacgggactcaggtaaatcgccgacagcgtcagtaggatcagcggagttggcaaacagcgcctgcatcaccggccaaaaccggttctgtggatgcatatagtaaaacgccgccgctcgggatttcggactcggcatcgatcccaaaatcaaagcccgggactcaccatcccacaccggcccaaacccatgctccacatgttcgctcataagccccatattatgccgtttggtcttgaaaatagttcgggggcggacagttaatgtcatattccctcaaagagaagaaggatttacaatgaaaaaaggtggaagaaattgccagtgaaggcacaagccattcttattggtgttttagtcgtcgtttgcgcaattgctgcggtatttggatataggtcagttgacaatatgctgcatcctcaggcgactctgaccaattcggttgtggccaggcagttggaaaagattcaggatcttactacggccaaggaaaccgattttggttttgaagagtataaggaaggcaacattgctccacgccagatcgtcctcgaagccatccggcaacggaaccagcggattcttccacatccggaaatccgcaaccagccgcttcaactcctcgacataccgtcgctcatccaaccgaatggacatccccactcaccctcctttgcactaccatcccagcacacaaccagccgtcacgccatgggcagcgccgtacacacgccaatgacgaacaacgcctcg

SEQ ID NO: 970 - DNA, 7457 bp, Unknown
  R117_24m  MAG No. k141_19391
ccagccggaacatccactcgcagcccttgtgccatgaacgatttgacggttttgtcttcgagcgaatgataggactccaccaccagtcgtcccccgacatgcagtcggttcgcggcctgcggcaatgtggaggcgagcttgtccaattcgccgttgacttcaatgcgcaacgcctggaagacgcgtttggcgggattgcccgccgggcggtgggcttgcggcaccacttcatcgaccagacggttgagctgtgcggtggtggtaaacggctccttgtctcgacgtgccacgatggcgcgggcgatctgacgcgagaaacgctcttcaccgtattccttgaatatacggaccagttccgccgcatcataggtggcaagaatccgttcggccgtcaacggctggctgacgtccatgcgcatatccagcggcgcatcatgcgaataggagaagccacgatcggtttcgtcgatctgcaggctggataatcccagatccatgaatacggcgtccacacgttctatgcctcggtccgtcaacacctgatcgagctgatcgaaggcggcatgcaccgggatgaatcgatcggcgagcccctcccgttccatgcgttcggtggccagccccagcgcttcactgtcacggtcaatgccgatgagccgagcctgcggcgcggctttgaggaaggcgatggaatggccggcaaggcccagggtgcaatccgctgcgatggcgttctcatgttccagggcaggcgccatcaggttcacgcaatcgtccagcaataccggcagatgaatattcgccacatcaaccatcagaattccacctccggcaacacatcgtcagcgatatcggaatatccctcttccttctcggcgaggtaggactcccacgtgtccttattccacagttcggcacgggtgccaacaccgatcaccacgacgtcggaacccagattggcgtaatcgcgcagcatctgcggcaccagcacgcggccctgcttgtccggctgctgatcgacggcaccggaaaggaacacacgcaggtattcgcgggcggctttgtttcccaccgacacacgctgaatctgcgaggcgatacggcgaaattcatcgaacggcagcaggtacacgcaccgttcctggcctcgggccatgaccaggccctgccccagctgggagcggaatttggccgggagcgccatacggcctttggcgtcgatcttcggcgtatatgtgccgagaagcagcggcggcagaccagccatgagatcagccatagtggtggagccttgtgcgttggcatcagcgtcgcgaatcgtctgatcggcaaccatggctccacctccttcatcgttacgtgggatacacttcggccaactggttcaccactctaccccacgattccccatttctccccactcatgcacgatttgctcacccttttagggcaattaccgatggattgcgcgtgtcggccacgactgtcgcacgaatgagcgctccgcacatccaatccacgttgcgcactccaccgaccgagcagcatggcgaattcacgctgaattcacctattccgggttgtccgcatcactgacgtagggggtgtgcggtaaatttgaatgccttaagttttttctgccccacggaaatggaacgaagagaacagcatgtcgagttacgcctcccagctgcatgaggagcagcaggccgtcgatcgcgcctatggacgattggatgatctgcgagccgaaatgtggcaacgcctggacaccgtacgcgccgccggctcccacggatcccccacgcaacgcagcgaacgagactcctttgccacaatgtacgaaaaccgcctcacgcaattgcgcagcgttgaggatcggctggtgtttggtcgtctcgacgccaagaacggcgaccgtcattacatcggccgcatcggcctgtcgagcccggaccatgagccgattctgaccgactggcgtgccgaagccgcacgtcctttctatgaggcgaccccctccaatcacggcgacatcgtgatgcgcaggcatatcaccttgagtttccgcgaagtcgtgggcgttgaggatgaggtgctcgacgtgcattccgaccaagtcggccaggcgtcttccgccggcacgttgaccggcgagggtgcgctgctggcttcgctgagctcacgccgcaccggcaagatgaccgatatcgtggccaccattcaggccgagcaggaccgcatcatccgctccgacatgaatcgtgccgtggtggtgcagggcggtcccggcaccggcaagacggccgtggcgctccatcgcgccgcctacctgctgtacacgcaccggcgcacgctggaacgttccggcgtgctggttgttggccccagctcggcgttcctgcactacatcgatcaggtgctgccctccttgggcgagaccggcgtggtctcacgcaccatcagcgatctgattcccggcatcaccgccacggcggtcgactccccttatgcagccaagctcaagggcgatcgacgcatgacctccgtagtggccaatgccatcgccgcgcgcgtgcgtgttcccgctgttctgccgacagtaaccattagcggcattcaggtaccaatgctggccactgatatcgagcaggcgcaggcggacgcgaagcgcacccggcaacctcataacaaggcccgcgagacctttatccgttcgatgctgaccagcatgcagaaccgttatgccgaacagcttgattacacgccggatcaggcggagctgaaccgcgcgatgtcgttgctgcgtatgaacgagcaggtgcgcaagaccctgaacctgtgctggctgccgatgaccgccccatggctcatcgatcagctgttcgcccatcccgaacgtctgaagtctctggctggttggctgaccgacaacgacatcgcggcacttgcccgccccaagggctccccgctgacccgctccgatattccgctgctcgacgaagcgatggatatgctgggccccgatcccaagacggtggcccgccagtccgccgccgacgcacgtcgtgccgccgaagagcagtatgtcaaagacacgctggccgcgaccggtctgggtggaggcatcgtctccagtcagatgctgctcgaccagatgaacggggacgacgccgagctgaccgcgcagcgggccgcggccgaccgtgaatggacctacgggcacatcgtggtcgacgaagcgcaggaactgaccgccatggactggcgtatgttgatccgccgttgcccctcccgctcgttcaccatcgtgggcgatgtggcgcagacctcggcgctgggtggcacccgacgctggagcaaatcgatgaaccgcctgttcggcgaaagccactgggatctgaacgagttgaccatcaactaccgtaatccgcaggaagtttccgaactcgcctcacgatttgccgagaaggaaggcctctacatctccacggtcaatgcggtgcgcaccatccccgattcggtgtcccgcaatgtggtgcccgacatgtcgtccttgctggaaacgacggccgagcaggcggcgcagcttgccgaacaattcgtttcggcagacggcaccggccgcatcgccgtcatctgtccggatgatctcatcgccccggtgcgcgacgccgtgcgccgcaaactggccgccgttcttgacccggccgaatacgcaaggctcatcgagcagcccgaatgggatgagcaaatcagcgtctgcggcaccgaaacggtcaagggtctggagttcgatgccgtcgtggtggtcgagcccggtctcatcgaggatgacgcgccgagccgcctggtcgccgcctcggacctgtacgtggcaatgaccaggccgacccagaaactggttatagttcggacaagaacggacgaaaagtccctgaacatctaaggtatgaagcatgcccaaagcactgttattggaaaacattcaccccgacgcggccaaatcgctgcgtgatcacggtttcgaagtcgagaccatgaagggagccctgagcgaggacgaactcatcgacgcgctggatggcgtggacttggtgggcgtacgctccaagaccaacgtcacagcccgcgtgctggatgcgcgtcctacgctaagcgccatcggctgcttctgcatcggcaccaatcaggtcgatctggcacatgccggcaagcgtggcatcgccgtgttcaacgccccctactccaacacccgttccgtggtggaattggtgatttgcgacatcatctgcttgatgcgccgcattcccgcacacacgcatcacatcaagcatggcctgtgggacaagtccgcttccggctcgcatgaagtgcgcggcaagacccttggcatcatcggctacggcaacatcggctcccagctgtcggtactggccgaggccctcggcatgcgcgtggtgttctacgacattgaggagaaactggcactgggcaacgcccaccgttgcgataccctcaacgaactgctggaacagtccgatgccgtgaccctgcacgtggatggccgcaagtcgaacaccggcttcttcggcgaagaccaattcgcccacatgaagcaggacgcgattttcattaacctttcgcgcggtttcgtcgccgatctgggagctctgaagcagcacctcgattccggccatctgtctggcgcggcggtcgacgtgttccccgttgagccgaagaagagcggagatccgttcgagacctcactggccaacgaagacaatatgattctgactcctcatattggcggctccaccttggaggctcaggaatccatcggccatttcgtctctcagcgtcttgaggattactggttcaagggttctacctcattgtccgtgaacctaccgcagatcaacctaggtgaacgcaagggcgtgtgccgtatcgcccatctgcacgacaatcttcctggtgtgctggctcatgtcaatcgcgtgctcggcgaagagaacatcaacgtttccttccagtcgttggccaccgaaggcgaacttggctatgtggtcaccgacgtggctcagaagcccagcgccgccacgcttgaagcactacgcaacatcgagggcaccgttcgcatgcgtgtcatcagctgacacagctcatcctcgattgatatgaaagagacccgtcgctgacgggtctctttcataagtgcagggcttcatgattggttcgcaccatggtttgcgaatcactcgcatatcacggtgcatggcattcgcatattattcacgcaaaccatcaatggcgctttggaaatcctccagacctgcaaagttctggtacacactcgcgaatcgaaggtacgccaccacatccaagtcacgcaacggtttcaggatggctttgcccacttcatctgaggtgacttcggcaaggcctcgggagcgaagatcctcttcgactttctgtcccagcagcttcagatcctcttctctgaccggccgcccctggcaggctttacgtacgccggaaatcactttgtctctgctgaatggctccacgccacccgaacgtttagtgaccagcagcatactggtttccaccgtggtaaaacgcttgttgcatttcgggcatacgcgacgccgacggatggaatgaccgtcatcgctaatgcgcgtatcaataactttggtgtcggggttctggcaaaaagggcaatgcatgctctccagaataacgtgtacgggcggaaaaaccatgccgctcgggtttcatttactcaaccggaacaataatgcgctgcccggcctgcaatgttccggactcgagattgttcagcgtaatcagctcatccactgtttccgatacatcatggccagcaggtgtaatagccgaagcatatgaccagagcgtatcccccggccgcacgatatagctggtcacctgcgtggcacccgtatctgattgggcccgctgagcggtaagcgcgccgaaaccacaccaggccagcgccaaggcgatcatcactgcgataatccgcccacgcacattccggcgggacgttccagcatgctgcatagctacacgtgcgctacgggccggggccatcaccattgaaccagtcatcacgaccacctctctcgaacagatgttctatcgaacaactgttcttataatggcacaaatgttcgacacggtcaagtcgaaactcgaacagatgtttgatttcacacgaacaacacgttatgctggtgacataacgaaaggagccctgacgtgagcaccattcccctctcccccaagcagaagccggacgagtccaccctgaccgaccgccagcgcaaagtgttggacgccattcgcacgcatatcgacgaacaaggctttgctccctctttccgggagatcggaaatgccgccggtctcaaaagtccgtcttcggtcaagcatcagctacaagttttggaagacaagggcttcattcgcatgaacgcgaacaagggtcgcgccatcgaggtgatggcaggatccgccccgaatgccgaaaagccatcacaagccagcgaagaggcaaccagcgccagcaatgtggcggagatataccaattccccgccgaagccattgccgaatcacatgacgtaccgctcgttggccgtattgccgccggcgtgccgattaccgccgaacagcatgtggacgacgtcatgcgtctgcctgaacggctgaccggctccggcaccctgttcatgctggaagtccacggtgattccatggtggatgccgctatctgcgatggcgactatgtggtggtgcgcgaacagaattccgccgtcaacggagatatcgtcgccgctctgttggatgacgaggccacggtgaagaccttccgcaaggaaaacggccatgtctggctgatgccgcacaaccccgcatactcgcccatcgacggcacacatgccacgattatgggcaaggtggtcaccgtactgcgcaaattatagcctgttcgccaccagctgatcagcgtgcgctgaatcgcgctggtcgtgctatagtcgcacactgcttacgaaaccccggcctcgcgccggggtttcgtcgtattcagaccatatcgcaaatggtattgagaagcggtttcaactcgatagagcgaaggagtacacatggcccatacccatacacccgcaccatccacatccgtaaaccctgccgcgcaccagcgcaggctgattgccacgttgaccgtcactggttcggtcttcctcatcgaagtggtgtcggccgtcttaaccggctcactggccctgctggtggatgccggtcatatgctcaccgacatgtccgtgctggtggcatccacaatcaccgccatactgatgcgccgcaagcccaacaacactcgtacttggggctgggccaggcttgaggtgctcaccgctgccgc

SEQ ID NO: 971 - DNA, 5090 bp, Unknown
  R117_24m  MAG No. k141_19589
aacagcccgatgggctgtttgtaggcgaaggcgagacgagagtcgagccagaagaatgcgagcggcagcttgtccgtaattgcggtcgagctgtccgtgtagcggactgaggggagttaccggcacacctcagccatcctctctgcaaactcatccaaaaaacgtcccgaatccgcaccaagtgccacatgcacatgcggcatggaatgattcaccagcccaaccgggtctccggtggtccggcctcgtactccattgaaatcaccggtattggtctccgcgcgcaacgcaagatcaaaacaatcgaccagtgaagaatcaagtgcaaccgccgccgccaacggatcatgcaacggcatgccgccagagaacagtgcggggtcggcttccaaatttgccttgatggaaaagtccgcgagatcagccaagaaccgcccgcgcttggtccccgtcgcacgccactggtcggccgccgatcgcggtagcaaacactggtgagtcacatcaagtcccaccattgtgatgtctgcgccggaatgaaatacacgattcgcggcctcagggtcttggatgatattcgtctcggccaccgcatcccaacaattgccgggttgggtaagcgtaccgcccatcatcaccagcctgagtttcggtgcaatatccggtgcccgagtaatagccgcatccacatccgtcaacggcccggtagccagcacggtaacgtctcggccaaactcacgaacctgctcaatcagatactcaatcccatccgcagcatcaacggagcgcctccttttgccccagctggcgagagctgtcgatgtagccgactggggacggtccacaggccgagagcgacccacacgagaacaagaccccgacgccggatgagcatgagcgtcccctaccaaatacccgccaacagaaacaaccccatcgggcacatcctcagacatgtcatccccagacatatcatcaccaggcacaccagctccatcagccagagccccggcccctgccagccaagtattccccagtccatccttcccatgaaactgggcacaccctgcatcgggaataaacgcatcagcccaagaaggatgctcggagcccaaaaacaccggaatatccgcccggccaaacaaatcaagcaccgcgcaagtattggcataagccgtgttcgcatccacattgccataactggcgatcacaccgctcagctcgcactcatccgccgaccccaacaaatatgccaacgccaacgcatcatcaacaccggtatccatgctggcaataatgcggtcaggacgttgggccatggaatcgcctccttgttagcatgattcgctatgaataaccttatcggccgatacgcaaaaatgcgtcctttcctcatgggaaggacgcatttttgcgtagattcaaactcggaatatcggaaattacttgccgaggaattcgtcggtgccaaggtccttggcctgcggggcctcatgaatcaccttgtcatgactgtcagtgtaggcgtcttcttcagccaggaagtcgaagtattcctgagtgcccttgaagtcgttggtgccgagcacgaaagagccgtccttgatcttggccggatcgccccagtactggccgtcgacgataacctgcatgctcttcttgacgaattcgggcttgaggttggcgtcaggggcttcgtccacgagaatctgcgcggcgtcatccgggttggcgtacgcgtactcgtaacccttctgagtggcctgagtgaacttcttgaccaggtcgggattgttcttgatggtcttgtcattggtgatgatgccgatggcgtcggcgttgccgggcacgccgtagtcaggctcggtgaagcagttgagcttcgggccgtacatgtcggcctgcacgccttcccacgtggcgtagaagccgccgaaatcggccttgccggattccatggtctggaaggtggaggtgccgacggtcaccttgtcgaactcgcccttgccgccgtcggtctggatcatgcggcgcaccacggcgtcggactcgttggagccgaaggtggcgaaggtcttgccatccaaatccttaggggacttgatggcggtgttggacgccagtgcgcaccaaatggcgctcggcttctgctgcacctgcagcacctgcttgatgtgagcgcccttcagcgtgtagatgcccacgttggtcaggttggacagggcgaagtcggccacaccgttgttcacggcctgttcggcaccggcctgggccacggccacgatatccacgtcaagaccggcatccttgaagtagcccttgttcttggccacgtacacgccgatgtggttggtatcgggcgcccaggaaagcatgaaagtgaccttcttgaggtcggaggtgttggagttggaggagtcggcggtgttggtctgaccacatgcggcgaaaccgaaagtcatagcaagggcgcccacgagggcagcggccttggatacaaggcttttcttcataatgatggttccctaattcgttgtctctctatcgttctctgggattgcttcgaacggaagtcggcagaaaacgatatggagggccttgatttccgttcgaccagcgcccccgacattccctatgaaagctcaagaaagccggtttgccacacgctggtaaagctgttccattatagagacagggctggagacctcatgagaagccgccccgttcagtcggttctggccgccggcttgtgtctttgacggtaaaaagaactactggtccgcgtcggggtcttcgtcatcgccggccgggccgagcaggatgcgctcgctggcgttcaccgccagcatcagtacgcatgtcatcaggataatgacgatggtggcggagaagatcagcggcgtgcggaacgaattgtaggcagcctgcagccagatgccgaggcccttgcgcgcgccaagatattcagcggtggatgccgtggcgaagatgtatgcggcagatacgcggataccgccatagatctgacgtgcggcaacgcgcagcttcacgtgccagagcgtccagaccggggtcgcgccgcaggtcaatgcgacgtcggaatagaactggggcaccgcttctagtccgcgcacggtctgcacggcgatggggaagaggccgaataccgccacgattacgattttgccggaaatctcaaagccgaaccaaatcaggaacaacggggcgatggaaatcagcggcatggtttgtgcggcggcaagcagcggatagaacgccgcgttgaacgtgtgcgagcagtacagtgcgatgccgatcataatgccgaagaacacggcgaacaggaagccgaccacgccctcatagccggtgatcgccgcggccgggccgagcgtgttccacgtttcgatggtggcggcgaaaatctcgcttggcgcggagatcatcgtgggggagacatgtcctagatccacccacgtttcccagactgccagcaatacgatgacggcgatgacggtgggcatgcggcgcttgaggcgcttggcgatggacatgggatgtcaccttgctttccgcgccagtccggtttgctggtggcgcttgcggccggggcgtggaacagtaaggtgaggagcctgcgcgcctgccggtcgtgtgatggattgtgttatatgccgtccatcagtataggcgaaggcgaacgacaggggcacacaaaaaacctccctctgtgagggaggtgagagagctactccagtccgatggacttcatgtggtggagcttcagggaatccaccttgagactaccggactcggcggcgagcttgatggcgcgcggtccttcggaggcgtaggagtaggagctcagcacttggtggccaccgttgacgtagacctccacggagccgcgatccacgaacacgcgcaggtccagcttgccggaggccagttcggcgtcggtcagtggggcggcgcggtagccgtgatcgccgttggccatggcctggcgatccaccaccacgcggccgatctggtcgtcataagccacgtaggtgtaggcaccgtccttagtggcatgaatcttcaggcccgcacgctcggcagtggaggcggccaagtcgatggtcatttcgatttccacggcctcggcgtcatcggcgatgacctgctcgccatccatatcgagtgtgatcgaaccatggtcgagggtatcctcgcgcaggccttccatttcggcgaccggcgcggtgaccacgtcgccgtcatcgtcaagggtgatctcgcgcggcagggtgagctggccacaccagccgtcatcctccatgggaatcggctgcacgaacgggctcatccagccatagacgatctgacggccgtccacgttgaaggactgtggggcgtagtagttgtggccgcaatcccacaggcggaactcggtttccggcttgaattcgccgcccggctcccacgtgccgatcatgtagccggcgttgttgacgttgcggttcatgaagccgctgggcttggaccccatggcggagaagccaatgacccacttctcgttgctgtccttgtctttgatggggaagaagtcggggcattcgagcatgaacacatccggatccgggtgctggaagagcacgtgctcgtattcccagcggaccatgtccttggaggagaacagccacatctggccgcgcttgtcctcagaggagacaccgaaggtcatgtaccaggtgtcgccggtcttccagaccttcgggtcgcggtagtggtgatccaccttgtcggtcgggcagtcgatgatcatgccgcgcttggtggcggaggtgagctcgtcattgtccggcagcgcgagcatctgcacctgccagtcgccgccggtgttgtcgtggccgttggcccaacggtggccggtgtagtagaacttgagcttgccatcgtcgccgattactgcggaaccggagaatacgccgtccttctcctcttcaagggtcggggcgaacatgattggctcacgtttccaattgagcatgtcggtggaggagacgtgtccccagtgcatcggaccccactgggtgccgtacggg

SEQ ID NO: 972 - DNA, 4292 bp, Unknown
  R117_24m  MAG No. k141_19659
cgaccgctaatttgagtgtttctgcacttcgaggggcggattttgagttttcgggacatctacttccgtttcaaggggctgatgtccaagtagacaacgcttaaaaacggcggaatgacgttggtatgaagccgtttctatgtgcgattgagcggatgaccagcccctcgaaacgcaagtagatgtctccaagaggcggaatcggccccttgaagccgaagaagacactgcgaacttgtcttcattgaggaactgaacggctaccatggaataagaggtggtagttatggtgctatccgagatatttcgtggaaacaatgaggttcgcgaggccgcccgggccggtgtgcaaatcgatacggttagtgtggctagtgcgtcagatgcagcaagcgcggcagacggcagcggcaaaatcactggcgcaatacgtccgccagcggtggctggttcgttctaccccgctgaccgcacaacgctcaagcaactcattaaccatcaattggattacagtcgagaggttctgcaacagttggagcccacgcttccagcgggagtgccaaaggctgtaatcgtgccgcatgccggttatgtgtattccggcacggcggccgcgcttgcctatgctttgctcgaacgagggcgggggagtgtgactcgcgcggtaatcgtgggaccgactcaccgtgtggccgtgcgaggcgtcgcctgttccacggcagcggcgtttgaaacgccgctgggcactgtgccggtagacattgcagccgagcgtaaggctctgggcctgtctgtcaatgagccattgcgctccggtacacatgcccgtccgggcgcgtcggctcccgcaatgatcgtcaatggcccaacccacgcacaagaacatgcggtagaagtgcagattccgttcctgcaaaccgtgctcggcccagacctcactattgtgccgttgaacgcgggcgatgccacgccacaagaggcgggtgatgtgttgcgtgctttgtggggtggcccggaaaccgtcatcgtgattagttcggatctctcgcactatcatccgcacgaagtcgcccgcgcgttggatgaccagaccattgcggacattgcggctttgcatctgccgattcaccctcgccgggcctgtggcgcatacccgatcaacggccttctggatgtgttaaaaggccgcaaggacatgaagctcttcgagctcggctgttccacttccggcgacgacggcgtggtggcgcttgccggccaacctcgccccgcaatgcgagacgccgacgagccggtagtgggatatgtctcgtttgccgcgtgggaatccaaaccagaagcagatgctccagccggtgcagatgacttaggcgaatcgggaacagcccatggtgatgtgctgctgaaactcgcccgtgccgctatccgggaacggttgcatattgaacatccaacagccgccgattcgaccgcgtccattcttgccgcaaacccatggctgaacgagtccggtgcctgtttcgttaccctgaccgagggtggccggctacgcgggtgcatcggttcgctggccgcccaccgctcgctcggcaaggacatagctgcacatgcggtggacgccgccacccgtgacccacgtttcaacccggtcaccgccgcggaatacccgttgctcaacgtggaggtatccgtcttgggcgagcccgagccgattaccgtgaactcctgtgacaccgattcgcgcgataccggctcgaagaccgcgactctggcatcgctgcaatccggacctcagaccgacgccgtcaaacgggacggcagcaacgtcgaacgcccggtacgttcgcgcactgaacttgaggaagtattacgccccggcaaagacggtctgattctcgccgaccgtcgtggccgcagcgccacattcctgccacaagtgtgggatgagctgcccaatccgcacgatttcgtcgctcacctgctcgccaaagccggtatccgcccgtcctacgactggaacgatggcgaaatcgactgtcaacgctacgaggtgaccgcctatgccgagcactaacgcagcaaccatgtcccctcccgctggcgggaggtggcgcgaagcgacggagggtggtcaccgagaatcagagggtggtcaccgggaatcgtgcggtcatacggcgtcagtcacagatgttcgtaaccccgccatagcccgctggcaaacgcaattccacgacggtaccaaccgcgctcgctgcgaactatgcccgcgccgctgcgtcctcaagcccggccaacgcggcttttgcttcgtccgctcaaaccacgacggactcatcgtctccgacacctacggccgcagctccggcttcgccgtggacccagtggaaaagaagccgctcaaccacttccaccccggttccagcgcgctgagttttggcacggctggctgcaattccggttgccgattctgccagaattgggatattgccaaagcccgcagtttcgaccggctcggcgtggaagccagtccggagaaaatcgcgcaggtcgcggccgaccggggcatcgattcggtggcgttcacctataacgatccgatcgtgttcgccgaatatgccatcgacacggccgaagcctgccgagcgctcggcattcatcccatcgccgtgactgccggatacatgagcgccgaagcccggcccgacttctacgccgccatggacgccgccaacatcgatctcaaaggcttcaccgaagaattttattggaaagtgaccggcacgcatctggccgatgtgctcgaaaccatcgactatgcggtcaacgaggcacgcacaccagaaggcgaacacgtgtgggtggagctcaccacgctactcatccctggactcaacgatgacgacgcccagctgcatgctgaatgtacatggatacgcgagcacttgggcccggacgtgccgctgcacttttccgcattccactccagttaccgcatgatggacgtaacgcccaccccgcacgagactctgacccgcgcccgaggcatcgccctcgaagagggactcaattatgtgtacaccggcaacgtgcatgatcgtgaaggcgataccacatattgcccaaaccctgaatgcagggccaagctcgtggaacgcgattggtatcgaatcattgccaaccgtttatctgccggatacagtggcaatgggcactgccccgtatgcaggactgctatcgccggacgttggtaatctgcctcaggtcgcccgcgcgatttagcgcagatcgccaatacgcgcggcgatcgtcctcatcgatttgaggctcgcctcatagcgcgcggctgccacaatcagaatgatgccgcccaaagcaagccacacccaccggtagtggcgggagaattcggcccgccatggccacagcacagtcaccgtgctgacgataagaatcaccgtgccgtagatcaacggtgcttgcagcaaacgcacacccacaatcagcgcggccgctccggacaggccgcttgttccgggaccgacataggcgattgcgcaaatggtggcatggccattggctgttgcgataccggttgtcgcggaactgccgttgggaattgcggggttgcagcagaaaattgcggggcccatgctgggccggttgatacaccggttgctccgcgggttccggctgattcccctgttgctcggtcggctgcgtcatcgtgccctcctacccttctagccatcattgttgtacgaatgagtccgaatgccaagatgaaggccggaatagtgcgaatagcaggcgggcttgtcggttcacgcgaatatcttggaacacatgacttccaatacccttcgtatgtcaaccatgttcctgcgcaccctgcgcgaggaccccgctgatgccgatgtcgattcggccaagctgctgcagcgcgccggctatatccgcaaggccgcacccggtatctggacctggctgccgctcggtctgcgcgtgctgaacaagatcgaggccatcatccgcgaggagatcaacggcatcggcgcccaggaagtgcacttcccggccctgctgccgcgcgaaccctacgaggccacccatcgctgggaggagtacggcgacaacatcttccgtttgaaggatcgccacgaggccgattacctgctggcccccacccacgaggagatgttcacccttctggtcaaggacatgtactcctcttacaaagacctgcccgtcaccctgtaccagatccagaccaagtaccgcgacgagttccg

SEQ ID NO: 973 - DNA, 19873 bp, Unknown
  R117_24m  MAG No. k141_19909
cgggccgcacacttagtcaacaagtacatgtcggtcagatggttcggactggtcagagggcccgctctgatcagttaggtcggtctgaacggactggctgggctggtcggcctgagtagcccgtttggaccgatccggttcgcccttgctggccttcacactgcttcagctccagctgaagttcgctgatgcgccgttcgagttcgtcgatgcgccgtacttgtggcgaagtgagactgaggggagcctacaaaatgctcacaggccgagggcaccggccacggccatggcctcgtgttcgggatcggcctggccgatgtgtacgttgacgtgaatttcgtcatcgcccggctcttcgagaatgtcggactgggattgcagcatgctcggcttcatgaagtggccttggcggtgggaaaggcgttccatcacctcgtcgaatgtgccctgcatgtagacgaacaccacgccttgacggcgcagcttgtcgcggtagatcttcttcaacgccgagcaggtgaccacggcgggctcgccggcggccacgcgctcgtcgatccacgcggcgatggtgtcgagccaaggccagcggtcttcgtcggtgagcgggtgtccggcggccatcgagatggtggcgcattcggaccatgcgaacgaatccgatcaggccatcagccacatcaccggcactgaagcctgacccgtcatcgtcacagcaccacgcggcggttgaggtcgcggcgcagcgtcttccagccgggtaggtaggcggtcatgcggcgttggaatccggcgccatggccgctttcccacagatgcgtcatctcatggaccaagacgtattccaggaattgcggttccatcactcccaattgaaggttcagacggatgcggccggttcgcggcgtacacgatccccagcgcgaggccatgacccgtagcgtgatatgcgtgggctgccggccgatgaccggcccccacttggccagcagctgtggcaacgcggcgttgatcgcggccgccgcttgtcgtttgcgttcgtcggtccagatttgggagcggtcaaaatacggctggacgttcgtaccggcttggcccggcccggcgtcgccgattctcggacgactgatatcaccggttttcggacgaccggcaacgcctccatcatggccgctggcaccagctacgccacgacctccgttctcgaagcctgcaccctcgttcaatgccatgatggagcgccgttgcgcctcagccatgcgctgctgctgggcgagaatccacgaatgtcgctctttgacgaaatccgcgatacgactctcgctcatccgcatcggtgcggagatttcgacgcggccgctcggcggtttgatgcgcaaatacaggtttttgatgggtttgcgcgtcaggtgcagatggatgccgtcaatgtccaacgactgcccggcggcagcggaccgaacggatttcggcgcaccggacttcggagcggtggattgacgacggcgataaggcatgcaagtcattcttacacaacggcggacaacaagcggcacacaatgccgcccctcacgaatcggcaaccggcgctgctacattcaatccgcataccaactgcccacaccggagaaggtcgcgcaggagaaggcctcgctgctcgagatcgacgacagcttccagaagatcgtcctcgtacgcgacgtggtcaaacccgtccgcgacgaacacggcatcctcacgatgagcgtctacgatttcctcctcgacccggacagcctgacgatgtgacgccggacggccggcaaatgccccggaacgcagccccccactcctcgaacaccgccttcgcggtggccgaggacaccatgacgagacagccgagcatgatggcacccagcagagggtgccgaagttcgcgatgacgtactgccacaggtccgacccgtccgtgtagccgtcgaagcgcagcgccgcgacggggacgagaaatccgtcaagcgcatgcgcggcgtcagatacaccgtcctgaagaaccccggcaagctgaccgacagacggtccgaggcgtccgggaacctgcggtacacggaccccaagggccggccctaccgttcatgacggctcagggaacccctccggacgatgcccaaacgaccggccgaccaggccgggaccgaactggaccgccgggtgttccgggcgtcccacagccgcatccccgagatcgtcgaactcgcccgaaagatccgccgtcatgggcccgacatcctcgggacaatcgaattgggctgttcaaacgccaggctcgaggcgtccgacaacaggatcaaggtcaccatccgcatggtctacggcttccaccacgcgaacaatcccatcgccctcgtcatgctccgccgcggcggactcgacatacgcccaccacaaccaagaacccaacccacgaaaacagcagaagcctcatatgtattggacatttctgcgcagagagggaggtgtaaccgcagcattacggtgtgagaacgcaaggttacatagctgggcattggctgtggcgttgctagacattgaccgtcgagccggcaatcatggcgcaagcgacaatcacgacacgccgttattgacataccgccgttcaatggtattgtaattacttgtgcgcttttgaagcgtatggatcgggcccgtagctcagctggttagagcgcatccctgataaggatgaggtcggaggttcaagtcctcccgggcccacagaaaaaatgaagcggctgcgagccgctctttttttctcacggggctatagcgcagctggtagcgcatctgctttgcaagcagagggtcgccggttcgaacccggctagctccacagacaacccttggaataataccgattctgagggtttttgcgttcttgttcgagggattctcccagtgcgccatggccctctccatcgaaaaaggggtggtcctgttaaggaccacccctcgaggattcagaccaaccgcgtggtcattgtcgctccgtcttcacggaacggtacacgaaaatccttcgccttgcggcgatatcgcccggacccggaggactacaccttcctctcgggtggaaggtaccggcagataattggctcttccggttttggtgtgtagggggatgcttataggtgggcttgtatggtgtgtctgaagccgccggtgtggaggaggctgcgggtcacgccaaaaccggaagagccgttttcttttccttctccggtggtttcgtcgttgaccgtgttgccggtggcttccttgcaggcttgtttgtaggcttcggctgggctggtgtggtggagggcgcggatgcgtgcagcggcgtgttcgatgtgttcgagcgtggcggatggcgcgtcggtcaggccgtggcgggcgaggacttcgttgcgccacgagtcgtagcgttgctcgcgcaccacgcgtggcttcctccgccccctgacccatgcgtcggcgtacgcccaatcgccttcctcgtagatgtcgcgtgcccaggacgccgtcggacggtcgaacgggtaggggcccgccggcagcggcaacttgtcgaccgtcgggtcgaacacagtgaatcgtcgccgttccctcgcttcgcgttcccgttccggcgctgccagcgcctccgcgacgtccgagtggaacgcggccatgcgctccttggcgccggaggacgtgaacccgtcgtcgggttcgcgcagtccgtgctcctcgagcagcgggtggatgtcgtggtccatgagccagcggagccgggacatgttgaacgcgaggatgaatgcgagcgagattgcgaccatgaggcccatcccggcccccatcagcagtgtgctcatttcagccggctccagcgttcggcgcccgcgcgcgggctgaaacgtccccgccagtcccacggtccgacgaaacgcaaggccaacagaatcggggagcatgtggcgaggaacgcccagaagaaagccaaccatccaatccagtcaggtgtggatctgccggtgtcgacccattgcgcgctcgaccagaacatccatgtcatcgctatggggaagcccgatatcgcgatgaggaacagcgtgccgacgatggggccgccgaacatgtagcgcagcttcgtggcgggcacggaggaggcgaatgccaagtcctccagcgaggcggggacgtaggtgttcggccggccgaacacgagccggcagaaaccccagtacaggaggagtccggccagccacatcacggcgaccgccacgtacgtgttccatgcgtcgcgggatatagtgaccggtctgagaaaagccagcagcgtcacgtcatcggtatgcgtgtggtgcgtcttcgtgtccggggtgagcagccgggcgatgccgtggatcatgaccatcaggccgggcgcagccgcggcggcagcgccgccggccgccgcgccagcccgcgcccagccggaatcgccgccgaaatccagcttgcgcttgaccggcgtcttctccagcgtgtcccagaacacctgcgccccgtcctcaagacgccccaccaacacataccgagtgaacaacgccaacagatacccccacttccaaaacccgagattatccttgaaatgactgcccgggtcatctccaccgcctctgtgcacctgattgtcgtaaagtgcgtctaagccgctacttatcagccatccggctccagtgccaatcgccgttccgacaaatgcgccgaccacggtgccggcaccggggacgatcgatccgacgaccgcgcccacggcaccgccaacggtcccaccgaggccatcaacggcaggcccgagaccctacgcggcatcgccctcggcttccgcaacctcgacaactacgtcacccgcagcctcctccacaccggcggcttcagacacaccatacaagcccacctataagcatcccctctacacaccaaaaccggaagagccggatgattccctgcaagccgatcacgccaatccgacccgacgactaatcagattgaggacggctgaattaagcttgtgccctcatgatacaacatgtcctgcgaccgacgccagacacaacggcagcattctgcccaccatagggcgtgtctttaaccagaaagtaccctcaaatacgttcagcaagatatatgcacgcagaacagcccttccgcattatcttatttgacatagagcatgccccttccattccacagaatcaagcaaataaacgagcggagagactgggcacaccgcaaaacaatggcccaacccctccgctcgtttgttatggaaggaagagggatgaataagtatgtttacttcactgacttgatgaagacgatcagcaccgcgccaatcagcgagcagaccgctgcaagcgggaagagtgcgtgatagcccaccgaggaaattagcgccgccgcaacatcccacgcaccatattcaggacaaatccagtccgttgttgtccttggctttgctcaccatatcagtcaaatcggggtcgtccacagacaccgcgttctgctgactgagcgtcaacgatagcgagccattataggagtcgccgtattcgtccttgccggacacgcttatggcaatcgaattcatcagacgctttctgccgtagttcagatccacggtgatagtcggcatctccggctcttcatccgtgccgaaatcccagttgcgcacattatcgagcgcctgacggtactcatcttcagcatcgtccacgccggcatcctcgatttgctgaatcacccaggatttcagatgcggatactgcgcttcatgactgatccagtaattcacgaaatgctgagacaacgctttgatatcgatttggtacgacagctgcgtattgccggcagacttggcagacgatgtcttcgggaacagctggctgcgcacattcttatcttccagctccacgccgaaatattgttggatgaatttgctggcctcggccttcacctcggcagacgttttcgtgcccttggcccggtcgatgtcgttcgagtacccatcgtcgttcatcttgtccagctgatcgtagaacgtttgctccgcgccggtgatgtcccaagcaccgttcttgaccaacgcatccttgacgttcaatatcaagtccgccacatcactaccaacgccgttccttaagtcatcttcatattggtcggccgggcagtagatgtagtaggggtcgtcgtcatgccaaacgaatttctcggcgaatgcgcctttgtaccaagcgaaggtcgttgcatattcgtctgttttgctagtgaaggacgcggaggattcgttggtggttttgcccagcgaatacatgccagacatccgcacgtcaagagaatcgtcagtgatgctgtgggttctgagttcgtatttggtgctgcgcagagtggacagcgagttgatcgcgtcgaaggtgacgaccagcggattggtgggccggaagcccagcatcgctttgacggcggtgaagttggggatgatgaacgccaaggccgccaccagaatcgtcgcaagcaatgcgcagaaagcggcgatcagcttcttactggatttgcgctgcggtgccaggacggcggttgcatcagtcgcctgatatgcggcaggagcgggaatcggcaaagccggcaggggaacggttggtgccggctgtggggcagcggacgcggcgtaaaccgatggggcaaccggcgcggctggtatcgatggtggtaccgcagacgccggcacagcaggtgccggtatcgacgcaggcggtacggctggcgatgcggccggtactggtgccgtcgcaactggtgcgctgtctacagacgctccacatgccgggcaaaatcgtgccggcccatcaactctatttccgcagtggccgcagtacgccatcgtgtgcctctctccctcaaatcggcttgattgccatcgcttcaatgttactcttcagcattacgcctcagccagcccctacgcgtaacgatacgagacgcggcagccttaatgcggttgttttgacacgatgccaacatcgagctctggccaacgttctggtactcggctacatcttgctgcgagccaagaagcaggccatcgctcgcgccgacgaggccgaatggcggtctagcctcgctttaagcctcaggccagcacctccatggggtgataggtggcggtgtggtggccggtgatggggttccatacccgttcggcgaatgcgcgcagacgggcgacgccctcgcacagctcgtcggcatctccggcgtaggagaggcgcacgaagccgcgcccctcctcgccgaaggcctcgccggggaccacagccacgcgctcttcgtccagcagacggtctgcgaattcaccggagtcaaggccagtcaggcgtacgtccacaaaggcgtagaacgcgccttgcggttcgatcagacgcaataccgggcatccggccagaccgtccagcacgatctggcgcttggcgcggtattcctcgcgcatggcggccacgttatcttgcgggccagccagtgctgccacgcctgcgtattgcgccaaggagttcaccgaggagtgcatgagttcggcgattttgccggtctgttcgatgaccgcttcgggtgccagcaggtagccgatgcgccagccggtcatcgcataggttttcgacaggctttccaccacaatggtgcgctctttcatgcccggcaccgcggcgatcgatggtgccacggctgcctctcccccaagcgtttccccgaacgtttccccaaacacgaacggatggtaaacctcgtcggagatggcccaaatattgtgctgcttgcatacttcggcaatacgcgccagttcggcggcagaggttaccgcgccggtcggattgcccggtgagttgatgattacggcgcgggtgcgcggggtgatcgccgcttcgatgtccgccgcgttcacgcgcatgccgtgctccggacgcagcgccacggtgaccgggcggccgccgcacagcatcacttcggcgtcataggaagtgaagaacggcgagggaataatcacttcatcgccggtgcccaccacggctttcagcgccagaaacaggccaatcgtggcaccgtcaacggcttgaatctcggtttcgggatcataagtaagtcccttcacacaggcggagtaatcggccacggccttgcggtattcggggatgccaagcacgttggtgtaccgagtgcggccagcctgtgcggcctcgcaagcggctgccacgatatgcggcgcggccgtggcgctgggctcccccacggtcagtgaaatcgcgtcaggcacgcgctctacacggtcgaatacgtctcggatgccggagcgcgggatattcagggcttcggcggacaggctcgcgggctcggcggtcggcacagcaacccgaccggcagcaggcatagtagcaggcgcagcagcagatgcaacttcggacagagacatgttggaaaacttctgcatatcatccctcctcaatggaattatttcatcgttctcttatttcaaaaggaattattacatccaattaggactttaaacgtaaacattccaccacacaacagaaaacacaggaagaactactgaaattaccaggcaaaatcggaaagccatcgcattccggcaacaggtacagtgaacacagagcacaacgaacggagaagacatcatgaccgcgattgacgagaccgaccagcgcatcctcaccatgctggaggccgacggccgcgccacgctcgcgcaactggcccaggcgaccggactgtcagtctccgccgcccagtcgcgcgtgcagaagctggagaagcgcggcatcatcaagggatacaaggccatcatcgaccaagagcagcgcggcttgcccatcagcgcgttcgtcaacgtgaccccgctcgactactcagccgaatcctcgattccggacaagctgaacaatatcgacggcatcgtctcctgctattcggtggccggcgcccccagtttcgtgctggtggtgcgcgtggcttcccctaccgcacttgaagaactgctcaatctcatccaccgcacggtgccggtaagcaccgagaccacgatgattctgcagacctacttcgcacactgaccgcgaacccggtaacctgcgcgccgaagacctgcggccacacaccccacaaaccccacaggtcacaaaaaccatacgaccccacggtccagccacaccccacaaaccccacagaccgcacgatccccaacagacacatctgacatcacccaagtccgcctttatgtccactatatgaacgtgcctccggtgtgatgcggcttccatttcgacccgattcacgcatagacagacatccaacaatcgcccgaaaaatctaacaaacggaaacttgagccactccataaccacgccgaaagctttcccgttatccgagcgagactctatgcagcaagggcctgcgcgcatagaataaaaccgtcttaattccctaccaaatcgaggagaatcatgctcactgacgagtacatcaagcgtgtctacgaccaggtcgttgcccgtgacggcgatcagccggagttcctgcaggccgttcgcgaggtcttcgagaccctgcagccggttgtcgagaagcacccggagtacgagaaggccggtgtgctggagcgcatcgtcgagccggagcgcgccatcaagttccgcgtggcctgggttgacgacgagggcaaggttcaggtgaaccgcggctaccgcatccagttcaactccgccattggcccgtacaagggcggcctgcgcttccacccgaccgtgaccgagtccgtcgtcaagttccttggcttcgagcagattctcaagaactccctgaccacgctgccgatgggcggcggcaagggtggctccgacttcaacccgaagggcaagtccgacgccgaggtcatgcgcttctgccaggccttcatgaccgagctgagccgccacatcggccagttcaccgacgttcccgccggcgacatcaacgtcggtggccgtgagatcggctacctgttcggtcagtacaagcgcatccgcgacgagtactccggcgtcctgaccggtaagggtctggaattcggcggctccctggcccgcaccgaggccaccggttacggcgtgtgctactacacccaggaagccctgcgcgtgctgcgcaacgactccttcgagggcaagaccgtcgtgatctccggctccggcaacgtggccacctacgccgctcagaaggctgagcagctgggcgccaaggtcgtcaccgtctccgactccaacggctacatctacgacccgaacggcatcaacgtcgaggtcgtcaagcagatcaaggaagtcgagcgcggccgcatcaaggaatatgccgagcgcgttccgggctccaagtaccacgagggcagcaagggcgtgtggaccgtcaagggcgacatcgctctgccgtgcgccacccagaacgaggttgatggcgaatccgcacagaagctcgtggacaacggcgtgaccgtggtcgtcgagggtgcgaacatgccgtccaccccggaggccatcgaggtctaccagaagaacggcgtgctgtacggcccggccaaggctgccaacgccggtggcgtggccgtctccggcctggagatgagccagaacagctaccgtctgtcttggaccttcgaagaggtcgacgccaagctcaagtccatcatggaagagatcgtcgccaactccctggccgccgccaaggaatacggtcacgagggtgacctgatgctcggcgccaacgccgccggcttcgtcaaggtcgccaacgccatggttgcccagggcgtgctgtgacgcttgcctctgagcagtactaagcagtagcgtaatgcccttgcttcccgtgaggaggcaagggcattgctatatgtacaacgagcaacaagtgctatccccaaatacgtaagcccgataacaacttagcttccacctccataaccccggaactcaccaccgtcgatcagcacatggatcagcgcgctggaccatggccgacgtggtcatcaaagccatcaacggagtctcttcaccgcgcgtgatgcacctgaacaccgatttggtggtgcgtgattcggcgtaattgccacgtggctgtcggcaggactctagataccgcgtcacaatcacccagtaatgcatcacgcagtgtataactcttccgcggaaacgaacaccattcgttcatcatccatgtagcgggttcgcgtggactcactcaccggattcttggtgaacagcataagccacgcattacctgcctgatagccgcggactaagccagcacgctgatggagcttttcaatagcctccgtttcgttgaatgaattacgccatttgcattcaccgaacagaatcgttttatcgagcgaatccgcagcaatcacatcgatatcggtttgctcgtgagcaatcggatcattgccccaccatttgccgaactgagtggcaacaaaggggaggttgcccatagcgttgtttcgaataagccattgcaggcaaatcgtctcaaattgttgaccaacataggtatcaaacgctggtccaaaagcgagtctgctcgtaacctcctcgctgatattaccatccaaaatgctcatgttgcgccccacaaagcggaaccaatatgcaaagaagggatcgctcaccacatacattcccttgcgcgatttactcggatcttcaccaaacggcacttttcgctcaattaagcgcaaatcgaccagcgttttcagatatgctccaatcgaatcagatccgacacccgcatgttcagcgataagctttggcgaggaattaccacccgcaatagattgcaatatcgaataatacgatgccggttcacgaagctcctgacgcaacagcatcataggttcctcacgcagtacgcccaagttgtcgaacatcaagcgcagcacattggattcaaagccatcggcttcctgtatacgggccagataatatggcgtaccgccgaaagtcgcatagtattggaccagttcttgcggagatgtgttcgttagaaattttgccgcatccgcatagtcgaatggcaggagtcgaatctgtgctgtacgacgcccgtatagcgggcttttacgccccaatacgtcgttttccatgaatccctcgttactaccggatagaatcatcgtcacttttgtggcgaggaatccatggtcaattgctatctgcaacatggagggtaatgctggctcggcggcagccgcataagggaactcatcgaatacgaacaccatacgttcgtcagtctgtgcagcacgttcagcaacaaacgataacgcatcagaccacccgccaaacgacggggtggaatccggcataccaaagaacgacaatgccgctcttgagaaatcttcaagattcatcttggcgctttgctgtatggccgtgaagtacagcacgcgtttatctttgacaaattcgtcgatcaacgccgttttccctacacgccgtctaccgtacagcaccaccatttcgaacgaatcgctggtaaacagcttttccagcacttgtaactcgtgctctcgtgcgacaaacattgcagccctccgatccgcctaccgcccaataataagagtatcatggttaatgcaatcacgattaccttaattatgatactgataattgttgccctaccgcgaggaggatcttccttccgctgtcaaaacgaaagcccaacagtccagactgacgagcagcaacatcggcagatcaaccgctgacgccagccagcctgacagcacaaatcagcctgattgcaggcatataggcactagttagcgaaaccggctcttcgcattttggtgcgtaggggccgtgcggtttgattcggtgtgtgattgaaaaagtgaatgaaaccgcacggcccctacacgccaaaaccggaagagcccataaagtcccctcagtagcgccaacctgccagtcctttggcggaaccacaccacatagaccttcctcaacggcgccaagctgccacacgctggcagaccaacaccgctgtgtgcattctctgcgtcggcggcagtccaaaacttggcccagcaacgacgcttgctgtgcccagcgtcggcagagggccaagaattggacgcaaacgacacagaacacaccctcagcatcggcagaactccaagatctgtaccgctgacgacggtaagccctccacagcgtcgtcagagatacaaaacctgtcccaacaccgacgcctgccacccccagcgtcgccggagtcccaagtctcggcccagcaacgacgcctacgaaccccacacataagaaaccgcacctccgatcatcgaatctgaattacttcagtccaacaaccggggtgcggttcactgaggggagttctgccagtatagctatatcagtcgtcgccgagcgtgacgtgcacgccgccgaccagcgagctgaccacgttgtagatcagtgccgcaatggtggccagcagggtgaagatcaccacttcaacaatcgagaagatggtgacgccggagaccacggtggtaagggacaacacgttcttgagatcgaaaccgcctgcatcaagaccggtggaagacacaatctgcgtaatctggctgaatacaccgaccacatcaagcagcacccatacgatcgcggaggcaacgacctgaataatcgccacggcgatggacagcatgaacgtcaccttggccacggaccaagcatccacgcgggtcagcgacaagctcatgcggcgagccctgggggcgctacggcgaggtgccggacgcacgggagtggcggcacctgaagaaggcaacgtggattcttccggatcgctggacacggagcgtgccacgcggggagcgtgctcagtaccgatcagcggctcgacatgatcgttctgcgtattgccgactgccggcggtatgatccggggctcgttgtcttcgagattctcgctcatcgtttctccttaacaggcttggcggtagcctctgctgtatgcgaggctaccagcttttcaggacgctgctcacgcctcgtccgcgttgttcacattctcgccggattgtgcggtctcggcggtgccgttcgccgcggcatcgccactgtcctcgggctcgtccttctcctcgttacgggcgatggagagaatcgtgtcgcccttgtcaggcttggcgaaggtaacaccctgggtgttgcgcccggtgcgcttgacctcgtccacgttggaacgaatcaccttgccggacttcatgatggccatgacctgatcgtcttcggacaccacgagcgcgccgaccagggcaccacggccctcgaccagttgcacggccttgatgcccaagccgttacggccctgcagacggtattcgctgatggcggtgcgcttggcgaagccctcgttggtcaccacgaacaggtccttgtcggagtcgccagggaccacatccatggccagcaggctgtcgtcgttacggaacttcatgccctgcacgccggcggtctggcggcccatcggacgcagctgctcgtcgtcggcctggaacttgaggctcatgccgagcttggagaccaggatgatgtcatcctcggcgttgcacagcgcggcaccgatgagctcgtcggcgttctcgccattctcgtcggccatgaggcgcacggcgatcaggccgccctggcgcggggaatcgtactcggccagcggggtcttcttgaccttgccggaacgggtggcgagcaccaggtacttggccacctcgtagttcgggatggacagcacggtctggatggtctcgtcgggcgcgaactgcagcaggttggccacgtgctggcccttggagtcgcgcgaaccctcgggcagctcgtaggccttgatgcggtagacgcggcccttgttcgtgaagaacagcagccaattgtgcgtggaggtcaggaagaagtgatccaccacgtcgtcctcgcgcagcttggtgcccttgatacccttgccgccgcggtgctgggcgcggtattcgtcggccttggtgcgcttgatgaagccggagtgggtcacggtgaccaccacgttctcttcggcgatcaggtcctcgacgttcatctcgccggagaacggcaggatcttggtgcggcggtcgtcgccgtacttggccacgatctcgtcgagctcatcgccgatgatcttgcgctggcgttccggcttggcgaggatgtcgatgtagtcggcgatcttgcgctgcaattcctcatgctcggccacgatcttgtcgcggttcatgcgggtcagcgtgcgcagctgcatggccagaatggcgtccgcctgcacctggtcgatgtccagcagccccataaggcccgtacgggcggtgtcggtgtcttcggaggcgcggatgagggcgatgacctcgtccagcatgtcgagggccttgagatagccctgcaggatgtggtcgcgctcttcggcctcgcgcttcaggtacgcggtgcggcgggcgattacgtcgagctggtggttcacccagtggcggatgaaggcgtccaggctcagcgtgcgcggcacgccgtcgaccagcgccagcatgttggcgccgaaggtctgctgcagctgggagtgcttgtacaggttgttcaggaccaccttcggcacggcgtcgcgcttcaagaccagcacgaggcgctggccggtgcggccggaggtctcgtcgcgcatgtcggcaatgccctggatcttgccgtcgcgcacggcctcacgaatggagacgacgaggcggtccgggttgacctggtagggcagttcggtgaccaccaggcacatacggccgttgatctcctcagtgttgaccacggcacgcatggtgatcaggccacggccggtgcggtaggcctgttcgatgcccttgtggccgaggatggtggcgccggtggggaagtccggtcccttgatgatgcggatcaggttttccagcagttcctcgcggctggcgtccgggtggtcgagcgcccagtggacgccgtccgccacctcgcgcatgttatgcggcgggatgttggtggccatgccgacggcgatgccggcggaaccgttgacgagcaggttcgggaagcgggccggcagcacggtcggctcctgggtcttgccgtcgtagttgggcacgaagtcgacggtgtccttgtcgatgtcgcgcaccatttccatggccagcggggccatgcggcattcggtgtaacgcatggcggcggccgggtcatcgccgggggagccgaagttgccctggccgtcgacgagcatgttgcgcatcgaccaggactgggccatacgcaccaaggtgtcgtagatggcgaaatcgccgtgcgggtggtacttacccatcacgtcgccgaccacgcgggagcacttgttgtagccgcgatcggggcggtagccgccgtcgtacatcgcgtagatcacacggcgatgcacgggcttcatgccgtcgcgcacgtccggcagggcacgctcgacgatcacggagagggcatacgccagataggactcgcgcatctcctgctgcaggtccttgcgctggatgcgttcgccggtgtccatcaggccgtagtcggtggtgtccgcctcctgcgggctcaacggctccatcgagccgtccggcgtgaactgctcgtcgccggtgttgttttcatctgccactgttgttcctttagttgtctaagtccgttgtgtacctccctctgacgagggaggttggaggattccgttacgcatcgatccaacgcacgttcttggcgttgcgctggatgaagaggcggcggggttcgacctcatcgcccatcagcatcgagaaggtctcgtcagccgcggcggcgtcctcgatgtgcacctgcttcagaatgcggtgctcggggtccatggtggtctcccacagctcctgatagctcatctcgcccaaacccttgtagcgctggatgccttcgcccttgggcagctggcgtccgttggccttgccttcggcgagcacgcggtcgcgctcggcgtcggtgtacacgaagtcgtgcgggcccttggtccacttcaggcggtacagcggcggcatggccacgtacacgtagccggcggtgatcatcgggcgcatgtagcggaagaacagcgtcaggttcagggtggcgatatgcgcaccgtccacatcggcatcggccatgatgatgaccttgtggtagcggaccttggagatgtcgaagtcctcgccatagccgccgccgaccgcggtgatcagcgattcgatggtgtcggacttcatcatgcggtccaagctggcacgctcggtgttgaggatcttgcctcgcagcggcaggatggcctgcgtgatcgggttgcggccctggatggcggaaccgcctgcggaatcgccctccacgatgaacagctcgcactcttccgggttggaggactggcagtccttgagcttgtcgggcatgccggcggactcgaagatggacttgcggcgggtgttctcgcgggctttcttggcggccagacgggcgcgggatgcctcgatggccttctggatgatgttcttggcctcgttcgggtgggcgtcgaaccagtcgccgagcttgtcggtcatcacgcgctgcacgaaggtcttggcctcggagttgccgagcttggtcttggtctggccttcgaactgcgggttggtgagcttgacggagatcacggcggtcaggccttcacgcacgtcgtcgccggagaggttctcgtccttgtccttgaggatgcccttgtctcgcgcgtaacggttgaccagcgaggtcagcgcggcgcggaagccctcctcgtgggtaccgccctcggtggtggagatcgtgttcgcgaaggtgtgcacggcctcggagtaggcagtggtccactgcatggcgagttcggcggagatgccgagcttcaggtcttcggcctcgaagctgatgacgtcctcttccaccggcgtggccttgcgcaccttgaccagatagtcgacgtagtccttgatgccgttgaggtactggtaggtgacggtctggtgctttgcgccgggctcgtccgcggcgtcgccggccacctcgtcgccggcctggtcattctcacgctcgtcggtcaggctgatcttgaggcccttgttcaggaaggccatctgctggaaacgggaacgcagcgtctcgaagtcgtagatggtggtctcgaagatcttcgggtcggcccagaaagtcacggacgtaccggtggactcgccttcggtcatcggctcgccctgcttcaagggcgcggtggggtgctggtcgatgtacgtctgggtccagtggaagccctgacggcgcacttcgatgtccacgcgggtggagagtgcgttgaccacggagatacccacgccgtgcagaccgccggacactgcataaccgccgccgccgaacttgccgccggcgtgcagcttggtcatcacggtctccacaccggagacgccctcgccgggcacctcatcgaccgggatgcctcgaccatcgtccaccacgcggatgccgttgtccggcagaatggtgacctcgatatggctggcgtatccggccagcgcctcgtcgaccgagttatcgacgatctcatagaccaggtggtgcaaaccgcgcgggccggtggaaccgatgtacataccggggcggatacgcacggcctcgagtccttcgagcaccctcagatcggaggcctcataatgctcgggggccatggattcgtcaagttcgccttcggtcaattccgcattgttgatgcgttccgcagccgccttcagctgctcctctttgctggtttcgtctgccaacaggcttccttccgtgactacagggtcaacctccgtcatgaaggtcattcacggaggcgatatggcttacgaggcccgtaaagggctcttctggccatttgaccatactgcatgtgattttactcgtctaacccgacgagcgccatagcgaggcttctgcgaatttgtttggtatcttggctaccgccgccgagcccatttgcgcgtgtatccggcggccggtccggtcacgcgaatctcggcgatggtcaatcctttgagattgcgacggatggtatcggtaagttgggggataaggtaggtcagctgcgtggcccagaccgtggattcggcacggatggtcagtacgccgtccgtgaaatcggcgactgccgaatggctggcgatggcctgccccaccacttggtcccaatggttgcgcaattgcgcaagtttcatattcgccgcccagacgccattgccggcgatggtggtcatcacgctgcccagttcagccggatcgcgccccggtttgccgaagttttcgatggcctcttcacggcggcgtctgtagtccttcaaggtcgccccgcgacgggagagccgctcgaatatttcggccggcagtttggtctcgtccaggttgagttggcgggcgatcggcgggttcatgacgctttccgttctacggacgcgctgtccaccgcggtttttccgtcatacttacctaaactctcgttttcccgtgaatcggacaaattgcccagagttggcagtattacggaagcgggttcggccagtgtggccacgtcgatacgatgggccgattcatagtcgggcacatcgccttcagcggccacggtaatcagcacctgatcctgttttctggcgaaatcaagaatctgcgtgcgccggctgtcgtcaagctgggcgaacacatcatcgagaatcacaatc

SEQ ID NO: 974 - DNA, 12053 bp, Unknown
  R117_24m  MAG No. k141_20306
acggcaccatcctcaacgtgatcggcgacgccgtcggcgccggatggttcgggctcggccccgtctacccggccacgggaggcatcctcgcggtcaccggcacgcccgccaacgcggccatatccctgatcgcgcagctcgccgtcgccatgctgctcatggcgttgggtggatggtgctcggcacacccgcgcacaacgcgctgaacggcaccggcggaacccccaccgaaaaaacatcacacggaaagaagacgtcatgttcatctccatcaaccacctgaccaaggacttcctgaggaagccccgcgcgctggacgacgtgacctgcgacctgccgcacggcatggtcggtctgatcgggccgaacggcgcaggcaagaccacgctcatgcgcatcctcgccggcatcatccgccccacatcgggccaggtactcatggacggccacgatctgaaggacgagaggacccgccgtgcgctcaaacgcacgctcggctacctgccgcaggacatcgaaccctacccgcagctcaccccgctcgaattcctcgactacgtgggcgtcctcaaaggcatcgacgacacgcgaaagcgcatgcgccaggcgcacgagctcatcgaacgggtcgggctcacggacgtggccgaccggcgcatcggcggcttctccggaggcatgcgccgccgcgtcggcatcgcccaggccctcatgggcgacccccggctcatcatcgtggacgaacccaccgccggactcgaccccgaggaacgcatgcgtttccgcacgctgctcgccggcctcggcggcgaccgcaccgtgatcctgtccacccacatcctcgacgacatcgcccagacttgcccatacgtgttcgtcctgcgccaaggccgcatccgctacgacgggccgaccgaacacctcaccgaacacgccacgggccgtgtctggctcacccagccatccaacaccccgccaccggccggcatgatcgtcgccaacgccgtcaccaccgcacgcggcgtacgctaccgcgtcatcaccgacaccccgcccgccgacgcgcatcccatggaccccacattggaggacggctacatggtcctcatcgaggaacaccccgaccagcattgacggcagacgaacaagcaccccgaccaccaccgaacacgacaaaggaaaccagcatgaccaacacgacacacgccatccaaaccatcaccgccacaagcctcgccgccatcatgaccctggggctgaccgcctgcatggacggcatcgaacaccccgaaaactaccctaccaacggcagcaagaaaatcaccgcgaccagcaacccacaggacatcagcgccgaccagctcggccacacatggcccctcaccgtcgaccacggcaccgtcagctgcacgcacaacagcaaaggcgatcccgtcatgcgcttcaccgcgcccgacggcacccaatacgccctcaaccagaccagcgacaacaaggacctgcccgacatcaatcagctcctcgccgacggcaaatccaccggcaccctcaccagcttcgccttcaccgtctgcgacgtgaaataatcatgcgcccgctgccggcggccgtgtcgatgtcgaccaccgtgcgcataccgcgagaatcctgtgacgctgacggttcatcatcgtcttgcagtcaggaccggcgcggttccgccgccgttttctccgtaacaatcgcgtatagcaccagtgcgaccagcacgacgagccgggtccaatcggaattacggatgagcagcccgacgagaatcaggacgtcgtagaacagcgtgcgcgcccaccgccacgggtattccttacggacgcgcatcgtctccgccaatccccagatcagggcgcagacggcgatgataccgttgaaccacagcactatgggcctgccctgcggatcggtgtccggcatagcgagattgctgaagaacatcaccagagcacccgtatatacggcctcgggcgcgaccgacaatcttccgccttcaacgcgaggatctgacatgattacctccttattgggggatccgtcaacgctaacgaatcatgcgaaaaaccattatatttgaatggtatgagcggggctcaagcattcacaacatgctgtcaagcaatcgtatgacaagaatcatccgtttacggcatcgccgccggatgaccacaccagcagggcacccgcgagggagacgacgatgacgccgatcacggccaccgcggtgatggtctgtcgcaatatcagcgcggcgataatcacgctcatggcggggtcgatggagaacagcgtgccgaccacgcgcgccgacgtgatacgcccggacaacgtgtccatcgtgtagggaatcgcaactcccagcaccgccgaggctgcgatgacgccccactgggcggccgacacatgcggcgcgcgagtgatggataccggcgaagtggccagcgccgcaaccgtgaccgacagggcgagcccgtcgagcccggtgcctgccttgccgacccggtcggcgaagagcgtgtacaggccgaagcacacggccgagcccagcgcgaacaggtagccggccggattgaagtagccgcccggcgtaaacgagatcaagcccacacccaccagcgcgaccaccgcgcacaggccctcgcgccagtgatgcgaaccggccagggcgaccacgcagggtccgaggaattccagggtgacggccacgcccatcggaatgcggtcgatggccgagtacaggcagacgttcatcgccgccatcgcaagcccgtagattacgatgcccagccattcgcctttcgaccggccagccagtttcgggcgggtgagtgcgagaatgacgatcgcggcgaccagcatgcgcatcgaactgaccggaattggtcccaacgcgccgaacaacgacgccgacagggacgacgacgtctggatacccaacgaccccaccatcaccatgccggccgccgccatcacacggccacgcgccgaacgcggcgcccgaagcttgcccaatacccctcccctgtcacggccattcccacacgacctctgcgccaccaatgatagtgttcggcgaagactcgcgacgtgcggagtcgactttgtatggcgggatcagcggaaagcggcaggctcactcccgcaacggaatacggtgagaaagctggctgccggacgattacgatccgaaacagtgcacccgtatacggcttcggtcagacacgtttcaccgccttgaacagcagacatgcgcttatcgcggcgatggcgacgccgaccggaatcacgtaaccggcgaatttcaccccgttcaacacccatgtggttggtatgacggcgtacagcatcggcgcgtcctcgaacatgccggaactcaccgtaagtccggcgacgatgaagaaggcgacgacgttccaggcgacgagaggactggcatagagtcgcagaacgaagcatgccagggaaaggacgacggcggtgaacgcaagcatcagaatggtacgcgacgaaagcggctcgttgacgacgagcccgacggcaagcccgtacagcaaagtcaggcagacgttgatcacgacgccgagcgacagcgacttcacgctgaagcgaagcaggagccggtcgtggatgctgaaggaacggtacgaggagggcaccctcgcatgggagaagacgagaccggccgcggttacgggaagcgccatcaccatcgccgactgcaccaccgcacccgtgttcccgtaacgcaaaaagaacaacggaaacagcagcacggccacgaaggcgagcgtcgaccagcggatcaccgccacacgctcaatacgcaatagggacttcatttcctctccactccttcgcgacggaaccggctcaacagcacataggcaaccaaaagcaccacgatcgggacgacgaccatcacggggccgacggacgctcgactcgccgcttccgccggcgacatcacggtgccgttcaggttcagcccgacggtccgtagggcgttcgcgacgtagggcgtcgcatagtcgggaaggtcgcccggcaggagaatccatgcatagcaaaggatggccgagacgattccggcggttctgggatcggcggcgatctcgacgatcgagtagatcagggaggtcgcaaggctctgcagcacgacgaagcacaggacagctgccagatgcgggtgcattccggtacccgtcaggaccatgatggcgtcgaagcacagtacgccaatcaggttcgcggaggtcaggatcagggcccggaacacggccctgagcgagcatggcgtccacgcggaatacacgtggcgcggcaggccaccgtagtacgccttcgcgaccctggcatcgcatgcgaagagcagcgaaagacagatcaacggctgggtggcggtgaaatagacgcaataccctccggttatcggggttccgttcgccgcgcttgagatccacgcacccagcagaagggacgagacggccccaaacaccgcggcgaggaaataccacgtgttccagtagtaggcgaccaacgcgcgaacaggggaaacggcgttcaagaccctacctcccctgatacagatccgcgaggttcaccccggtcagatccgtgacctgcacggcccggccgtgacgaatcatgatgcactcgtccgggacgccctggatctcatgaagcagatgcgtggagatgacgacgcagttccccttgtcccggtaggcgcgaagcgtttcggacaaggaggctatgccatcggggtccagaccgttctgcggctcgtcgaggaacaggaacctcggatgcggcacaagggcgaggcacagctccagacgctctttcatgcccgtcgagtagtccttcgccttccgcccatacaccgcgcgattgatgcccacaccgtccaacgccgcctccgggtccacatccagaccccagaacgcggagaccacctcgacgttctctctaccactcaggtaaggaaagaaactgggatggtctatcgccgcggacatctcattgatattcgtccctgtgtacgtgacctctccgctcacgggctttatccgtccgagtagcgtcttcatcaacgtggttttgcccgcgccgtttgccccaagcagacagatgatcctacccgtgctcaaccgcaggttaatgttgctgacgattggggaacccttgtacccgatcgagagattcgtagccgatataactggcataatcacccttcacgaaaggcgggcctgaaggcaaaggtaggatgccttgcccagacccgcgcgttgcaatgtcgccgccatttcacccttcagcggccacaaacgtaacatcatgtcaggcaatcgcatgacggttgctccatgctccctcgatttgccgaaactatccatcggccaaaggaatgaacctgcgcatcatccgcaaggacgatgcatccgactcccatcgcacacttgccgccaccggtctcccccccccccaaaaaaaaatggcgaagggcgggttccagtgatcgtcgcaacgcctggctgactgatgggagggccaggtggacaggtgggtgttcgagggcgtggagtacgcgacgcgtggcgagatgtgcgcggcgcggcggcgccgctacgccgagctgctggaggcgggcatgaacttcacgcaggccgcgcgggcggtgggcgtgtccaaacgcaccggcaaggtgtggcgcaacggaaggacacgatcgaacggcaggaacgagaagccatcggtggactggtatcgttccaccgtggacattccccaaaagatcagttcgaggtatctgagccaggacgagcgcatcagcatcgccgactggcggaaggccggcatgagcgtgcgcgggatcgcgcgcacgctcaatcgtctcgcgtcgaccgccagccgcgagctggtgcgcaacacgaatcccgcgaccggcatgtacgagccgtaccggccccagcagatgagcgcggacggcccagacgacccaagcccgcgaagatccatacggtgcccggcctgctcgcatacattcgtgcaggattgcgggcgcattggagtcccgagcagatcgcggggcacctgcgcgccgatttcccggataatgatgctatgcatgtgtgcgcggagacgatctaccaggccatctacgtccaggccaaaggcgaactgaaaaaggacgtcatcaaggccctgaggagcgggcgcgcccaacgccggccgcacgggcaggcgggttcgcgcaggcccgtttccgcgagcccatgatcatgatcagcgagcggcccgccgaagtcgaggaccgggcgatacccggtcattgggaaggcgacctgatctgcagcgcggccaacaaaagcgcgatcggcacgctcgtggaacgctcgacacggttcacgatcctcctgcacctgcccgacgggcacgacgccaaacacgtccggcaggccgtcatccggaaaatgcaatacctgcccaagctcctgaggaactcgctgacctgggaccagggaagcgagctcaccctgcacaaacgcatctcgaccacgctggacatgcaggtgtatttccgcgacccgcattcaccctggcagcgcggcaccaacgagaacaccaacgggctcctgcgccaatacttccccaagggcaccgacctgagcgcataccccgaggactacctcgacgcggtcgccgaggaactcaacgaccggccccgcaaaacactcggctacaggaaaccatccgagaaaatactcgaactcatcaacacagcatgatacgatcgcaccaatccaagaccgccatcaagagcggcaaaacacacaggtgttgcaaccaccactaaaatccgccaagcccaccttgccgaatggggtgtcgaacatggaatccgtcttggggggggggcgtgcggtagtcgcattcgtaacaacaatccgcttgaatgagctgctgagcaaatagcaggtctacatgcctgctttgaaccagccgatggcgatttgagtgcgattgcgcaggcccaaagttgcgaggatacgggtcacggcacgtttgacggaggcaggttcgacggtgagttgattggcgatttcctcgttgatgagcccttcggagatgagtgcgcagatttcacgctggcgaggggtgagtgcgtcgaaagctttgcgcatttcttgctggcgctggctgctggtgggatgcggaacgcctcgttcaagcacttgtctggtgattcgtggggtgagtattgcgtcaccgttggcgatggcgtgaaccgcgtcgatgaggttgtgcttggtgacgtccttgagcaggaagccgctggctccggcgtcgagaccgccaaaggcgtaatcgtcctcgtcgtacgtggtaaggatgagaatgctgatggtgggccagcgtctggtgatgcggcgagtggcttcgatgccgtccataccgggcatccgcacatccatgaggattacattcggcaatggacgatgctgaacggcgagctgttcgagcgtctcgatggcggatcggccgtcagcggactgggcagtgacgacgatgtcggaagcatcgtcaagcatgagttggaagccaagtcgcgcgaaacgctggtcgtctacgagcattatacgaatcatgcggtgtggtccttttcgttcactccgttggacgggatggtcgcctcgacgacccattcgccgtcttcgtttggaccgtattcgaagatgccgcttgccgattcgacgcggtggaatagacggacgagcccagtaccgtcatccttgcgcgcgtccttgcgcgcgggactgccgtcattgcggataatcacggcgacggtgccgttctcgctgtggttccaggcgatgctgatatgcaccacgttctgtccgtgacgtatggcgttggtgatggcttcgcgagtcacatcgaaacacaaatcagcctgagcttcgtcatcggcgcgcgtaccagtctcggtgaacaccgtgacgatgcccagccggcgtgcgtgcgcgagaatcggccgaatgtcatcccatgaatgctggtctgattcttgggtgtgcgtatcgtcaccgttcgccgctccatcgaactcggtcagtgcgcggacggctttgcgcgtgtcgcccagactctctcgtgcgatttcgttgatgccgtgcagcgcatcctccacgcgtgggtcatcggttttgccggccagactctcagacagtgcgatgattacggtcagatcctggcccacactgtcgtgtagttgaccggctatgcgcgaacggcgtattgcggcatcgcgttggaaggccagctcggctgcccgacggcattcctcggcagctttgtgttcggcttccttggcctgttgcctgccacgtactgcaagcgcgccgcctcccacggctgccaacgttaccactcgactcacccattcggtcgcgagaacgtccggatgcaccatgatggccgacgcggtcatcgacagcatcatgccgatgcctccaacgcacagcccgcgtcccctcgctgtccgggcgaacgcatagcaggcgacgagcgtctgaatcatcacgattgagtccaaccgccagtacgaggcaactattaacaataccgcttcaagcgccaaggcaacggctggcagccagtaacggacaagcagtatcgcactgctggctatggtcatcgccagcagcagagccaatcccagcggatctttggcaaacgtatacatggtgtcggccggcgctccgatcgcatgctcccacagcatcgctgcacattcgaccacggcgatgaccagtggcacggccaggaccgtgaccttattggcctgcgcggattgcggtttcatggctcccattgtggctctttttgtatgatgttgcgtgcatgtcagcatgtgcgtatcgtgtcggccacgctgcggtgtagcgcggggcgaatctgcgtgaactggatgaggaacaatgccagccagcaggccgtgcccatgccgattacgcccggccatgggatttcggccacggggatgccgacgagcgccgcggatcttgcggcgaaaacgcttgcgctgacggcgaccgggatgagcgagagaatgaccgcgccggcggccagctgcaggctctgccagagatacatgcggatcacacgacgtggggacaggccgatgctgcgcagcaatgcctggtcggcgaccatgctgcggttcgacagggcgatgaccgccatgctggtggccagggacacgatgcacagcatcgttatgagcagcagcgagtccgcgtagttcaggctcttcggatggccgcccaaggcgagtatccggccataggatcgcgcgcaggtcagcagggtgaccgacagtcccatggcaagggcgagcggggcaatcgtgttcgtgttgctggcggccttcgcctcggcggaacgggcggcgagcacgccggtcgcggacccgcacaggcgacacacgacacgtccgatgcccaacagaatcggaatcagcatgctgacaaggatgtacatgccgaacgaggcgatgatgccggcccacagcgcgctgttgaatgtctgccccgcctcctggccgaacgcgagcgcccgtggcgtgcccatgccggagaacgccaatgccagcgccgccgccatgacaatcaaaccaagtgcccagtgcgcccaagaccgccaaccgtgccgtatcccgatggctcccgtgccgcgaatcacctcgatgggacggatcttcgctgcgcgcagcgaggggatggacgcgcccaacatgcacgtggccacacccaacagcagggatccgagccacgcggccatcgacggcgtgaacgcaggaggtgcgaacgagccgaatccatcggcgaagctttccgcagccatggcgttgaactcgggaaccgccagcaggctggccggcactgcagccagagagccgatcagggaaccgaacaggctcgccacacccacgagcatccacatgctggcaagcacctgactcgggctggcgcccataagccgccattgcgcgaacgtgctgtgaatacggttgaccgtggccgagccgaccaccgtcaacgagaagaacgcgagtaatgacaccaccacatagatcgtgaccgacaccatgccgaactcggccggatcaagacccgcctgccgcgcggccaatgtgaacgacggagacgaggtccacacgaattggttcatgcatatgcccaccagcgtggtcaccactgcgaccaccagaatcgtgggtacccatcccgtgacattgtcgcggaacacacgcagcacatacctagccacgatgagcctccttccgctgctgcggatacgccacgcgctggaccggtcggcccggttggacggattggataggctgggcgttcaccatcatcgggccgacagaccgcgccgccgcaaccaacggcggcgacccggccggtacgaaagtgcggcgtatgccatcggcaatctgctcggcggtgagtctgccagcgatgtgggtgacctgaccgtcgcgcaggaagatcacgtggtcggccaaagcggcggcatccgtgtcatgcgtgaccatgaccacgctggagcccgcatccgccagctcgcgcagcacctgcagcacaagctcgctgttcgcggtgtcgagcgcgccggtcggctcgtcggcgaacaccaccgccggacgcatgagcagcgcacggcacagggcgacgcgctgctgttcgccaccggacagggcgcttaccgtcgtcttcgccctctggcgaagaccgaaccgggacagcagctgcgtgacctgcacgtagtcggccttgcgatgggcgagcgagagcggcaacatcacgttctcctcgaccgtcagatacggcacgagattgtattgctggaacacgaaaccgatatgcccgcgaatgaaccgcgaacgccgttcctcattcagtgcgtagacgtcggtaccgccgatggtcacccgcccggaatcgggcctgtccaatccggacagcacatacagcagcgaggtcttgcctgcgccggacggaccgacgatcgccgtcaagcccgctccatcaatatccaacgaaacattattgagaacagtctgcgtgtttgcgggtcgggaggcggttcgagcatcgaaccctgtccgtttcaccagtccgagcgcctgaatcggcgtgccggcattttgccaagtcatgaggtagccccctgtcgtgaaagttgacgccgtttttctcaaccttcgcgccaggggcatggcaggtcgaggtaaacacggaaagtgacaccctagggtgacagattccagtagcgttccatgaccggcacccaatatgccctcaaccagaccagcgacaacgaggacctgcccggcatcgtccaactgcccgcctatgccaagtatgatggacggctgctcgtcatacttggttcctccgggaagcgaatatccttctgtcgtttgcggaaacaagccctgccgatgcccaagaccgccagataaagcaggaacatcacgggcacgacccatgtcacgtaccgccacgggtcaatctggaacgtatcgaagacgatgaacatgacgccccacacgttgatggcgacgatcgccagaatctgggcggccgccgaatcgaacctggattcggccgggctggtatcgttcgcgtcggccggaacgtcaggcgtccgcccggcgcgacgcatgaagccgagcgccgcccacacgatggccgccaccaacgccacggccgccggcaccaccagcttccagaactccccgtcattccagccgtaccggatgacggcgcacgtgatggccgtgacggcggccacgcccaatgtggcggaagggggctggtgccgttttgttggactcgtcgttgattccatcaccaccaatcatgccacaagaccgagctcgcgtcgacgatccatgatgctcatgccgaactccgtcttgatccgcctgtcccggtaccagaccatgtagt

SEQ ID NO: 975 - DNA, 14943 bp, Unknown
  R117_24m  MAG No. k141_20477
tctcctgcccgtctcaatttgttggtggcggatgggctggcgtatttgtggacgccgattagcgttcatcgtcttttggaatggcaatatatgaccccggaactggagtcgcagatgctgccggtggcgcaggagttgtgccggtacgtgtgatggcgggctgtccgtgctgctgaccgtatgattccctcacgaaacggtatggcgtattcttaggaggagcagccgtttcgaggggtttcggagatgaggagaacggggagaagggcatggctatggcagcgcaggatgcctatgagcgccaacgggtgaatgttgccgtggcatgggctgtggccgcctcgttatgcgtcgcattcgcggtattcggtttcgatggtgtaatgcgtggtcgtgccgcatccaccgattctgccgtgttccagggtttagtcagtggactcatcggtgtggatgcctccgctaaagatgccgtgaccgtaagtgccgttgtatttaatgcgttcaccgccacagtgttggcattactgtcctactacgccgcacatgtgacggtgaggaccgactggcatcgaagcgtcgattatgccggctccttggccacggtcgttgccgccgcgatagctgcgggcccagcgcttgcccgtattgcgcagattatgtcggttactcgttctgcggcactggcggtcttcctctctgcgacccttgtggccgttatggcggcatatatccaatacgcggcttcgggccgcattacagtagcccttgcccgactgctcatcaccgcagccgttattatcgcgctattcattatcgcagtagtaatattcgccattcccgcaccggtaatcgcagcggcctgctccgtgggcggtgcatggtatgtgcatgcccaagcgaatgtgattttgcgggtgccggaccggtacctcatcgaatggcgtcgatacatgtcccagcgttggacggttcgaggcgcggttccggaaaattcacgtccgctctatacccatgacatcagcgaagacatgactattttttctgccgaatacaccatgggtcttgtggttgggcatctatatattgctgccggatatgttgtgctatgcctcactgtgcctgccgaaccggatctcttcaccactatcggcttcggcgcatattcggtgttattgccctgctatctgttgctccggccgcgcaccgcgggcagtgcgctggaacgtatgcttatgcgttcatgcgcggtattattgcctgcagcagccctgatcacgctgaccaatcatgacgattggcgttggctcgtgacatggttggtattcgggctgatagccgtgggcatagtgatagccgccgccacattggcagtatcgggcggcttcaagtcgctgatgttgtctcgtgtcggcgactgggtcaccaccggtagtcttgcattgatgggaccagcggcgttcctcgcctcaaacgccatggatatgattcgggggtttatgtcatgaccgcagcgcccatgcccattgcttcccaagctcctgcaccacgtcccggtccgtccgtgacccatcccatggtgggggagggataccgttatgctacggtcgggcgacgtatgctcgcgctgctgattgacgtagcatttgtaacagtggtgggcggcgtcactttggcgctcagccgcaacgccatattggccgtcttgtgcgcaatacaggctgtcgccctgaactgggggtgggaggcttgccgcggtcgtaccatcggcaaggcaatactgggcttatgtgtggtgcgcaacactgcggatatggggcagccgggcgctggtctgctacctgccggtccgtggcgtgcgttggcgcgtgtattgatcacatcattgggctgtttggtggcgattgtcgccgcatttatgctggaatggacctcttcactagaccaggtacgtcatcgcggattgcaggatcggctgtccggcactgccgtaattgatacgcgtgtgcagtatgtgacggcaatgtctgatacgggtaatgccatcaccgataataccggtaccagtaccagcaccagatttgactctacttttgatgatgaggatgaagatttggaggcgatggtcggcggtattcttccgccagccactgcgcccacaccctccggccgttcggattcattcagggctttgcgcgcggtacctgctgccatagaaccgtcgtccgtacggcctgcccaggtgcatgccgggacattgcaatcatcgtctaccgccatacaggtgcagtctgtgcaaaccgaatccgttcaaccggtgcctgcggcccccaccatctctccagcagtgcccagccctgtaccgtctgttacttccaatacagcaaaacctgtaattcctgcagtgtcccagactgccatgccgcggcacagcagtggtgctgcaacgattgccatccccacgccggcgggcacgacttcagcgcgagtgcatgctgtgccgcctgcattgccaaccgtcggaacaagcccggtcgtgccatcatcttcggcggcaccaatacccactgggccactgcctgttcccaaggccgttcctcaggctgtgccccagcgtcccgtgccggcaaaaccggcagctgccaaacaggtggcggtattgtatttcgaaaacggcaatggtgtgcatctggatattcccagccgtgctctgctgggtcgccgccccaccagtagcgacccaaacgacgtgctggtcagagtaccagacaccaccggcaccatatcccgtacacacgcattgttggagattgcgtccggccggatgtgggtcactgacttggaaagcaccaacggcacggaaattctgaccgaagacggtgccgtgaaacatcttgaggcgggcgcgcgtaccgaaatagcgtttggcacacgtatattcctaggaagcaccgccataagtgtgagcctgctgagaaacagggagaaaaaataatgagtgagataacgccacaggtatcctcccgcatagaccagcccaaagtgccgcacggcaaggtggtgttgcaggccccgcctgaattggagccgagcgacggtgtcaacagtctgttgaccatgctggtaccgctgttgggcagtgtctccgccattgtgatgatggtcatgtccaattccggtctgaccggttttctgaccggcggcatgttcatgctctcctccgtgggcttcgtactggttaacggcgtgcgtcaacgttcgcagcgcaaagcgaatctcacttcgtcccggcgtgaatacttggcatatttggctgaactgagaaaaaccgttcgtaccgcggccaaaaaacaacggcgtgcggaactgtggaattctcccacaccggattccttggtggccatcgcgcaggaacatgtacgccgctgggagcgcatcccatcggatgatgattttcttaatgtgcgcatcggttctaaagacgagccattgtgcattaccttggaggcgccggagctgcctccgctggccgaactggacccggtctccgcttcagcggcgcaccggttcatgatggcccatcaaaatctgcatgatatgccttgcaccatcgacctgcccaagtacaagcgtatcgaaatcctcggtgacgctgatcaggcgcaatctttagcccgcaccttgatatgtcaggcggcggtctggcatgggcctgaatatctgaagatcatcgtgctggcggcccccgaacagcagcacgcgtggcgctggatcggcgagatgccccacgcatggagcgacgagtccaaagatccggcgcttggccatggcgaagtgatgctcgctggcagcgtggaagaagcgaaccgactgattggcgaagacattttgcatcgcagccggtttaccggcaccgggcaatcgactctgccgtacattctggtggtacgtgatggttcagtgccccagggtgacgcgaacaacagcgatgatgatggcttggtgcgccgcgacggatttgacggcgtcacccttatcgatcttcctgaagagtggggcgatcttgaagaagagcacgtgttgcgcgtcatcttctcccaatcctccatcgaaatgggtctgaacgtggtacgcacttccacggtgaaccagattgagatcatcacatcatcggagcgcgtggacacctgtgccccggacagcctgagtattcaggaagccaaggccgtggcctccagactggaacagttgcccagcgaagaggagaacggcgacaacaaggaacaagcctcccacgccaagaagtcctccgaattggccgatctgctgggcatcgcggatatccatcacatcgacttgaaccgcctgtgggcatacaaaaccggcaaggaacgactgcgtgtgcccatcggcctcaacgcggacacctccatcacgtacctcgacatcaaggaatccgcccagtatggcatgggcccgcacggtgtgcttgtcggcgccaccggttccggtaagtcggaggtgttgcgcacgctggtgttgtcgttggcgttgacgcacagccctgatcagctgaactttgtgctcatcgatttcaagggtggtgccaccttcgccggtatggaaggcatgccgcatatctcctctatcatcaccaaccttggtgaggaagcctcgttggtcgatcgtatgcaagacgctttgaccggtgaaatgacacgcaggcaggaactgctgcgcaaggccggcaacttcgccaacgtatccgattatgagaaggctcgtctcaacgggcgtaccgatttggaaccgttgcctgcactgttcgtggtatgcgacgagttctctgaactgttggccgccaaaccggacattgtcgattccttcgtgaacatcggccgactgggccgttctctggaagtccacctgctcatcgcctcccagcggcttgaggagggcaagctgcgtggcttggattcgcatttgtcataccgtatcggcctgcgcacgttctccgcttcggaatcacgtgtggtgctcggtgtaccggacgcctacaccctgcccagcatccctggtgtcggttacctcaagccagacccaagcaccatgattcgcttccgtgcatcctatgtgtccggagctccgaaaggcgagccggacaccaatccctcgaacttcgacgtggctgtggatcagatgcgtcgtgctggcggtaagcctgcacatcaggtatggttgccgccgctgaatgtgccgaacacgctcgacgagttcttccccgacttgaccgccaccgcgcagtatgggctgatttccccctcccgacgcaaggcggggtacttatccgtgccagtggcgttggaagacaagcccaaggaacagaaacgcgaggtattgagcctcgacctgtctggagcgggcggccatgtggctatcgccggtggcccgttgaccggtaagagcacgttcatgcgcaccatggtggcttcgcttgcgttggcgcatagtcccactgaagtccagtgctatgcgctggatctgggcggtggcacgttcgccggtatggaagacctgcagcatgtggctggtgttgctcttcgtggtgacgatgagcgcgtcaaccgtatgctcgctgaagtggtgagcatcatcaacgcccgtgaacgttacttcaagaaccataagatcgattcgattggcacttaccgccagatgcgagccaagggccaagcggatgacggctatggtgaggtattcctgttcatcgatggatggcagaacttccgcacggaatatgaagacctacaggccaaggtattggatatcgtctctcgcggtctgacgttcggcgtgcatgtggtcatctccacgagccgttggatggatctacgagccaacatcaaggatcttatgggcactcgtctggaactgagactaggtgatccggctgattccgaaatcgaccgcagagtggccatcaccgtgcctaagggcatgcctggccgtggtctggcttccagcaagcggcatattctggtggcattgccgcgcatcgacggcgatcataaagccgactccatggcggacggcatcaaggatctcatcgccaaggtcaatgccgcttggaagggccccaagccaccaaagctgcgtcttctgcccaccatgctgtctcgcaacgccttcctgaccaccgtgccggaacagactcgtaacagtcgtttcgtactcggcgtggacgaagccgacttgaagcctgtgttgttcaaccccgtgcgagcgccgcatatgtatgcgttcggcgactctcgctccggcaagtcctcgttcctgcgtctgattgctcaggaaatcgagcgcttttacgacgtgaccggcggcaaggccaagatcttcctggtcgactatcgccgcgctctgcttgatgaggtgaatgacaagtaccttggccagtatctgaccaatcatgaggaaaccagtcaggcgatgaacgatcttgccgccttcctggccacacgtattccgggctcggacgtcaccacggaacagttgcgtcgacgctcgtggtggaccggctccgacgcttacgtgctgattgacgactacgatctggtctccacttcacgaggcaatccgattcaaccaatcgtgcctttgcttgcacaggcttccgatatcggcctgcatgtattcctgacgcgccgcactggtggtgccagtcgatccctgtatgatccggtgctgcaatccttccaggatctggccgtcaccggtttgctgttctcgggcgatccgaatgagggacagcttattggcaaaaccaagccgaagccattggtgcccggtcgtgtgcaggtggtcagtcgagatagcggcacattcctggcacagctcgcctacgcgccctccagcctgccgcccatggcaccaatgaactgattggcctgaatgtttgattaccgtctagggattgtcattcatctgcgctgtgcttcgcgtctttggcgatgcgcaaagcaatcagcgtgatgatcaccagaatcgcggccgcacctactacggccaagacagcacttaccgtgccatccgaatgcatggtggcctcgaccttaagatgttgtgcctgctgggtgcgaggaggcgtgtacggctcatattgtgtgctgcctggaccgcgcatgccgttggccagcgtgatggtgatggctccatacgggttgatttgcccccacccgcgattatcgtcgcgtgcgtcggggtccgggcggttgccggaagcttcgattcgctgcagccattgcaaggcgttttcatcgggatgacgctgcgccaccaaagccgctacaccactggcatatgcggtggcgtagctggaagatgctgattcggcggaaaagacgcaatccacgcctctcggaatcgtggacagcacggattccccgggggcaagaatgtctacctgctcgccactgatggaatcggatgacgcatggaaggacgtgtccgcagccgccacgcccaacacgtccttccatgcggcagggtagcgaagcccatcctgcgtggacgacgaggtgttgcggttgcctgcgctggaaaccacgagggaacctttggcttgtgcgtattgcacggcaagttgcaaggtgccactgggagccacggtgctttgcgaaatattgatgatctgcgcaccatgatcggcggcataccgtatgccatcagccagcacgtccgggctgggaccgccttgcgaatgactggaggaattatcgatggagttatacacgcgcaccggcaggattgtggccttgggggcaatgcccatcagagaagagccttctatttttctggcggcgatgatgcccgccacaaccgtgccatgcccgtaattatcagtgcggccatcctgaacgttgtctcccgccagattgactccaggcagcactgcgtcgccagccagatgcgggttgttggtgtccacgccggaatcgactacggccacaatgatgccttcgccatccgccagagaccgcaccgtggtcatgccgagcgcatcctcggtccatggtgtgctggtgatgtagttggttttaccgatttcacagctgttctgatcggcccatgccggtgtaggcgagagtgccccggctgcaagcgtgccacatgccagagcagtgcatgcggcagctgcgatgccggtgcgaatacggtgggttcgtgaggtgcgtgttgtcatcgtcatcattgctttcgactggatgccgaagagtcggatgagctgttcgcgtcgggtgtgccctcggtgcctgcgctagtagcagaggattgtcctgacgacgatgttgccgctgcctgatcctgcgctgaaatctgtagtccggcgctattgctgctcaaagccactccggcggagaatacgttgatccaggagcggggtattgcggtgacatcatttttggtaaagcccagtcgcttcaatgtttcttcggtatcgtccggaaccgggtaggccacaccggtgccatcgaccacatacaatgcgccggtggtaccgccggcactgtctaccgtgcgcagcagcgcaccgctgccattgatgatggtggtaccggaatcagtacgttgcgggcggttcttgtcgtcactgatggtcgccaaggtgatgccggcagcggcattatgcgtggtatcggtttggaatttggacggttccaacgcagcgcaagtgccattgccggaattcatcggcgttaattggccatcgggccaatcatcgggaacgatggaaccggtggcattacggaacccggcctgctgctgttcctgtgcggtcatggtaatggtttgcgcaccggcaccgaggctcagctgatacatttccaaggccatgccattcaatggcgagagtgtgccatcggcaagcaccacatatttggtgttgtcgttggaggggtcggcaatcagcgaaccgacggtgtatgatgtaccgcccaccgcgacttccgtgcctttgcccctgacatccaacactccgagatcggaaccgccggcaaacaagtccagccattgcaccggagccttgggagcgttatccaacgtgagttggccgacgccgagaatacgaagcaccgcatcgcgaatcaggccttcctgcggcagacgatgtcgcagaccgttgacaatgaggtatccaatgccatctacgttgaccagcattgcctcattacgactggccggggtggtcacggcatcattggtgatgagattgttggtcgaggcgcgctcggtgtcaagacaactcaccaggaatttcgatacgagcctcgaccggttgggcagaatatccggtgcgcccacaatgcctacgctggagccgatgggaataccttcaagttcgttgtcgtctacggtgataactcggtattcgtctgaggggatgagcagacgtgcgctggtggtgttgattaccggatgcagcacaccgttgacgctgatgaatcgagatgcggtgtctttgcccacaatgagtttgttattgctccagtctgaaggcaggccagggctgatgatgccatagaacacactgatcagaaccatgatggcggtcaggccgatactgaccatcaccggcgtcaggcctttcttaggagtcagctccttgccatccggcataccggaagtgaaggcagtaatgagcctggcccgcgaatagttttgtgcgtcctgcaggtccttcttattcgccatggcccctcctcacaatcccaatgccacgtaggcgagcggcagggtggccaccacacagattacgttcgaggcgtcagccagacgggtcatggcgatggaatcgtgcttggacagctgtgtgccgatgacgcacagcaacgctcccagtgagaacaagcccaccaccaccgaagcccacgtggggtgaaacaccgtgcatgcggcacaagacaggcagatgccggcacctgcggtgataacggtgatcagcatttccgattgtgcatagatgcgcctggaatcaagcagcatggctgcgaacagaaccaaggtaagtgccacgcctgctgggcttgcactggaaacagccagaggcgtgccgaacacgatcagtgcgctggtggcagcgcgcaggtcgaacagcagcgtggagccgatacggtacttattacgcacttcgctgatatcgatgttcttgggcagcgcgaaaatctccgattcgctggtggggctgtccacagacaatcgtgcggaagacaggctgagccacggcagcgcattggcagccagaccgagcagagccactgccacgatccatacgcgagtggaccagtgcggcatcgttacacacacaatgccgagaatcaccagtgctgcgccgataatgacaggaatcaacgcgtacagtctgttcactgtaagcagcaaacatgaaatgccgccggccagcagtaaaccagcaccgataccaacggccgggaacccgtagaacgagggattgaacagtgaacccatgagatgatatccggtcacgccggccaaaagcgaggcgactagcgacagtgccagtgcctgccgatgcatatggcgcgaagccagtaccgtggcaatcgccagtaaagcggctgcggtaatgcccgctacgccagcattgatgatggatagtggggccaatgccagacaaatcgctccgacacccagtagcacacaactgaccaccattgtggtcactgtggtattggcactggtccacggtcgatgagaacgctccaccgaatcggccaccgcctcaaccacatcgtcgtagacgatatcctgatcgcccaaggcgttgacctcgagtttgagacgttcaccgtctcggatggcctgatcggccagcgaagcgggattattgatggcggtttcgtcgtcacgggtcagtcggtagccggcatacaccagagtcggatcgaacacacctagtttcttggcgatatcaggcagcagttcagctaccggaagtgtcgacggaacattgagtttcgcggagcgtttgccatacaccacagtgatggccacgcgcggggatgatgcggaaggcgagggctgattggctggcactcccatcgcaatcgaaggtacgggcgttggcgccggaacgtgtggtgctatgcgcggcggtgccggcatcatggacggtccggcgggcgtgtggcgatgcgacgatgccatagggtgcttcctcttctcaataaactcccaaaggtctactgtattcttgtattctctcacacattgcgggtatcgggaatgccattgtctggtcctagagcagattccgtggcgttttttgccgagtcgggtcctagggtggagcacaacgactacgatggtgcgggtaacgcgatacaaggagtggaacttcatatgccgaagatgtttggaaccgatggtgttcgaggactggccaatagggatttgaccgcacgtctggcgttggatttgggcgatgccgccgtgcgtgtgctcggcgacgccggcacccaagacgatcagcctgagggacgccgccgcgcgctcgtgggccgtgacacccgtgtgtccggtgattttctggcttccgccctgtccgcgggcatggccgccggcggcttcgacgtgatcgatgccggcatcatccccactcctggcgtggcctacctgacctccgtgctcaacgtcgaaatgggtgccgtgatctccgcctcccacaacccgatgcccgacaacggcatcaagttcttcgcacgcggcggcttcaagctgcccgaccagaaggaagacgacatcgaggccgtgctcggccaggactgggaccgcccgaccggtgccggcgtgggccgcgtgagccacgaccagaccaccgccaccaacctgtacatcgatcatctggtggccaccatcgctccgctgaacgatgacaaaacccagcccaagccgctcaagggcctgaagatcgtggccgactgcgccaacggcgccacttccgtggtggctcccgaagccctgcgccgtgccggtgcggatgtaatcgtgatcaacgcctcgccggacggctacaacatcaacaagaacgccggttccacccaccccgagcagctgcaggccatggtcaaggccaccgatgccgtgatgggcgtggccttcgacggcgacgccgaccgttgcctcgccgtggacgaagacggcaacatgatcaacggcgaccagatcatgggcattctggcccgtgccaagcagcgcgaaggcaagctcaaccacgacaccctcgtggtcaccgtgatgagcaacctcggtctgaagctcgccctgaaagacatgggcatcaagaccgtggaaaccgccgtgggcgatcgttacgtgcttgaggaaatgctcaagggcgattactcgcttggcggcgagcagtccggccacgtgatcaaccgcgaattcgccaccaccggcgacggcaccctgaccgcactgaccctgtgcaacgaggtcgtcaagtccggcaagagcctgaaggagctcgccgccgacttcccgcagctgccgcagaccctcatcaacgtgccgaacgtggacaagaaagccgccgccaccaacaagcgcatccaggatgccgtggcccgcgaggaggaactgctgggagacaccggccgtgtgttgctgcgcccctccggcaccgaaccgctcgtacgcgtgatggccgaagccgccacccaggcctacgccgacgaagtctgcacccgcctcgccaagatcgtcgccgaagaactcgcgctgtagcacccttccctaaggaaaagcaatgtttggaaagaacgccaaagtcgacctcgaactcaaccgtgatgtcgaacaacttatcaaaaccggcggcaaggagaagctcctgcccatcgtgcaggccggcgaaccggtgttgcgccaacggacggtggcctaccatggccagctttccaagcgtacgctcgccaaactcatcgatacgatgcacaccaccatgctggaggcgcccggcgtggggctcgccgccacccagatcggcttggggctcgcgctcgccgtggtcgaagaccacgtgcgcgacgacgaggatgatccgcgcgaaatcgcggaattccccttccacgtgatcatcaatccgagctacaaacccaccagcgacaaaaccgcctcgttctacgaaggctgcctgagcttcgacggataccaggccgtgcgcaagcgttggctcgacatcaccgccgaatgggatgatgaagacggcaagcaccacagcgagccgttgcacggctggcccgcacgcatcttccagcacgagaccgatcatttgagcggcgaactgtatatcgatcgcgccgaaatccgttcgctgaccaccaccgaaaacctcgaggattattggtgcgacgacccggtacccaccgaggccgccgaagaactcggcttcgcactatgatcgaccgcacatggctggacgccgccaagggagacattccccaatgggcggcgtccatgcccaaagacgccgacggcaccaccattgactgggactgggtgcgttcgctggacctgatgcatggcatcagcgtattgctggcgcttgctgcagatggtgagcaatatggcgaaaccgcagcacagcctcagctcgggttggaccaaccggaactgacgccacaagctatccacgacgcattgaagatcgattacgccacacgcgagcatctggaatcaatcatcgcccaatgcaacagcacattcatgaccgattacgatcgattcatcggctcctatcgtctgcctcgcgcgctcgcctacgccaatcgtcggctcaacgacaacatcaacacgctgttgcatctgggcgaacagcaacacctatgggtggtcagtcgcgaacggcgggggaggaccaccgttgccgtgctcaggccgtactccggcagccgcccatcgaacgatgaccaaggcatgctgaatctgagcggtgaaaccggtgacgcatctgccggaaacactgctgccgaaaacagcgatgtcaagttccccacaacagtcgccttggacgatatccaagaccgtacggcggcgattcttgacgcacgcgccgaacgacgtaaggcccagcgcttccagaagcgtgcgggcgatgcggcgatggcccgcgccaatctctccggcgcgacttcgccgggtggtgccgcctcgtctggcaacgctaccggccaccatcccaagcccgactggcgcgacgcctatctgcccggccgcgacgtggacgcggtgatgggcatcgacatcgaaaccaccggcatcgatccggcgcgtgactacatcatcgacgtcggcttcgagttcatgaacatggccagtccgcgcccggccggcgaacctgagacatacgcctatgagcagggctattacgccgccggcgacgcctacggccagtcccgtctcgcttttggcgtgccgccggaaaacgcggcgctcggcaacgccctcatcgccaaactcaccggcatcgatgtacgcggccgcagcagcgaggccgggtaccgactcttcgacgaatggccccaagcccaggccggcctgctcgcgcggcttacccagcagccgtacgtggcgcataacgccaccttcgaacatagctggttcatgctgaacgtcgccggatacgcggaaagctaccgtgccgggcgcatcaccatcatcgataccctgccgatgagccggcagtgggaccccggcgcggtacccaccaacgagcatccttacggagacaacacgctcgacgcctacgccaaacgtcagggcgcgcttgattccgcccacaacgaacgccacttgggccttgaggattcgcacatcatgctggtggccatgaaacaccatctggcggcgctgaaagcgcaa

SEQ ID NO: 976 - DNA, 6620 bp, Unknown
  R117_24m  MAG No. k141_20968
actgatcgaacgcgcgtgttccgcctacacgcaagcaatccgagatggacataccgatccattgcttgccatcgccatgttcattctcgatttcacctgcatacatccgttcaatgacggcaacggccgcatgagtcggctactcacgctcctgatgctgtaccgcaatggctatatggtcggcaaatacatcagtatcgaacaccttatcgagcaaagtaaaagcacttattatgaggcgctggccgcaagcacccaaggatgggacgacaacgccaatgattatgcgccattcacgaactacctgcttggcatcatactgtccgcgtgcaaggaattcgacgaacgcatcaatctcacggcaggcggcagagcgcagggagcaccgcgagtagccaccaagggaatgcggattgaagcactgcttgatcaatccctagtgccactctccaaggccgatattctcgctcgcatgcccgataccagcaccaccaccattgagcgcacgctgaaatcactgttggactccggtacgatcatcaaaatcggtgccggtcgcagcacccgctatgtgaaacgccgctaaacgcatccttgtgcgcaacatctcgtcactcttccggcgctccgctggccacgcgaatcatcgcgtactgggactcgtagaggcggtagtacgcgcccttggcggcgagcagctgcgcgtgcgagccgtgctcgacgatctggccgtgatcgatgtagaagatctcgtccgcgttctcgatcgtcgacaggcggtgcgcgatgatgaagctcgtgcgccccttgagcagatgctgcaggccggcctgcatcgcctcctcggtgcgcgtgtcgatgttgctcgtcgcctcgtccaggatcaggatacgcgggtcggcgagcagcacgcgcgcgaaggcgatgagctggcgctggccggccgacagggtcgatccgcgctcctccaccaccgtgtcgtacccgtcgggcagttccatgatgaactcgtgcgcgtgcacggccttcgccgccgcctcgatttcctcgtcggtggcgtcgagcttgccgtagcggatgttctcgcgcacgttgccggagaagatgaaggtgtcctgtagcatcacgcccatctgccggcgcagcgatgcgagcgtcacgtcgcgcacgtcgtggccgtcgatcgtcaccgagccctcggacacgtcgtagaagcgcgacagcaggttgatgatcgtcgtcttgccggcgcccgtcgggccgaccagcgcgatcgtgcgccccggttcgacgtggaagtccacgaggttgaggatgttacggccgtccttctcgtagcggaacaccacgtcgttgaagtcgacgcgcccgcgaatctgcggcaggtccgccgcgtcgggcttgttgcggatctccggcgtgacgtcgagcgtctcgaagatgcgctcgaggtacgccgagcaggtgatgagctggttgtagaagttgccgatgttgatcaccggattccagaagttgttcgcgtagccgacaaacgcgatgagcacgccggtggtcacgttcacgcccccgaagcccatcacgccgacgaagtagatgaacgagatggtcatcacggagatggtctgcacgcccggccacatgaggaactggatgtgcacggcgtgcatccacgcggaacgcacctcgccctgctgctcctggaaggtcctgaactgggcctgctcctgcgcgaaggtctgcgtggtcttcacgccggcgatcgactcgtggatgtaggcgttcaggttgctctgcttgttggagagcttctggaaggcgcgccgctggaagatctgcagcacgcgcacccagatgatgagcaccgggaacaggatcaagctccacagggccagctgccagtcgatcacgaacatcacgatcagagtgatcacgaaggtgaacacgtcggagatcacgttgatcagaccggagctcagcgtgtccgaaagcgtgttcacatagttgaccacgcggatcaggatcttgccgtgcgggcgcgaatcgaagtagctgaagggcagcgtctggatatgcgtgaagatatcgcggcgcatgtccttgagcatgagctggccgacgcgcgtgatcgccaccgtgcggtagcgcagcccgaactcgtacagcacgatcagcgcggcgaggattacggcgaggatgccgagcttgccgaggtccttgttcgggatcgcctcgtcgatcatgatcttggtcaggtacggcacggcgacgacgatgcagctcatcgagatgacgacgacgagaatgcgcgccacctgtgccatatacggtttgatatatttgccgacgcgagcgatgtcgtggaggttgatggactcctccagctcctcatcctcgcggaatgtattgcgttgtgccataagtcctcttctaaaacccctgtgcggcgccggactggagtccgagctgcttgtggtagatgtcccagtagcggccgtgtgcggccacgagttcggcgtgggtgccgcgttcgacgatacgtccgtgctcgagcaccagaatcaggtcggaatccttgaccgacgagatgcggtgggcgatggcgacgatggtcttgccgccgtccatctccttgaggtgcttctggatctccgcctcggtctccatatcgacggccgaggtcgtatcgtccataatcaggatcgacggattgtccgcgagcgcgcgggccagcgacaggcgctgcttctgcccgccggacaggcccacgccgcgttcgcccacgacggtgtcataaccctgcggcatcgacctgatgaaattgtccgcgccggcgatctgggccattttctggatatatcggtcgtcgctatcatcgctggcaccaaaaccgatgttgccgccgatggtgtcggagaacaggaacgtatcctgcgccacgatgcacacctgcgagcgcaaggtggtcagcggccagtcgcgtgcgtcgatgccgtcgatgagcacatggcccacggtcgggtcgtagaagcgggagataaggctgacgagcgtggacttgcccgcgccggtttcgccgaggatgccgagcttggagccggcgggcacggtgaagtcgaggtccttgaggatcggggtctccgggtcgtccgggaaggcgaagctgacgtggtcgaagcggatgtcgcccttgatgtgcagcgggcaggacttgcgttcggcggactgctgggcaccggatgttccggaagccccgggcgctccggtagcctcatcatcgtgcttgacttgctcgacgatcgtgaccgcctgcttgacggcttcggccgcgtcgggcttctccacgatgcgcggctgttcggtgagcagcttacgaatcttgatgcagctggcgttgaatcgctgccagtcgttgatgagccagccggactggcgcaccgggccgtcgatcatccacaggaaggagttgaaactcaccagattgccgagggtcatgtagcccttgatgacaagaaagccgccgaggccgagcgtgatgagctgcagcgagaagccgaggccgtccagccaaggcatgtacttgcgcgagttgtaggccagggccatgttgcgctgcatgtaatcgtcgttgtgctcgtcgaacttttcggtctcgtacggttcgcgcacgaatgccttgaccacacggttgccctcgatgttctcttcgaccatggagttgagggaggccagcgagttgcggatggcgaagaacagcgggtgagcgtgcgtggacaggccgcgcgtgagcacaaaaatgaacggcgtgacgcaggccaggacgagcgcgagtcgccaatcgatagcgaacatcacgcacagggcgcccacgaacatgaccacgcagtcggcgatctgatagctcacccaactcaggcagtggcggatcgcgtcggtgtcggaggtcaggcggctcatgatgtcgccggtgcgtgtgtggttgaagtacgtgaagtcgagctcgtgcagcttctcgtattcgtcggagacgaggcggtagaccgagttctggccgaaacgctccatccacatctggtagccgtatcgcgcgcccacgcggatgatggtcatgaggatcatcagtccacacagacgtggcagttcgtcggcatgtccgccgacgatgacgcggtccacgatgataccggacagaatcggaatggtcagggccatcgtgttgttggcgatgaacagtaggagcgcgcctaccacgcggggcaggtctggtttgcagtatggcagcacccatttgagattgcttgcgctggtatcgattcccggatcgacgtacatgtgaggagatcaccgtttcttggggattgtttgcttgtggtatggtgcggcatgctcctgcgccgcacgcggcaatcgctgccgccgcgattcacgatcagccgtgcttcgcactgcgcctgtcattggccgcacgaccggagctctccttcaccggtcgaagcacgttcgactttcgcaaacgcgtactagtctagacggcctgcgtccaatcgcaacagcctacaaccctgcgtgttccccgcattagcaacgcggcacgacccgctaagcgcaacattccccggaatgtgtcgctgcgcccccaaacaggcccaattcgcgacacattccccggaatgtgtcgcgcgaaacgttgcgcatgcggcaatgcacgctcgagacctgttgcataccagtcgaccaaattatagaatcataattaagtaaattacgattctataatttgcgcgtgtgtgccagggcagacagcaaagcaaggagacaagggccatgttcgtcgggcgagataaggagctttcggcactggaacgccgctggagctcacagcagttcgagtgcgtcgtggtctacggccgtcgccgcgtgggcaagaccacactcatcaaccgcttcctcgaagatcgccccacgattttcttttcggcaatcgaatccagcgcttccaagaatctcgaatcgttaagccgcagcattgctctgtatgaaaagggctcagaggcgttcgagacaacgcccgtataccgcagctttgaatccgcactggaagcggtgttcgcgctggccgcaaagcaacgcatcgccttcgtcatcgacgagtacccatatctggctaaagcagaccggaccatcaattcggtcctgcagcatgccatcgaccgccataaggatgacagccagctcatgatggtgttatgcggctcttccatgtcgttcatggagcgccaggtgcttgggtatgagagccccctgtacggcagacgcaccgctcaaatcaaagtggagccattcggctacgccgatgtccgcaagttcttgccaagatacagcaacgaggacgccgccactgcttacggacttaccgacggtatcccgcagtatcttcggcaactggacgacggcatcagcatccgagacaacatccgttggaacatcctcgacccaagctgctatctgtttgaggagccagacaacttgctgaagcaggagctgcgcagtccggccgagtacaacgccgtaatccagaccattgcctccggggcatctcggtcgaacaccatcgccaccgcatgccatatggaatcgtcctcatgcgccacctatttgcgcaatctcatcgatctgggaatcgttcgcaaggagacacctttcggcgaggacgctcctcgcaagacgatctaccgtatcgaggactcgttcttccgattctggtaccgatatgtgccgaacaacatgtccctcattcaatccggtcatgccgatctcgccgccgaccgtgttatgcgcactatctccgactttatggggcaggtgttcaaagacatctgcgttcagtggatatggtcccataacggtaccgaggcattgcctttcctcatgcttgatgccggacgttggtggggcgccaatccgaccacccgcagtcaggaggaaattgacatcgtggcttcaggagaaaaaccgaaaactctcctattctgcgaatgcaaatggcgcagcgtgccatccggtctgcagcagttggaagtgctgcgcaatcgcgccagactgctgcaccccgaaaccagccattacatgctgttctccaaatcaggcttcgacgagcatgtcgccgcccgcgcggcgcaagacggtacagtgacgcttgtcgattttgcggatatggattagtcggttcactccattgcggacggtaagggtgaagtaacaggctgggtcaatggaccgaaccgctagaccgggcaacagacccaatccgtgacacattcccgggaaagtggcgcatgtcatatcacgctcaaacaacccagcatgtatatgggcaggtattcggctcgtccaacagtctccgcgttgccatcatggaacacgtaggcatgtcctcacacgcttgtatctcgtcaagaaacagcagagtcttgcccggcgtaatttccgcgccggaaagtaccgataaccgcagtatcaggtcttcggtgtccttggccttgcttaccgtttcgaccgcctgaggcatttcgatgaaattcacctcagccacatgctcataatggtctgcaccgaactgc

SEQ ID NO: 977 - DNA, 12218 bp, Unknown
  R117_24m  MAG No. k141_21254
cagcacggccgtctccggactcggtccatcgtcacgcggttcgggcgcatcgtccaacgcggtcacattcgggcgtacgcgccgcacgcgcatgtagatctgccgtttcgcgatgcccagcagccaggacagcaccttcgcatcaccacggaacgccctcgccgaccgccagcagcccagccagacgtcggcgcacacctcctcggccgtgccggcatccggcacgcgcacgcgcacgagcgcccgcaccgccgcagcgtgacgcccatacagggtctcgaaggcgcgttcgtccccggaggcgacccgcgcgagcagatcctcgtcgcgcatcaccgccccaccgggcgaggtcatgtcatcctgcgtatgcggctccttccacggcacatcgtaaacaaacgttcattgatgtatgtagctagaaacgaaccgacggttcacgacacgagcaacgacacgcccggaaggcatatcggattaagttgtgtagaagaacagaaactcacagaagaaatcgttgcgcgcgtgcattaccgagtcccaagcctggctagttcttggcaggaatgctgacatccagctgccagtgggcttgttcggtgtgggtttggaaggtgccgccgtgtgtttcgatgatggtccggtagcggtcgaggccgctgcccaggccgagtcccatgtcggcgggtgtggtggtgtcgctggcggagacgtggatggcgtccgtgtcgaaggtgacgcagatggcgtaccattcgccccggtcggcgtgttcggcgatgttcgcgtacagttccgccggcaagcccgacagcagtcgcatggtctccggcgtgagcggccggtgtggttcggcgagcaggttgtcgccggtgaatcccggggcttcgagcctggactcctcctcgtcgatcagcgattgcagaccggcacgctgcgaggcgatgccggcttctgcgggcacgggccgactgccgcactcaaatcgccatcggccggttcaaagcaggatgtaaacccgctatttgcccaacagttcgtcatggctgccggttcgcatgaacatggcggtaccatcatcgcgaatccatagaagcagccagtcgccggcattgccgatgtggcattccagtacgccgtttagatcaccggtaagtgtgtgggtgcgatgcctacgcctcaatgcttccttggagtccgccgtgtcctcaagcaccagacgaatgacttctttcagcgggcgtaaatcagcgtgcttgcgtttgagcttcttgatatcttgctggaatgccgccgtgtaatccggtttgagcattgatcagattcccaacgaatcgaacatctcatcggcactgttgaaacgaggtttgccgtcggcgagcctgttcttcgcctcgtcaagggcctccatggtttcaggcggcacggtcgtataggaaaggtttaggggaatgcgcctctcccggacaatctgcttgtagaaggcgcgggtgaccgaagacaagtccagaccgagatcctcggcaatgtttgcggctttctgcttggtgtccgcatccacgcggactgtgacggatgccatgctcacattaacctccaacatcattacgtaagacaatagtatgtatttgtatgctaatagtcaacattctgcggttgcggcatctcgaccatggtacacatcccgcaagcggattgtttaccggatgcaatcgatgatcggaatgccgaccatccagctgtcggcgggcttgtccagaatggcttctggttcatcgcaacgccagtgcgggttgcagccgtatggctttgatggccggggcaagagagccgacaagcgaggtgacgatggacgcacaggccgcaatcatcgccgccgtatatgggtatgcgggcggttccagcggcgagtcggcgggcatcatccacagaattgcccagaccagcaccgcggagatgagcaccgcggcgaaggcgatgatgaggccgagcagcacggacgagccgatgacctgtatggctatgctggctctggtcgcgcccagtgcgcggcggatgagcagctcgtgcgagcgttgctcgatgccggccaatccgatgttgatcatgccgatggcggataccgacaacagtaatatcgcggtgacggtgacgccgagttggagaaaaccgatgacctgctcgtaatcatcggcgttgtcggaacggttccatgacgatatgctgccggtcccgacgtcgaacaacagatcgtccaacacggttttggcgtgttgatcgtccacgccttcattgggatggacgaggatggtcagcccatccggttcccaggcttgcggccagtagcgttgcagtgtggtcgcgttgacgtagatggtgggtgtgtccgtcccgtcggcgatgacaccgttcacccgtgccggcacctgttgcggatttcctgtccgggcgagtgccacggtgccatcgtgcacgtattggcgggcgctttcgttgactgcggtttccagcgtggcgggttcgtccgctccggtcagccatgtgccctcgatgatgggggcgggcatgattcttgtccgttcggcgtcggtgatgatgatggtgacgcggcgtatctccgtgttgccgtcaccggacgacgcccatatggcgaggtcgttgaggtgatattgcgccgatgcgattcccggacggaaatgcgcgaggcgttcctgcaaagccgtgacgacttgtatgttcaccgatgatggcacgtcgacgatggcgctataggtgggtgacttgcctcccagtcgcgcgttgaccgcttccagatagtcgcgtccgagcgtgccgacgagaacgccggcgatgagggcgatgatgccgatgaacatcgacagggcggtgaggctggtacgcaacgggttgatgcgcagatccttggcgatcatgcggatcacgacagtcgcccccctgtcgatcgtcagtcggcgttcgcatcgggcggcgagctgcgggtcgtgcgtgacgaggatgagtgtgaccccgagttcacgaacatgtcggaacagtatgtcggcgaccatgtcgccggtttcggtgtcgagcgcgccggttggctcgtcgcagatcagcagatcgggatcgcccaccagcgctcgggcgatggccacgcgctgctgttcgcctcccgacaggcgcgacggcatgctgcacaccgtccggctcccgagcccgacggtgtgcagcatgcgcgaggctcgtcttctgatgacccgcagggggatgcctccccggtattgcaatgggagtgccacgttctcccatgcgctcagatgcggtatgagggagtagttctggaacacgaagccgacatgccggcagcggaagcgcgcccggtcggcgtcgttccacgcggcgcagtcccgcccgtcataggagagcgttccgtcatagtcgttgttgagcagcccgacgatggaggcgagactggttttgccggatcctgatttcccgatgatggcggtggacgttcccctctcgaacgatgcgctgacatcgtccaccgtcgtcaggcgttcgccgtcgggcagccggacttcggcgctcagatgttccaaccggatgagtgtgctcatgattgcgctcccggtgtgagattcggagctgtcgcggacaccatgtcaccttcctcgagaccgtcgaggatgatgatcgacgtgccgtccgatgcccccaacttcacgttcacggtggcgaacgaatctccgtcacgcctgctgacctggccggaggcgagcctgccggcgactgcggtgacaggcaggatcaaggcgtcctcgaccgccgtcgcggtcagtaccacggtggcgttctgcccgggacgcgcctgcacgtcctttgggaacaggcattgcagtgtgcgagtcgattccgtcccatgcgcagtcgtcgccgatccggccgtatcttccgctgatgagggcggagtggcgacgccgtcattcactaccgcggcacagtccgtgggcccctgcgcgtcggtgatctggaatcggcccgtcaacggctggtccgggtctatggtcgccagcagcgcggtcgcgtccacgctggcgctcatgccgccataccgtatcgagaacagcggatagtccgcggccatgtcgttgtcctgcgcgaccgtttcgatcacgccgtcgaccggagccgtgacctgctgatcgccgacggtacccaacacgtcgcccgcatgcacgtatgctccttgatcagtcgtggagtggaaccagcctttcgccggagtcgtaagcgagaacacaggagccacctgcacgccggtggaggaagaggataacggcgtgatgccgcccctacgcacctcgaccgtggatgctggccgcttcgccgtggaggaggcgtcggacgatggcgtccgcgacggcgagcaagccgtcatcatcgcgcacatcgtcgtggccgtcacgcacgccaacaggcatttgaacggtgcgatcgcattcatttcgtcggtccgttctcatgccggtaccatgtgcagtccgtggtgtagaagtcccgcatggtcgaatagtcgccgagttcggatttgccgatcacatcgttctcgtatatgccatccttgtcctcgtagtagttcttgaaccagtcggtatccagcagcttgcgcagctgctggagggcgcctcgggctgcttccgcgttggtctggctgttgtcgagaatgtcgcgttccaccgagcactgccagtagacatacgcctgtccttccccacttcccttggcatacagcgaggacgcggcctgcgccttgggtatattcgctggaaacgcatcgccgttcatcagttcaaaggggaaatcctcgacggtcgccttgtattcctcgttcgcctgctgccaggtcagcatgccgccacttcccgaggtgccgccgttcggagtcgtcccgcaaccggacagcagcagcatcactgcggtcagaatggcggccctgcgtcgtgttcccgatttcatcatcatgctccttcggacgattgcacaactgtcgccaaccattagcccacagacggcgatccgggagcaaaagactgtcatgcgcgcgcatgacaacgatacgtcgaggagcatgggatgcgcatacgatgggtggcatgacagacctatcggactcgcataccatctccatcggggtgctggacaacgattcgctcgccctcaacgccatagccgtgatgacgagccgtctctccccgcggttccacatcatctggagcaccacgtccccggcgatggcattgcagcgctgcatgacccacggcgcgcgacccgacgtgctggtcgtcgacatggccttgggaggcatcaccggcgcggacatatgcgccagaatccgtcggcgcactccgacgatcggcttggtgtgcgtcacctcctatgaccttgatccatatcggcaagacgcggtcgaggcgggcgcgcaatgcctgatagccaaagatgacatcgtcaaagagctcccgcaggccatacgatgcgcggcacagggcgagcccgtccccggcaccggattccccaccgcacgggaagccaatcgcaaactcaacgaaggacacgcgaccgagggccggctgccggaaaacgacaagccatcgctgtcctccagggaacgggacgtactgcgcctctacgcgcatggatcatccaccgacgagatagccgcgctcctgaatgtcagcaagggcagcgtcttcacctacgtcaacagggcatgccgcaagctccatgccgccgaccgcaaggaggccctcgccatatgcgcccgatacgatctgctttgaaccgtatacaccacccagccatactggccgcggggctggtcctcgcagtggcgatccccgtagagatgggcgtgtactcatcccagaacctgctgtcatggtcgaccatacgcatatcgctgctcgtcgccgtccctgtgcgccatgctcggagcggcaccggtatgggccgcctgtctgctgttcgcggtctcaggatacgcgttgctgtggctgttctcgccgttgacgaccatcatgatcgccgcactgacctccatagcggtcctctcgttcgtcaaaccccgccttggagccgcttccgcactggcggccctcgccgccctcgccgcgaacaacatgcagaacaacctcacctcgtcgaacatcgtaggcatgatcatcatgtgcctatgcccattgtcgctggggttcagtctcaacctgctgttcgcccaacggcaggcgaccgcgacactcaggcaacgactcgaccgcgaacacacggcgcgtcacctgcacgacaccatcagcaacgacctcgcctacatgatcctgcgcatcgaccaggcaagccgcagtgattgccccgccgatcgggagcaatatcagcgccaactcaccgatctgcgcgccatcgccgaaacggcgctcgaccacacccaccaggtgatacgacaacttgaacgcaccgacaaaccagacgatcgcagccgcatcgtcaaaacaaataacgacgacaaaaccgacaggaaaatcgaacagcagcgtgaacggcttgacggcatcattcaatcgcaacgacgtcgccttggcggcctcggattccaaggtgacgacatcctcgggacgttcgaccatccactggcggacgacatcctcgaccttctcgaaggactgctcaacgaactgtacgcgaacatcgccaagcacgccgccccgcacgaatggtacgccgtcacgatctccttcgaccggcggcacgtcatcatttcggcaagcgacgtactaaaggacgaagcggtacggctcggactcggcagcggcctcaagagataccgaaccgttatcgaatccatgtccgggacgttcgacatcaccgatgattccgacaactggaacgcgaacatcaccattccattgtctgtaacacgccggtaaagggaatgacggcctccagctgccagtgggcttgttcggtgtccggctggcttgcgctggtgtgtgttcttcgagcgagtcgatgacctcgtgcgtgtggcccatggcccggctggcggcgtcgcgcaattcgtcgagctgttgctggtattcgtgttcgtcggcgggcatgccgtcggtcccggcgtgaccatcgggacatccagcatgaggattacgcccgtgacaagcgccggccacaggaaccggtccgggcggaacatgccgccgaccaagccggcaagcacagccagagccaacatgatatcgcgcacggtcgcggtgccggggacccgtgccgccatcgagaacacgtactccgcgagcaccgccacggacaatacggcgcaggacgccgcgatcaccggatgcccggcatgccgcaggccaagccggtcggaaagccggggcagagcagatcgtatctggcgcatgcgtccagcacctccttgcggctggcgactcccagcttgtcggccacgcggtgcacgtacgtgaacacgctgcccgtcccgccgctcctgcgatggatgcgccggcacacgtcagcgcccgtgatttttttccccaacgccatatccaacaccagcgcatccggcctggtatgcgggttatggcaatgctcgatcgccaccgcgggcgaacccgtgcccccgcattacataaaagtccttggatacggccgagatcatcgcgcacatcgcatccagggcgaacggatcattgtccaatacgggcgatacggatcgaccgcgccgcagccccggtcatgttatcgtgtcccatgccgctcatcgtggccacggtcgcagccggacaaaacctgctgtcatgcgattacttgacacgtgttgcgcttttggccatgcgcaggttgaatgggattgcgccacgaaaggatatgccatgaacgatctgctgattatcgacatgctgcccacgtacgggctgctgttctacctgctgatctcggtattcgtcttcgtgggatgccgtggtctgcgccggaggacctcggatcgtggcctgctgcgttttgccgtaggcgcgttcttggttgtttccgcgctcggcgccgtgttcgctgcgctggtgtatatcatggcagcgcctttggcgcagccggatatggtcgacttctaccgcacgtaccggtcaggagctctgatcttcctgctgggattgttcatcatacaatttgtcttcggcgtcgctgccgtgtatcggggaaagtaacctggtatatcctgcgataaacgcattggcagacacttgctgcctatctgtaaacacaccctagtaaggcttgcggccgttggtcgagcacagtagtagtgtggtctgctgtgtcaacaggaggagtgtgaccaatgcggctgattgagacatggctggcggaccaggaacgcgcgtttgacttgttcgcgaaattcccggcggaggagacgggattcgagaacccagcggccggcatgaatcgtgaacggttcgccgcatatgtgcgagggttgcgtgatgagtcgcttggcgtcggcctgccggacggctgggtgccagccaccaaatacattctcgtcaacgatgagggcgactatgtgggcatcttcaacctgcgtcaccggctcaccgacttcctgcgcaacggtccgggccacatcggctacggtgtcgcccgcgaataccgcggccacggctacgcgaccgccgggctcaagctcacgcttgccaaggcccgcgagctcggcatcaaggaggcttacctgagtgtccacaaaaccaatccggcaagtcttgcggtgcagcagcattgcggcgcacgtatcgaccatgaggacaagacggaatactacacacgcatcgccacctgcacggagagcgatggcctctatgcgcgaggcgattgacggcgcctcttgcgtgtaaatggccgattatcaatcggttttaatcgatttcgcctcggtcgataaagtcgccgtcgaggaaccaataatcgtgcggatttccgcgtagcgccgtgaacggcgtcagttccacgccctgcgccgcggttttgctcagcagataggcgcggataatccacggatactccagcacgcccgacttgagggtgatgatttgctccactctgctgccgctgacgccaaaatccctgccgccgttcggcggtcagacccagccggctcatgttctcctgaaattcgcggatagtcgccgcgcgttgctcactgttcaaagacatggcttcatgaatgttgcattggcgccttaatcatccatagttaaggcaccacgcaacatacgattcgcttacgcagccatccgacgatggttgggatagattgttcggcgaagcggtctatggcgtcggcggtgacgtaggcgtgggcggtgaggcgcaggtacagttcgccgccgaccgcgctggccgcctcggatacccgacgctccgcgtaatcggcaagatcggacatgtaccggcgcacggcatcacagccccacagtcgctcgatctcgcgcagggactcgggcgcggcgatcggaccgtataaatcctgggtgccttgctcatcgaatcgctccgggaacgggtcagcgaaaccccacgagtcgatcagtggccacaaatcctgaccatcctgaccgccttcgggcggaatcaccagcaatgccgtgccacgcggcgcacacgggaacttatgaaaattgccgacccaccaatcggactgcagtccgccggccggatcggccagttgggcgggagcgtgcgcgccatcaaccaaaatgcggatgccgcggcgatgggcttcggcggcgatgcgctgggccggaaacagcatagcggtggcggaagtaatctggtccaacacgatgaacgacgtacgctcgctcatctgcgcggtcacggcgccgaccacgccatcctcgtcggcgtcaatggtaactggtgcatcttcctcatccatgcgaatgagacgaatcgcctttcatcccaatgatttcgctctcatggctgatacccgcgtgccgtcatgttccgtaccttggaatcagaagtcgagagtcaaggtccgaaaccgaacggagcgggccgaagcagggagcattgaagatgggatttcttaagaacttttccgaaccgtttgcgttcgcgatggcgctgtggccgtttgtgtccatgctgctgacggtgccggtgctggcgttgctgtatcatcgcgacaatcgcatccgactgtcgtcggccatagtggcgtatggcacggtgctgtacctgctcggcctgctgtgcttcacactgtatccgatgccggccgatgcggcagcctattgcgccgcgcaccatctgacgccacagctcaatccattgcagttcatcggtgacatccgtaccgatggtctcaccgccgtactgcaaatcgcgtttaatatcgtgttcttcctgccgttgggcttcatcatgggccgtatctggcgttggccgctgccggttaccgcagtactgtcattcgccacgtcgctgtttctggagacgatgcagctgaccggcctcatgggcgtgttcccgtgcgcctaccgtctgttcgacgtggacgatctcctgtggaacacgaccggcgcgctgatcggattcgcactggccatgctttcgctgcgcctgattccggcgcgggtcgccgatatgacgccgaccaccacacctggcttcatgaggcggctgatcacgttcatcatcgacatgacgctgatcgggttcgccgtgatgccgacgcatctgttcgtcatgatcgtccgctcaaacctgccctcgggctccaacggctcatggcagtcgatggaaccgttcgactggaccggctcgatcctcttcctggcggcgctcatcctcttcgagggcgtggtgccatggttgcgcggcggctgcacgttcggcggcagtttcacgcacatgacgatagagacccggccgcgagaaggctggcggcgtgcggcgttctatgtggcgcgtatggcgacgctaatcatcgtgctgccatggcatagcggcggattcaatctgctggtgttcatcggcctcggcatcttctggctaatcaagcgtcagatgccgtacgacctgatataaaccggcgctccgctgcttggcgttacaggaaaacctccgaccactggtcgggattcggaatgctgcgcagcgggccggccaacgatacggccaatcccgctacggaacagaccacggctacggccatcaccgccgtgaaaccgagatctggctgttgcaacagccagccgaccatcgccgggcatgctgcgcccagtatgccgaccgtggtttcaaatacggcagaagcccgcccctgcatgttgtcgggtgtcttgccgtagagaaagcccagcagaccagcgttcaacgcggggaacggcaggccggccagaatctggcagatcagaatggccgcgtagctgtgcaggaatagcagtggcatctggctgaccacgaacaacgccagcgcgcccgcaatcagtttccctgtgggaaccatatcgactagcttgttggccaacagcgagccgaccaaagtactcacgcccattgccgtgccgagcagtccgatcatgaccgcgttggcgccacgggcggccaacatgatctgcgcgccggtgatactggctacgcaggcgatgtcaccatagcgccgagcatgattgcggataggaaattccttttggtcagggcccatcgccagccttcgaccaagtgcgtgggaaatggcacaacagaagtgccgtgggcccaaacggcgaccacggcttagcgcgacgagtcaacgcgcattagctgtctgcgaacgacaccaacaccttgtacataacaatgcccctttgcaaaaaacaaactccaattattgtaccagttcgagcatagaaccaggcgcgtcactgggcacaacataatcggccatcaatggtttctcggcttcgaggggctgatttcgtccggtggagacatctacttggctttcgaggggctgctcaaacgccaaaccgcgagtataaacggctttgcggcaacgccattacgccattgtggagccttgtctactcgggcatcagccccttgaaacggagatagatctccggcaagtgccaaatcagcccctcgaaatcgagttaggcgttgttttcgcg

SEQ ID NO: 978 - DNA, 4466 bp, Unknown
  R117_24m  MAG No. k141_22183
agccatgactatggcgcaatggcagactctttccgaccgtatcaacactgtggcaccgagcgctacgctcgccgtcgattccaaggccaaggccatgaaggccgccggacttgacgttatcggcttcggcgcaggtgaaccgaatttcccgacccccgcaaacgtggtcaaggctgcggcagatgcctgccttgacccaaagaattacaagtacacgcctacgccgggcctgcccgagctgcgcgaagcgattgcggctaaggtgctgcgcgattccggctacgaggtgtccgccgaccaggttgtggtgaccaacggtggcaagcaggccgtgtatgaatccttccagatcttgctcaacgatggcgatgaggtcatcatccccgctccgtactggaccagctatcctgaagccgtcaaattggcgggtggcgtgccggtcgaagtattcgccggtgccgacgtgaacttcgagccctcgcttgaggcgctggaagcggcccgtaccgagcgtacgaaggcaatcatcgtcaactccccgaacaacccgaccggagccgtctggaagccggaaaccgtggaagcgatcggtcgttgggccgtcgagcaccacatctgggttatctccgacgagatctacgagcacctgaactacgacgacgcgcgcaccacctacattggtgccgccgtgccggaatgccgcgggcagctgctggtgctgaacggcgtggccaagacctatgcgatgcctggctggcgcgtgggctggatggtcgcgccgcttgaggtggccaaggccgccaccaagctgcaggggcatatgacctccaatgtggccaacatctcccagcgtgcggctctggccgccgtggctggcccgctggacgaggtgcatgagatgcgcaaggcgttcgatgcacgtcgccgcgcgatcgtggctgctctgaacgatattgagggcgttaactgcccgactccgaccggtgcgttctacgcttttgcggacatcaccgctttgcttggcaagccgctggggcccaacggcactgtgtccgatacgtccgctgattttgccgccgcactgttggatgaggcccacgtggccgccgtccctggtgaggccttcggtgctcccggttacctgcgtttctcctacgcactggccgacgaagacctagccgaaggcatgcgtcgattcaaggaatgggctaactgagaagagtcgtgtgccgcgcacatgccatgcgcgcgacacgcgatttgcgataatccaccggagccgttactataacaacttggcggtttcgccgtggcgaagcgttctctacggaatgcacgccgaggtggattttcacctagggaagtggcgcaattggtagcgcaacggtctccaaaaccgtaggttgtgggttcgagtcccgccttccctgccaagttttcaataatcaagcagctgacgcgaggtacagaatggctaagacgaacaacagcgaaaaggtagtcaagccgaatgtcttcatgcgtatcggtctgtttatcaagcagatcatcgacgagcttcgcaaggtcgtaacccctactgccaaggaactgttcttctggtctctggctgtgtttatcttcgtgctgctgctgatggccctcgtcacgggcatggacttcggtctgggcaagctcgtgctgtgggtgttcggctgatccgcacaacctaaggtgaataacaacgcatgagtgatgaactgaatctcgagaatctcgacgccgtgccggctgaggagcctgttgtcgaggcttccgaagctgctgccgatgaggcagctgccccggctgaaccggttgctgacctttccgcagaatctgacgcatccgtcgacaatgcagatgttgagtccgccgctccggccgcgactgaatccgctcccgttgcttccactcagaccgagaccgtttctctggatgaggacgaggaagaagtcaacgaatccgagcaggccgaggaaaccgatgccggtcagcaggccgttgacgaattctccaagtccctgcgttcccttgatggcaagtggtatgtgctgcacacctactccggctatgagaagcgcgtgaagaccaacatcgagtcccgcgtcgcctccttcggcatggaagatcagatcttccaggtcgaggtgccgatggaagaagtcgagaagcacaccgaaaagggtaagaagatcatcacccgcgtgcgtgttcctggctatgtgctgattcgtatgtggccggatgagaacgcccgccgtatcgttcgcgaaaccgaaggcgtgaccggcttcgtcggcccgaccaaggatccggcgccgctctcccgcaaggaagtcgtggcgatgatggctccgatgatcgcttccgaggcactcaaggccgccggcgacaagcccgccgccgccaagaagcgcaaggtcgaagtctcctacgccgttggcgatcaggtcaccgtcaccgatgggcctttcgccaccatggccgccgttgtttccgacgtggagcccaccacccaaaagctcaccgtgctcgtgtccatcttcggccgtgatacgccggtggagcttggcttccaccaggttcagaagctggattaaccccaaactttgcagagcccgaccatcgtggtcgggctttttgcgttgtccgggtggatttgcataataggaaagcttgtgtctggagggaagacccgctagcacagcacagcaatataagttgcgggaggagaccgaccacaggccgattgcctacagcatgcacggataaataacgagtcaagaccgagcgtgatggcaggcaagcggatctgaggacggcgaccattcgaaccgcgttatagaaagaagaaccataatatggctcccaagaagaaagtctcggcgctgatcaagctccagatccaggctggcaaggccaacccggccccgccgctgggcccggctctgggttcgcatggcgtgaacatcatggacttctgcaaggcatacaatgcccagacgcaggacaagatgggtcaggtcatccctgtcgagatcaccgtttacgaagatcgttccttcaccttcgttctcaagaccccgccggctgcagctctgctgaagaaggctgctggcattgagaagggtaccgagaacccgctgacccacaaggtcggctctgtcaccaaggcgcaggttcgcgaaatcgccgagaccaagatggaagatctgtctgctcgcgatatcgaggccggcatgaagatcatcgagggcaccgctcgctcgatgggcatcacggttacggactgataaggagaaggacagatggtaaagcgttccaagaagtaccgcgaagccgctgagcgcgtcgatcgcaacaacctctacaccgccaacgaggccatcgctctgctcaagagcatgcctgcctacaacttcgaccagaccgtcgaggccgtgttccgtctgagcgtcgacccgcgtaaggccgaccagctcgtgcgcggtaccgtcaacctgcctcacggcactggtaagaccgccaaggtcctcgtgttcgcccgtggcccgaaggccaccgaggccaccgaggctggcgccgacatcgtcggtgatgacgacctgatcgcaaaggttcagggcggcttcctcgacttcgacgccgtggttgctactccggacatgatgggcaaggtcggccgtctgggccgtgtgctcggtccgcgtggcctgatgccgaaccccaagaccggcaccgtgaccatggatgtcaccaaggctgtcaaggacatcaagggcggcaagatcgagttccgtgtcgacaagaacggcaacctgagcttcctcatcggtaagatgagcttcgatgagtccgctctggacgagaacttcaaggctgtggccgacgaagtcaagcgtctgaagccgtccaccgtgaagggccgttacctgaccaaggcgaccatcacctccacgatgaacccgggcgttccggttgacccgaacaccctggcctgaggctagcgagcttcaatagctactgaaagggacttcccgtaaagggaggtccctttttgcatatgcgatgaccggttgcgagaaggtgaacctggatggtcacacgcaatcgaattcttgcaacacgccggtgaacgcatgaatttgttacgcatcggcaatgcaaaacggattattctggtatcagaacagcgtaaataggctgtttgcgacacgccgaaggaaccgtgtgattgcaacgattcctgaggcttttgcgcgcctcgatttgcgcgaatccaaacatgcgtgtaagttattcatctgttgccgctcagcgcggcgggttccttcctctggttggtttcctgtcttgctggtgtggtggtggtttgagaactcaagagcgtgtttgtactacttctttatagtcaatgattgccagttcattcctcgcctgatcgc

SEQ ID NO: 979 - DNA, 26051 bp, Unknown
  R117_24m  MAG No. k141_22746
gcctgcattgaaatcacacgccggtccgccagccgtcttcccaacaccgatgccttgaacgaggcgtttcttaccatgcagcgcgaggtggagatcggccagatactggacttggccgtcgagatgaccccgttgtctgatcccgaagctctggcgaacgcctcattgaacgtattccgctggaagacagccagttacaccaccatcgccccactgctgcttgcactgctggccgcaggagagagcccggatcaggccaggcattgcgcgttggccgtaggccggccgctcggactggcgttccaactggccgatgacctgttggatgtcgtcggatcaagccgcaataccgggaaacccgttggcggagacattcgagaaggcaaacgcacagtgctgttggctgatgctctgtctgcggcagatacggaggataaggccgatctgattgccatcttcgaagcggattgtcgcaacgacgaccaggtagcccgcaccattgaactgttcacgtcgaccggtgctcttgatcgatcccgcgagcgcatcgctgccctatggggtgagtcccgtaaggcgattgccggtcttgaactgaattccgaagcgcagcgccgtctgaccgaggcttgtgcgcgattcgtccccgaatccttgcgatagtccacaatgcgagccgccgggtcatgagaccatgaacaccggtgaaaacccgtgacaactatgcgccgatgctccggccgcgtaaccggggccatgtacactgaacatgtttagtcgtgattaaaggaaccgtacgatacaacatgagtgagaacgagcccgcgcagatgattgagggacgctaccgcatcgtgcgcaatatcgccgagggtggtatggccaccgtgtatgaggccatcgatgagcgtctggggcgcaccgtggcgattaaggtcatgcacacacaactcgccaaaggcccgcatcgggagcagttcgtcgaacggttccgccgcgaggccaattcggccgcgtccatcgccaacccgcacatcgttcaggtgtatgacaccggcgagttcaatggacttgattttctggtcatggaatatgtgcatggcgtcaatctgcggcatgagatgaacgcccaaggcacattctccgtgcgtgagacgctgcgcgtggtcgcggagacgttggatggtctggcttccgcacatcgcgccggcgtggttcaccgtgacatcaagcccgagaacattttgatcaatgatcgcggccatgtgcagatcactgatttcggtctggccaaggccgccagccaggccacattgagctccaccggcatgctattgggcaccgccgcttatctggctcccgaaatgatcgagaacaatcaggccaccgcgcaaggcgacctgtattccgtgggcatcatggcatgggagatgctgaccggcaaggtgccgttcgattcggataatccggtgacgcttgtcttcaagcatgttcatgaggacgtgccgtccgtggccacggtctgtcagggcattgatccgtccgtggcggcgttcatcgcccatctgaccgcgcgtcaggtggatgcccgccccgccgatggcgcggcagcagctgaggaattgagccagttggccgccaaattgccgctggaggcgtggcaataccgtttgcatgccgaacccatcggaggtgatcataccgatgccaccgctgcagcgctggtaggcaatatcgccgagcaggccccgctgaccggcgtacctgccggtgcagcaacgttcgagccgtccgtaccggcgtttttggccgatgatgtcgcaagcaataccgccgataccggtggcgccgcagacgtcaatcctccggctcctccggtcgcccccaccacggcacttgattcgtcgacgccagccgatgcttcggctccccataagacgcaaatcatggcacagtccggcagcgagacacaagtgctgcctcaggccggcgatgccttcacccgagcgcttgccctttccgatgagccggacgtcgcttccaacggcaccgggccaaagaagcagcgcagcaaaaaaccgctcatcatcgtactggtgatcgtgctggtactggctgcaatcggcggaaccgccggctggtggtggtttgccggaccgggcagctattggagtgtgcccaagccggatgacgtgacctgcgatgcgaatgcaggcaccgaatgctcgttggccggcgcggattgggccacgtatgagagcacgttgaaggctctcggcatcccctacaagacgcacaaggaatacagcgacgacgtggcggaaggcaagatcatctcttcttccgtgaacaagaccaaggccgttgtgaacagccgcataagcaagcgagccaatcaggagcttacggtggtggtgtccaagggcgtgcggatgaccatcatcccgaaggatattctcgacgcgaattcggccaatggcaaggacccgttgaacgcgctcaagaaggccggcttcgataatgtcaagcatgacgagtcgaaggatgagtattcgatggacacgccgcagggtgtggcattgacgatctcccctgatcccggtaccacggccaagcacaacgatgaggtgacggttactttgagcaagggaccgatgccggtgaccatgcctaacatcgtcggtaagacccaggatgagatgcaagccgcgctcggcgagttgaagctcacggccaatgtcaccgaacagtacgatgacaaggtcgaggccggtcaagtcatttccgcgtctcaggaagccggagcccagctgaagtggggcgatagcgtggacgtggtgatttccaagggtccggagatggcgacgataccgtccggccttgtcggcaaacaggaaagcgccgtaaccaagacacttgaaggtctcgggttcgaggtgaaaaccgacaaggtgctcggtggcctgttcggcacggtacgtaccgtgaaaagtggcgatacggacctatccaacggcggcaagattcgcttgcgcgatgccaacggcaaccccaccgtcatcaccctcaccatcgtgtgagatttgaatgaggctccctctgtcttgagacgagggagcctcatttgttaattacttttcggcttcttcagcggcctgctgggccttgagctcggccttgaccttctgggcgtattcgttcacgaattcctgaccgctcattttctggattgcggtggaaacacgatcggtcagcgaacgcaaatcatcatgtgtaatttcatcagccggcttcttcgcaacctcaatcggcttgccatacaacaccttggtcttgcccttcttgggaatcgacgtgccaatcggctgcagcttgtccgagccgatgatggcggtcggcacaatcgggcaaccggtctcgagcgcaagtcgtgcggcaccggtgtgtcccttgtacagtcgaccgtccgggctgcgcgtgccttcaatgtggataccgaacaggtgcccatcctcgataatctcgcgtgcatgctcgagtgcgccaagcgacttgctgccaccggaacgatcaaccgggaacacgcccacggacgtgaaccaccacttcttgaacttgcccttcaatcccttgccctcgaagtattcggctttgcccatgaagtgcaccatgcgcgggcaggtaatcggaatcaaagcatcgtcaatcaccgccagatggttggctgcgataatcgcgccaccctctcgaggcacgttattcagtccactgacagcagggctcaaacgatgatgagcaatagggccgagacctttgacgaagaaccagtagagcacttggcattcctcccgcagacgaactagccattggccggtcgcctgattagagtgacagttatgactgagaaccagaatagcaatgccgacggagagcggccaacccccacgccgggcaacggacaggattccgatacttcgtccaagtcgtcgactcccggtgccgccggaccggccacgaatggtgccgatacaccgcaatcgcatgacgcgaacgatttggatgcggcgtgggccgcgttcgaagccgagcatcaggccgacttgcatgacgtggcttcctccaggcaggccaaaaagttcgagaagcaggccaagaaacgcgagaaggaagcactgctttccgtagatgacttggatatcggctcgttcaccgatgatgctcgcccgagccgtggcggcaaaaaaggcaagcagtcaggcccccgtgatttcaccggctccagctggctggataccgataatgtgatggatgcctatgatgatggcggcttcactcccccgaaccctgatcttggtccggtcaaagcatctacggtactgctgacggcgttgctcatcatcggtctcgcaggcgaaacggtgatgatattcgttcccggcttgaacgcgattcctctcttaggcgcgctgctcaatattctcttcggactgggcgtcattttgggtctgggcggattggtggccaaaatcctcaaccgcaaagaccgccccggtgatcagggtggctattacgacgacggcgcgagggtgtagttcgcgtaggttgtgtagtccttggctcccctctctgaggccgagccgttaagcaaacagcccagtgggctgtttgtaggcgaggtgtgagcgatagcgaaccaatgtatcgcaggcgtagctcgtccgtaattgcggccgagccaagataggtcacgaattgaagtcgatggactcctgcaactcgaaatagttgataatgaaggaaaggtaaacatattcgagcaaacccattccatatcacgccttggacttggcggtttcgatccacttgttgaacagggcttcagccttgccggagtcgacagcatcctcggccagcttgtaggcctcggcgaagcgctcggccagtgtgccgttgccgaccagattgccgtcagccacgatggcggaggcagcgttgagcagcgcggtggtgcgggacgtaatgtccttgccggccaggaagtccttaaatgcgttggcgttgacgtccggcacgccgcccttgagctggtcgacggtaatcttggcgagacccagatccacggtcgggtcgaactcggtttcggtgaccttgccgtcgcgaatctcccagacggaaaccgggccggtgggggcgagctcatccatgccctcatgcgaagtgtagaccaagccggactgaccacggctggcgtagacggcagccatgatcgggctcaccttgcggttggcgcagccgatggccacgtgtgccgggttggcggggttggtcaacggtcccaggatgttgaagacgcacggaatgccgagcgcggcacgaatcgggcccacgaagcgcatggccgggtggaaggtgcgggcgaacgcgaaggtgatgcccacctcgtcgcccacttcgccgacggcctccggcttcaaatccagcggcaggccgaggtcttcgagcacatcggcggcaccgcacttcgaggatgcagcgcggttgccgtgcttgacgatcttcacgccggctgcagcggcggccacggagcccatggtggacaggttcacggtggcgaagccgtcaccaccggtgcccacgatgtcggtggtcccaccggaaacgttcagcggcacggcgtgggagaccatggccttggcggcaccacgcacctcgtcggcggtcagtcccagctgctgctgcatagcgagcgcggcacccacggcggccggattggcgttaccttgcatcaggtcatccacgaaccactccgattcctcagcagtaaggtggtctcccccgaccagcttggtgagaatcgacttccatgtgatctcggccatgatgccctccttggcgtttcctacgccgtgtgatgtatgttcgccgctcattgtaatggttcgtcatttcaaggccctgaatcttccatattgcaaaatatggcgctattgctgttttcgtggatgtcggttcgtcgtcgagccgttggtttcgtaagcgtgaggggcgttcccgcgtattctgttttccgaccaaagaaatgaatcacgaagaacgctgggcaaaagcccattcaccggattgccgaacgtcaaaggcacggttgcagaggatgcgcggatcacggattcgccgccgcgttccgaacccgtgctcgagatccgggtgcgtccacgtgcgggcatgctccgatgctcccgatgcggaaggaggcgccgcgggcatgaccaggacggcggcgtgcggcgtcgtggtcgcttccgtgccgtgggccgagccgggcagccggttcacacgcgatttcgaatcggaacgcgcgtggccgatgagcgtcgcgaaccagaagaccgtaagcggtttcccgcacgtcgcgtggcgcaccgccggaagacgccgcccatagggccgccgaacggttgaaggcgtcgatgccgtcttcgttcggcggcctcacgtcgatcggcgtggacgagaccggctaccgcaaaggccacacgtgcatcaccgcggtcgtcgaccacgaacggcatcgggcgatatgggcgcacgacgggtacggcagggacgtgttcggcctgttcttccaaacgttgacgcccgaacagcacgcctccatcagggtcgccgccggggacggggccaggtggatcgactcatgcgtgcatgagtggtgcccgaacgccgaacgcgcgcccgacgggttccacatcgtcagttggacgagcgacgcgcccgacaaagtcaggagacacccgtggaaccaggcgcgccgcgacggggacgagaaatccgtcaagcgcatgcgcggcgtcagatacgccgtcctgaagaaccccggcaagctgaccgacagacggtccgaggcgtccgggaacctgcgggacacggaccccaaggtccggccctaccgttcatgacggctcagggaacccctccggacgctgcccaaacgaccggccgaccaggcccgggccgaactggaccaccgggtgctccgggcgtcccacagccgcatccccgagatcgtcgaactcgcccggaagatccgccgtcatgggcccgccatcctcaagacaatcgaattgggctgttcaaacgccaggctcgaggcgtccgacaacaggatcaaggtcaccatccgcatggcctacggcttccaccacgcgaacaatcccatcgcgcttgttatgctccgccgcggcggactcgacatacgcccaccacaaccaagaacccaacccacgaaaacagcagaagcctcttttttgtgctatcccgtaaaactgcgggacggcagctcattttcgccgttttagccgtgccgtcccacatcaccctttgtggaccgtgacaccataacaccgagaatggcggaatttcaacgattccgtaattcgtactgcgggacgccacgctagtcaatcgattgacactcgtgccatcccgcaacagtgtgggatacgacgtcaaaatccgcgaaaatcgcgtgccgtcccgcgcgtacggcaccgcacgaatacatgctgatgaaccgcacaaaaaatggctccccgtgtggggagccatgagctagttactaactagcgatgcgtcacttctcgttctggccgtggcacatcttgtacttgcggccggaaccgcacgggcacggggcgttcttgccagtgccagggaaggtgcggccgtcggcccacggcgtcttgagctcttcgctcttcggacgcttggaaaccgggaccttgccttcggcgtggctgatcggagccggtccggcaacaggcagcgtggactcgccggccccggagacggctgcggattcggcgatcgcctgcttggcgtccgtatcctcgtcctcttcctcgacttcgccctcggcggcctcgaccacggattcgccgttctcgtcggggccggaggccacggcgatggtgtcggcgctttcggcggtctcctcgacctcgtcaacggcctcgtcggtggtggcgacctgcttgatgtcgatgtggaacagcagctggacggtctcctccttaatggcctcgatcatggagttgtacatctggtagccttcgcgctggtattcgaccagcgggtcgcgctggcccatgccacgcaggccgatgccgtccttgaggtaatccatctcgtaaaggtgctcgcgccacttgcggtcgagcacggcgagcaccacgcggcgttcgagatcgcgcaagccggtctcgccgatggtctcctccatttcgccgtactgctgcctggcgtcctcgacgatcaggtcgcgcacggcctcgacggccttcgcacccttgaggccgccgacgatcttcctgacctcgtcttcgtcgaccttggtggggatcacggtgttgagcgccttgaacaggccctcccaatcccagtccttcggtttctcggatcccttgttggcacccttgatgtaggactcgacggtgtcggaaatgaaacgcaggatgtccttgtggatgtcttcgcccttgagcacggcctgacgctcggagtagatgacggtgcgctgcttgttcatcacgtcatcgtacttcaacacgttcttgcgaatctcatagttacgggattcgacggccttctgcgcggtgcgcacgcccttggtgacggacttggcctcgatcggctggccttcctccatgcccttggccatgacctgggccaccagctgggtgttgaacagacgcatcagatcgtcttccagcgacagatagaagcgggactcgcccggatcgccctggcggccggaacgaccgcgcaactggttgtcgattcgacgggactcgtggcgttcggtgccgagcacatacaggccgcccagctccttgacctcctcatgctcgtccttgacctgggccttgatctcgttcagggtgcccggccaacgcttctcatactcttccggggtgtcctccggagagtaaccttcggacttcagtttggcgtcggcaaggaactcgacgttgccgccgagcatgatgtcggtaccacggccggccatgttggtggccacggtgacggcgcccttgcggccggcgacggcgaccacggcggcttccttctcgtgctgcttggcgttcaggacctggtgcgggatcttcgccacgtcgagcagggcggagaccacttcggagctttccacggaggcggtgccgagcagcaccggctggccctcggcgtgtcgcttggccacgtccttgacgatggcggccagcttctccttcttggtgcggtagatgaggtcgtcctggtccttgcggatcatcggcttgttggtcttgatcggcagcacgcccagcttgtaggtgttcatgaattcggcggcttcggtttcggccgtaccggtcatgcccgcgagcttgtcgtacatacggaagtagttttgcaaggtgatggtggcgaaggtctggttctcggccttgacctccacgccttccttggcttcgatggcctggtgcagaccctcgttgtaccggcggcccggcaggatacggccggtgtgctcgtcgacgatgagcacctcgccttgggtgacgacgtagtccttgtcacgcaggaacagttccttggccttgatggcgttgttgaggtagccgatcagggcggtgttggccggctcatacaggttgtcgatgccgaggaagtcctcgaccttggtgatgcccgggtccaggatgccgacgaccttcttcttctcgtcgacgtcgtagtcctcgtcgcgggtgagcttcagcaccagcttggcgaactgacggtaccagcgggtcacgtcgccttcggccgggccggagatgataagcggggtacgggcctcatcgatgaggatggagtcgacctcatcgacgatggcgtagtggtggccgcgttgcacgaggtcggccttctcccaggccatgttgtcacgcaggtagtcgaagccgaactcgttgttggtgccgtaggtgatgtcggcgttgtactgcttgcggcgctccggcggcttctgctcggtgatgatgcagccgacgttcatgccgaggaagcggtagatacggcccatcagctcgctctggtagctggcgaggtagtcgttgacggtgaccacgtgcacgcccttgccttcgagagcgttcaggtaggtaggcagggtggcgaccagggtcttgccttcaccggtcttcatttcggcgatgttgccccagtgcagggcggcaccgcccatgagctgcacgtcgaagtgacgctggccgagggtgcgcttggagacctcgcgcacggtggcgaacgcctcgggcatgatctcgtccagactcttgccgttttcgatttcctgcttgaacttcggggtttgggccttcaggtcctcgtcggagagggcggaaatctcgtcctccagggcgttcacggccttggccacgttctccagcttcttgagctggtggccttcacccattcgcagggctttgtcaacaatatcgaccactgggttctcccttgactgataagtggtggtgtccgcgtaccagaatagcgcctcgcaccgtcagcaatcgaatttttcgacctttttacgaaaaaatggaccgcttccatattggaagcggtccatgcggtatcagctgatcatgtcagcagcccttaccctcaggctttcttgacattctccggagtgtcgatttcgaacacgccgtagctccaaccgtgacggtgatagacgacggacgggcgtccggtctccttgttcacgaacaggaagaaatcgtgtccgatcagttccatctcgtacagcgcctcgtcgatgctcataggctcggcgatgtgcaacttgcgacggatgacaatcggcgtatccccaacctggacctccacggattcgccagggccaagatcggaggcgaccgcagcctgcgggctgttgttcggctcttcgtccgactcctccggctcgggctccggggcgataacacccagatccaccgggaccgggttcgcgtaaccacgacggtgatccttgcgacggtcacgagtacgacgcagacgcagcgtcaacttatccagcgccatgtccagcgcgctgaattcatcggtgctggaagcctccgcacgcaccacggtacgtccggcgataacggtgatttccacgcgcttggcggtatcggcctgacgcgggttgccctcatgggtcagcacaatctgcgcgcgctgagcatccggggcgatagcggtcacacgattcatcttggtctcgaccacatcacggaacctttgcttgacctgcgtgtggcgtccggtaacgacgatttccatgttgacctcctctaactcaagcggtgtaacccgctatatgtgttccgaacggcatcatcaccgaccgggtatgtttcattgtagacgaacaatgggtgaacggccggaaactcgcccagagaatatatgtttattcccgggcttttctctgcaatgaaacgatgtatatactggggttttggcagcagtctcctataagaagatttgataccggtttatcaggctggctcgtttgttcgtcatggcaaatactgcaatggataggcaacgttttcttgctctttctcgcacataccaagctcttacagatttgattcgtctccatacgacacgccacaacacgcccgacacgccccatccgatattcggcgcgtcgttcacgaatcgcccaactatgcccaactatggagaaaacaggataactgggcaacgtcatggcctcaccgcagggcgggatgccgccttttccgcaccttatgtataattgcaggcttgagacctcttgatggccgcggccgtgatcttcattgggatcggctgaggaacttccgggctccatagagcacgatggcggataacgtccgcccagggtgacctgagagatagcgcaacagagaacagaccgcccgtcctcgacgggtaagggtgaaacggcggtgtaagagaccaccgggcctctggtaacagtaggtcgcatggcaagcctcatcgggagcaaggccaagcagatggcggtaagggctgctcgcccgtgtcatcgggtaggctgctagagcctggcggcaacgtcaggtcgagatggatggccatccgtgccgtgcgttcgcgcacggcacgacagaacccggggtataagaggtctcatttttttcttggctacaccaacaattcggcggcgactcggcggagggtttcggggctgtgtcctttgcggccgcctgcggaccaaaaccgacgctgacggacctgacgatcgaggccatgggttttgcgggctatttggcggcccaattcccatgcggcatcttcaaagatgccattttgctcagcttcgccacacacctgttcagccagtttgcggtccacgcctttgcgagcaagttccaggaccgcaccacgacgacccatcatgcgaccggcacaatagcgtacggccgattcggcataagcgcggtcgtcaatcagttgcacgcgaatcagccgttcgatgacctcgtccacaatcgcctcgccatagcctttgctgagcaatcgttcgcgcaacgcgccggatgcacgtggggccgcgtccagcaaacgcaatgcagcctcgcggcaagcgtccaaatcattgggatcttcgacaacggcagcgtctctcccccgtcgagaaaaacgtcccggcggtttcgactgaacacgctgctcggcaatgggcatgtcttgcgacgcaacaggattgcgccgcaagaatgcttcggcactaatcatgttcaggccttagctgcgccggccttggcacgggtcgttttggcagcaggcgccgctgcggccttgctgtccttggccacgtcggcagcggcggcctcgctgacagcggccgctgctgcggcttcgccatcttccgcgaactggtcggcggaaccgatcagaccgaactcggacttgaccttattctcaatctcctcggtgatggccgggttgtccttaaggaactgacgaaccttctcgcgtccctgaccgagctgatcaccctcataggtgaaccacgaaccggacttcttgaccacgccaacctgctgagccatgtcgattaccgagccctcacgggaaatgccttcaccgtagagcatgtcgaattcggcggacttgaaaggcggggccatcttgttcttgaccaccttgacgcgcgtgcggttgcccaccgcttcgtcgccattcttcagggtttgaatacgacgaatgtcgagacgcacggaggcatagaacttcagggccttgccgccggtggtggtttcgggattgccgaagaacacgccgatcttttcacgcagctggttgatgaagatggcggtggtgccggcctgagccaacgcgccggtcatcttgcgcagcgcctggctcatgagtcgggcctgcaaaccaacatggctgtctcccatttcgccttcgatttcggccttcggcactagggcggcgaccgagtcgatgacgatgacgtcaagtgcaccggagcgaatcagcatgtcggcgatttcgagggcctgctcgccgttatccggctgggagacgatgagtgagtcggtgtccacgccgagcttgcgggcgtaggccgggtcgagtgcgtgttcggcatcgatgtaggccgccacgccgcccttcttctgggcattggccaccacatgcaatgcgagcgtggtcttaccggatgattcggggccgtagatctccacgatgcggcccttgggcaggccgccgatgccgagcgccatatcgagggccaacgaaccggtgggaatcacctcgacgttctgctcgggctggtcgcccagtcgcattgcggaacctttgccaaagctcttctcaacctgcgccagcgcggtgtccagcgccgccttgcgcttgggatcgagctcgtgcttgtcctcggctgccgggtccttggccggcttggtctcaagtgccatgatcttctccttgtcgaagtcgtgcgcgaatcggatgcctccaccgtatgacggacatgccatgtgaggcaatccaaaccaaccattgtggttccagcttgcccgagctcggccatctgacctccctaagacctactgcggtaaggcttatggcggatgacaagcaccctgtgcacacgtatgcggcttcttgtcactgtgaataactataaccacacacacgaacatttgttcgaatttggcgtgcaacacgccgaaatcgccaatttcacgattcagcgactccgtaatcccgcagtgtcagacggcgggcatgggcggcgcgttatgatcgtggccccaacgcttggagtccggaacctccatttggtcacagagcacattccagaccacgcgtggctcctcccccgcgtccagcgcctcgaccacggtcatattcgccaatttggacatccgttgatcacgcgacagcgaacgaccgtaggtccgaccgaacacctcttcaagtaattcccagaattcccgttcacgcatacacgccagtgtgccaccacccgcaggacagcaaaaacccgcatcgccacaagcgatacgggttcacagctagacatagattacgggatgcggcttcacaccgccaaccgatcagccctcgactgtgtcgagataatcggccaccatgcgcagcatgcgcgaagtggagactccgagcgcatcggcgatggagctcagcagttcggagctggcttccttctgcccacgttcgacttcggaaagatagcccagcgaaacgcccgccttctcggagacctcacgcaacgtgcggcgatcgcgcgtacgcagttcgcgcagcacgtagccgatagcaccacgcagcgaaacctcgcgaggctcctcctcaaccaccacgggctcggcggcggcagtcggcttgtacgacggcgaatcctcatcccacatacgttcacgaacggcttgacgctgatccttggccttcttggcagcctgcgccttgagcacctgctgctgggcgaacatcaccgcacggcgctgggccggagtcagttcacgcatacgggcgacacccggctgcacagccatcggcttcttggcggccacatccatctgttcgttcactcgggtcatcgtttccatcgccatcgccccttccaaggtcggttcagtgtttccactatgtacaacacgacggtcccgcggttttattccttaaaacttgctgtgaatagactcaagttttgcagaacgtggaatacggtgaggcgacgaacctcttcgcgcatgccatcaagatggagttcgacggctttgagcacttcggcatggtccgcggtgaggcttgcggggatgcgcaggcccacatacaccagtccggccggcttatcaccgtccggaccggggccggccacgccggtggtggaaaggccgatgattcggtcgccgtattccggctggctgtataggcgagcggcaccgatggccatctgccgggcgacttcggggtgtacggcgccttctcgatccaatagggccttgtccacgtgtaggatcgaggccttggcattgatgtcgtaggtgacagcggagcccagcaacacgttggaggcaccgggaatacgcacgaacgcatcggcgagcaggccaccggtcagggattcagcgcaggagattttcgtattgttcgcctcgcagatcttgaggatgccggccgcgagactgtcgcacaattcctgcattggaatatccgtcacttccgcttcggggcgacgaacgtgttgtacaggtacacggcacccgagtagaggcacaggaccaatgccacgtagatgatggcgtaggtcaggaagtagtaagcggtcatccagaacggcgtggcctgtccgttacccaatgaccagaacggcagcagcagcatggacagacccacgcactggaatacggtcttgagcttgccgggccatgcggcggcgatgaccttgccgcccggacgctccatgacgaagaagcgcataacggtgatgccgatttcgcgaatcaggaacaggatggtcacccaccagccgagctcgccgaacgcggagcatacaatcattgcgccgcaagtgagcagcttgtccgcgatcggatccatgagcttgcccatttcggtgacctgattgtatttgcgggccatccaaccgtcgattttatcggtggacgcggcgatgatgaacagtaccgcggcgacccaacgcatgatcaggttgttctcaccccaggaaccggcgagaatgtcgagtgtcaggaaaatcaccacgagtacgatgcgcgagtaggtgaccaggttcggcggcgcgttccatccgtcgaacagcgatgatttgggcgatgactgcttgtccattgtgttctcatccatagtgttcacgttacccccatactcctaccttgagtgagtggtggctggatattgactgctattattcgggaatcaggtttcgtgctgatgctgtccgcgcttctctccctccaccccttcgggcacctccctcatcagagggaggtcgatgggtgaattattcgccgagttcgggttgttgcggggcgctggcttcgagcgagctggtttcgcctcggatgaaggcgagcacctgcggcaggtcctgcggctgaacaagcacctcgcgggccttcgagccttcggacggcccgaccacgccgcgcgattcgagcaagtccatgagtcggccggccttggcgaagccgaccctgagcttgcgctgcagcatggaggtggaaccgaactggctagtgaccacgagttcggcggcctgcagcagcacgtccatgtcgtcgccgatctcctcgtcaggctccatgctgtctttcttttcggcttccttggccatctgttcgatgtcttcgcggtacttcggcttgcgctgggtgcgtacgaactccacggccttgcgaatctcggattcggacacccacgagccctgcacacgaatcggcttggcggaacccatcggcaggaacagcgcatcgccctgaccaatcagggtctcggcaccgaccgtgtcgagaatgactcgcgaatcggtggcggacgaggtggcgaacgccagtcgggatggaatgttggccttgatcagaccggtgaccacgtccacggacggacgctgggtggcgagcaccagatgcacaccggcggctcgtgccagctgggtgatgcgctggatggagctttccacatcgttcttggccaccatcataaggtcggccatctcgtcgaccaccacgaggatgtacggatagggggccaccttgcgctgggagccggcgggcgcatgtaccttgccggcgcgcacggcctcgttgaagtccttgacgtggcggaatccgaagaattcgaggtcggagtagcgtgcatccatctccttgaccacccattcgagggcctgtgcggccttcttcggatcggtgatgatcggggtcagcaggtgcgggatgcctgcgtaggcggacagttccacgcgcttgggatccaccatgatcagacgcacctgttcgggcgtggcacgcatgatgatcgaagtgagcatcgagttgataaaactcgacttaccggaaccggtggcacctgccaccagcaggtgcggcatcttggtcaggtcagcggtcacgaagtggccttcgacgtccttgccgatgccggagagcatcgggttcgggtcgcccacggccttgtcggagcgcaatacgtcgcccaagtgcacgatttcgcgatcctcgttcgggatttcgatgccgatagcggacttgccgggaatcggtgaaaggatgcgcacatccgaactggccaccgcgtaggcgatgttgcgctgcaggttggtgactttctccaccttgacgccggggccaagctcgacctcatattgggtgaccgaagggccacgcaggaagccgacgactttggcgtccacgttgaactgttcgaaggtggaagtcagtgcccggatcacgcgatcgttggccggggtgcgcatcgcatggggctgacctttggtcagcaggttcaggtcgggcaactgatacggcctattggcgtcgtcgtctgtaccgttgccggcggcggcattcggctgtccgtccgtattgggcacgccctggccgactccgctgccatccgcatcggcgcctgcgtaggctccggtcgcggctgccgcggccgcggcaccggcggccccggccgctcccatcgccccggctgcccctgcgagcgcgacagtaccggcctgggcggcactgggtgcccacggatcgtctaccgctcccccaccgggcatggcgatggtctggccactggtgatgacgcgggttcgggaagcgtcgccatcatccgcatcggcagcaggcgcagggctggataggtgcggacgaccgtcgtacgaagacgatgcaatggttcgcgcaccagtaatctcgccggtcatcggatcgaccaccggggtttcggcggtggcaccatgctggctggcggcacggtcgaacggatcgtcggcagcatacttgtcaagggttttgtcgtcttcggtcttggatttgcggccgaacagtcgtgcgaacaggctgggccgtgcatcgccggcctgatcgttgtcgttgccgtcgtcgttgccgtcatgcgagggaacaccgtcggcaaaggcgagtgtggtatctcccacacggacctcgttggggaactggctggcgcttccgtcggcctcctggcccatcggcacatacggtttgcgttggattttagctgcgattttgcgcgcatcctccggcaaatcggtgacgtgggtgccggtaatcatcagcaaggagaacaggccgacgaccacgaaaatgatgatggcgaacacgttggaaaggccccaggcgagcggtgagccgaggaagaagccgaacaggccgccggcggattgcagaatcgtgatgtcgaatccggtgtggtcggcggcgatcgccacgtcgatgatcgaacaaatagaccacatgagcagcacccaaccggtgaccacacgcgggttattggaccctttaccggaattgcgcatgagtcggaaggccacggcggcgagcaacaccggcagcacgacgctcatcagaccaagcacaccggccgcgatggcgtgaagcagctggccgaatggaccgctgacacggaaccattcggacgcgcagaacagtacggcgagcacgagcagcaggaagcacaaaccgtcacgacggtaggctgggtcgtattcgccgacgccggtgacggcgcgtacgccggagccgaacgcgcgcggaatcgcgagcaggatcttcttccacaacggctcaggttcgaggtcaagctcgggctggaccttggtttcgccatcatgggtagacccgttgtctttggatttacggggtttggtgctgttggaggatgctgttcgtgccatatcgggtctgattctactagtacgggggtgcatggttggtgacgacaccgtgacgatatggtcgattgacgaatcccgacagccgattcgccgcggttcgtcgaggttcgtccgagtcgattccccgctggagcgcgaatatgccttatcatgggttgcatgacacccgcagagcgtgcgagcgcagtcgcatttgcactcaagaactgcgcactggaagcgatgacgccgggcgaggcaacgatgcgcgccgcggttgcctacgaacgtggcttggagcccgtgacccatctcatcgacgtggcggacgagcagaccgccatgcgtctgcgcgccgccgccgaccctgccggaaaggatcgtctggctgccggcagtctggatgatcatgccacggatcgcgcggatgcggtgttcgcacgtaccgtattgttggcggaacgtcggtggaatccgtctggcgacttggacgagttgaccgccattcataaggggctgttcgaaggcgtgttcgaggatgcgggcaagttgcgtacctcaaacaccacacgcgaggtgacgaacgaccgggctcgggccgcgaatccggaggcgttcttcccggctgggctcattgagaccggcgcgcacaacatcgcgatggagttggcggacaagcgcaacctgcatgcgttggatcgcgacgtgttcgttcacgcgttcgcttctatttatgatgagctcggttatctgcatccgttccgtggcggcaatgcgatggtgctgcgtatattcggttcacgcttggcgcatgacgccggctgggatctcgactggggctcagtgacgcgcgaggagtatcgctccgccaagcactcggcatatcggggcgacacgtctgcactggagacgatgttcgacgcgatactacgcccggcgaatccgacgcgcgtgttcttgatcgccggctggaatcaggggcctgcacactgattgcgggtgattgcaccggcctttggctgattcctacgccgtgatatcgcccagatgatgctgggtgtattcgtcggctcgggcgtcgatcgggtcgtagtcgccggcgtcggcgtgcgcgataatggccatcgcgttgtcgaccagtttcgggttcagggcctgcagccagtggatgcgcgggtcacggccgaaccatcccatctgtttgcgggcgagtcgcttggttttctgtgcgatgtccgcgaaggcgtcgttcacatcccagataccgtccagcaggtcgatgatctgctgatagccgagcgcgcgtacggcggtggcacccagatgcgggcgcagccgttcgacttcttcgatgaatccatcgtcatacatctgcttggtgcgcaggtcgatgcgatggtccaaatccgggcggtccaggtcgagtccgatctgtacggacggaatcacgtaccggtagcgcggcaggctggccgaatacggtttgccggtaagctcgatgacttccagcgcacggatggtgcggcgtgggttgcgtgggtccatgcgcgcggcggcctcggggtctttggcccgcagctcgtcgaacaaagcaccggcaccctcggttttctcgcgttcctcaagacgtgtgcgcacgtcgggatcggtgccgggaaaggtgatgtcatcgatggccgctctggcgtacaagccggagccgccgacgagaatcggccggatgccacgtgattgcaggtcggcgatggtctcgcgcgcaagctgctggaatcgggccacgctcatcgtgtcttcggggtcgatgatgtcgatgagatgatgcggcacggccgcctgttcttcggcggtgggtttggcggtgccgatatccatgccacggtacatctggtaggcgtccgcgttcacgatttcggcccgctcccccgcttcggccagacgccgggcgatggcgatgcccaaccccgtcttgcctgacgcggtgggaccgacgatggagacgactcgttgcgtcatatacgccccctcagtgtcgcacggaataggtctgtccagcggccacatcggggtcggcaagcagattatggcggccggcgtgtgtgacggtgaccgtgacgaaatcgccgatttcaggtaccggttcgccttcaggcacgccgatgtgcaccagcacgccagttttctcgcggccggtgacacggtgggtgtcggtgtccttcttgccgagtttgccggtgatcatcacttcgacgtcgcggccctcgaatgtggcgaggttctcttcggtgatctgctcctgcaacgccaccagtcggtcgaaccggtcctgcaccacgtcgcgcggaatctgttccattgcggcggccggcgtgccggggcgtggcgagtagatgaacgtgaacgccgaggagaagcgcgcctggcgcaccacgtccatggtctgctggaagtcctcctcggtttcgccggggaatccgacgatgatatcggtggaaatttgggcgtcgggcatggcctcgcggatacgaccgaggatatcgaggaacttggcggacctgtaggagcggcgcatcgcgcgcaggatgcggtcggaaccggactgcagcgggaagtgcagttgatgcatgatattcggtgtttcggccatggctgcaatcacatcatcggtgaaggcggccgggtgcggcgaagtgaagcgcacacgttcgagaccgtcgatggttccacaggcgcgcaacagcttgctgaaagcgtatcgatcgccaataccataaccaaacgagttcacgttctggccgaggagcgtgacctccttggcaccatcggccacacattggcgaatctcatcaagaatgtcaccggggcggcggtccttttccttgcctcgcgtggtgggcacgatacagaacgtgcaggtgttattgcagcccacggaaatcgccacccacgagctgatgcgggaggcgcgggcggcgggaagctggctcgggaactgccgcaattgttcagtgacctggacctgcgccttgccggtcgcacgattctgatccaacagcttgggcagatcttcgatgttcttggtaccgaacaccgcggaaacccatggcgcagtatccgcgatcttcttgcggtcaagctgggccatgcagccgccaacggcgatctgcaggttcggccgaaccagtttgacgcgattgaatcggccgatggtgccatacatgcgttcggctgcgttctcgcgtaccgcacaggtattgagcaccagcagatcgaggtcattgccattgatctggtcctcggttgcaggcacgtagccattggcctccagcacgccggcgatgcgctcggaatcgtgcacgttcatctggcagccgagcgtgtggatatggaatacgcccttgccgcgctcccccaacaagctatcggttccatcggctgcaatcgaggcacgctccgcctcggtcatcatgtcttcattcataacgaccgattctatcggcggggttcgtcatgctccggtcacgtatgccattggttgtcacgatcttaaatatgggttcttggaaagattccccgcgaacatccagattgtctggaatccgccgagtatattggtggacgtgatacttgaccgacatagccgactcaaaacctccgatctacaggcccgtctcaaagcgttggatcttccgggaggcacctttactcccgaacaggtcgttaaattcgttgacctcatgcaggtgtatgaaggcgcgatgtacgagatcagcaccaagctggagattctcgacgacgagttccaggtgcggttcagccatgacccgatacatcatatggaacgccgtctgaagtcggtgagttcgatcattggcaagctggagcgcaagaatctgccaatcagtgtcaattcgattaaggacaatctgttcgatgtggccggcatccgcgtgatctgtaattaccgcgacgacgtgtattccgtgtccaactatctgtcgtcgcagtccgatattcaggtgctgcgcgtcaaggattacatcaagaacccgaaacagaacgggtatcgttcattgcacgtaatctacgcggtgcccgtgtttctctcctcgggcgcgcattacacgccggtggaggtgcagttccgtaccatcgccatggattattgggcgtcgctggagcatgcgctgcgctacaagaccgatttgccggacaacaagctcagcgagcattcacagacactgctcgactgcgcccgttcgctgcagaacatcgaagtgcaaatgcagaacatccaccgcgacatcaacggcgcgccgcaagtgggtgaagcgcctaagaccacggactgaggtgctatggaatcggcctgcgtccgattcattcaccgttgcagccacttcggcagcctggccggcgcttgggccagcagggtgccgaggaagatgagggcgcagccgaggtagccgcgcggggtcatcacttcaccgagaagcaacgcaccgcctaccgccgagaagaacgattcgaggctcatcagcaggctggctcgcgtcggtggcacccattgctggccgaccacctgcaaggtgtacgcgatgcccaccgagccgatgccggcgtacagaatcggaatccaggaatgagcagcgccgacccagtcgaccgagccttcgatcagcgaacccgcccagctcagcacggcggtggtgcagaactggccgaatgaaagcttgatggcgtccacggtgccgcccaaagtatcgatcaccagaatatgcacggcgaacagcacggccgtgaacacgagcaggatatccgccaggccgatcgaaccgaaaccatcggtgatgcacagcagatagaagccggcgatggacagcaccacggccacgaacaccagcatgccgatgcgccggcgcaggaacacgcaggccagcaacggcaccatcacaatgtacatggcggtcaggaatcccgcgcggccggccgatttgccgtacagaatgccatactgctgcagggtgctggcggtgaacagcacgatgccgcagatcacggaaatgaccaccgggttggcgagcaatcgcgccacggccgaatcgggcttgttcgcattcagcttggcaccggtgatggtaacgacgtcggatgcaccgttcgatgcggcatctgtggagacggccctgggggcctcggtcccaacgacatcgaccccggctgtatcgcccttatctgcgctcccccggccacgctgccacagcagaatcggcaccaaagacagtgctcccagcgtgaagcgcgtggcgttgaagaacatcggcgacatcaaatccatgccctggacctgcgccacgaacgcaaaaccccagatcagcgcggtcaacaacaggctcagcatgcctacgagttcttgtcttttcacggggagacagcctaacgtgcgaatgtgacagacatgaaaaagcccggccacaatgtggtcgggctgtgacgtttgacgagcaggctacatgccgcccaccaatcggctggcgaggctagtccctgttgccgagcagctgcaggatgtacaggaacatgttcacgaagtcgaggtacaggttcagggcacacaggatggagatcttcttgaccatttccgggccctgggcctcgtattcggtcagcagcgcgcgcgtggactgcgcgtcgtagatggccatgccggcgaacaggatcaggccgatggcgcagacgatcttggtcatgccgtcgacctgcacgaaggcgagcacgatctgcgagatgatgagcacgatcaggccgatcatcaggatcgggccggccttgagcatgtcgaacttggtagtcatgccgaacatggtcagcgcgaagaagaacgctgcggtgacaccgagtgccacgccgatcgagccgaggtcgtagaccatgaagatcgagctcaaggtgaagcccatcaatgcggcgtacacatagaacatgacgcgcgcagtggccgacttcatcttggtgacgcgcatgccgagcaccacggccagggcaatctgcaccacgcacaggccgatgaggcccaccatgccggtggccatgaggaagctgtagtaggctccggtgatctggccgagcacggcgaccacggcggtgacgaggatgccaatggtcatctcgccgtacaccttggctacggagacgcggcgggcctcctcgtagttgtaggtcatcgtcgtgttgatggtggcggcacccgcgccggcaccggccgcatcctgcggcgcgtactggtaggtgggggcgccctgcggctgggcatagtagttctggccgtaaccggactgtgcgtattgctggccatatccagactgttgggcggcgttgtaatcaggcgtgttgtattgcgggttgtattgcccgttgttctggggctgctgaccgaatgtcataatcgctcctttagcgtttgttccagtaccaatcttagaggaacaaagctgaacattccatgaataggatcgatcggctcgttctgctcatcgcaaagcgtaacgggcgtttccaccatgcgcgtggcatgcac

SEQ ID NO: 980 - DNA, 3321 bp, Unknown
  R117_24m  MAG No. k141_23508
catcgtgacgacggcgttgttcacgatcgtggcgacgtggaacaactacttcctgccgttgatcatgctcaaggacgcggactggtacccgctgaccatcggcctgaaccagtggaaggaccaggcctcgaccgcgggcggccaggcgatccagaacctggtgatcacgggctccctgatcacgatcatccccctggtgatcgcgttcctgtgcctgcagaagtactggcagtccggactcgccgcaggcgccgtcaaggagtgatggagtcggctccgccgacgcggtgtcttcaccgcctcgcggcggggtccctccctccgtcccggctccgccgagacaaccttcctcatcagagggaggtaaaatagtgccaagccccccctctgacgagctgagccgttaggcaaacagccctgtgggctgtttattcccgcggacgcagattatcgataaaattcaataaaggagctgaatcatcatggaacgtaaagagttcaagtggccgcagccgcttgcgggcaacaagccccgcatctggtacggcggcgattacaaccccgaccaatggcctgaggaagtgtgggacgaagatgtagccctcatgcagcaggccggcgtcaacctcgtctccgtagccatcttctcctgggccaagcttgagcccgaagaaggcgtgtacgacttcgattggctcgaccgcgtcatcgacaagctcggcaaggccggcatcgccgtcgatctcgcctccggcaccgcatccccgccgatgtggatgacccaggcccacccggagatcctctgggtcgactaccgcggcgacgtctgccagcccggtgcccgccagcactggcgcgccaccagcccggtcttccttgactacgcgctcaacctgtgccgcaagatggccgagcactacaaggacaacccctatgtggtctcttggcatgtgagcaacgagtacggctgccacaaccgcttcgactattccgaagacgccgagcgcgccttccagaagtggtgcgagaagaagtacggcaccatcgacgccgtcaacgacgcctggggcaccgccttctgggcgcagcgcatgaacaatttctccgagatcatcccgccgcgcttcatcggcgatggcaacttcatgaacccgggcaaactgcttgactggaagcgtttcagctccgacgccctgctcgacttttacaaggccgagcgcgatgccctgctcgagatcgcccccaagccgcagaccaccaacttcatggtctccgccggcggtgccgtcatcgattacgacaagtggggttacgacgtggacttcgtgtccaacgatcactacttcacgcctggcgaagctcacttcgacgagctggcttactcggcctccctgtgcgacggcatcgcccgcaagaatccgtggttcctcatggagcactccacctccgccgtcaattggcgcccgatcaactatcgcgtcgaacccggcgaattggtgcgcgactccctggctcacttggccatgggctccgacgccatctgctacttccagtggcgccagtccaaggccggtgccgagaagtggcactcttcgatggttcctcacgcgggccccgactcccagatcttccgcgatgtgtgcgagctgggtgccgacctcaacaagcttgctgacgagggcctgctgagcaccaagctggtcaagtccaaggtcgccgtcgtcttcgattacgagtcccagtgggctacggaacacaccgccacgcctactcaggaggtacgccattggaccgagccgctcgcgtggttccgcgcgctggcggacaacggtctgaccgcagacgtggtgccggttcgcggcccttgggacgagtacgaagccgtcgtgctgccgagcctgaccatcctgtccgaagagaccacgcgccgcgtgcgcgagtatgtggcgaacggcggcaagctgttcgtgacctactacaccggtctggtggacgacaaggatcacgtctggctgggtggctaccccggttccatccgtgacgtggtgggtgtgcgcgttgaggaattcgccccgatgggcaacgacttccccggtgccatggaccacctcgacttggacaacggaaccgtggcgcacgatttcgccgacgtgatcacctccgtggccgataccgctcacgtggtcgcctccttcaaggcagataagtggaccggtttcgacggcgctcccgccatcaccgtcaacgacttcggcgacggcaaggccgcatacgtcggtgcccgtctcggccgtgagggtttggccaagagcctgcccgtgctgctggaggaactcggcatcgagacttcggctgaggacgatcgcggtgaagtgctgcgcgtcgagcgtgcggacgaaactggcgagaaccacttcgtgttcctgttcaaccgcacccacgatgttgcggtcgtggacgtggaaggcgaaccgctggtcgcctcgctggcccaggtcaacgagtccgagcacacggccgccatccagcccaacggcgtactcgtcgtcaagctgtaaaaccgcgcatagcgcctaattacccaacggctcccttgctgctcatcgtagcaggggagtcgttttcgtatctccagcaaagtcgggtagggtggtcaccgtgcgaggcaaaaacagagtgacgatggcggacgtggcccatgaggccggtgtttcggtagcctcggtgtctaattttctgaacaaacagccatatatgagcgaggcgatggccgcgcgtattgcggaagccatcgacaggctcggatacaaagtcaactcgtcggccagaaacctgcgttccgggcgtacccggttgctcaagctggttattcccgatctgcggcaggtgtacttctccgaactcgccgaggatattctggccgaggcccggcaacatggctacggcgtcatcgtggaatccaccactaacaatcgtgcccgcgagctggaaagcatcgcatcgatgggcacgcacagcgcggacgggctcatcttaagccctctgatgatgacggttgacgatatcgcagctttggagggcgattacccgctcgtactgttgggtgaacgtttgttcggcgtcaacgcgccgcacgtggtgattcgcaatcgcgaaggggccgccggcgcgaccccgttcgatacacaaagccccgtgacgaatcccgtcacggggcttttaccgttttaagccccgcctagtacactcgtcaccatgcgagtgatcggacagcgaatcaaaagaatggcaaccatagcagtgactgccatcctttccgta

SEQ ID NO: 981 - DNA, 21669 bp, Unknown
  R117_24m  MAG No. k141_23563
gcccaaggtcgattgctccttcagcacggtgacatcgccggcaggcgtatccaccacgtaggtgcctgtgtgtacggcttcagtctggtcggcatcgaaagaggcatcggcaatcaccgtgtcatagccctgctcgcgtgccgcggtcagcgcatccaacgtccaacagttgttgccctgccatgcgtacgcggagggtgtttcggagtcgtttccggcggcataccatgcggccgcctgcttggcgttccactgttcagtggtgatgccggccttttcgtaggccgcggtatcacccagcgcggtataggcggtgatgtcaaagtcggcgggctgcatgatgccggcaatggacggttgcactgcggactgacgccaatacagaggatccgcgatcacttgcagcgagcggtgcttggcgaatgtctgcccaagggatcgcgcggtatcggcatcctgctcggataaggatatggcttgcgtatcagtggctttggccgcgttgccggcgtcggcgttatcggacttgtcggccttgtccgtgctgttggacttggacgatgttgatgtcgaggaagtggtggtttcggcaatgcgattgctgatggccttgttatcgacctgccagccgctggcggtgtagggcatggccacggtcaggttcatggccggtgtcgtcgcggtgttgagcccatccgaagatcgggtcagaaaactcggcaaatcggcgagtatccgattgccgacgatatacgacagcatcagcggcttcggcccccagctccctatggaggcaagggtctgctgattggcgttcacctcgatggtgacggtggcagtgccgccggcgggaatcgatggcacgtcaacggaacccaactcgttgggggtggggatgggggcgttgttctcggcccaattctgaatatcggtgcgcgagacaaaggtgaacagcgtattggtggtcaggtgcagtgtgccgcttgacgtggccgtgctgtccgtattgctgatgaccgcggtgacatgatagcccgatttggaggtgacgatgggggtgctttgcgtgatggcaatgctctgcttgggctgattctcggtctgattgcccgttgcgtccgtcgtatcggatgaatcagtcgtgtccgtcgtatcgttcgcgtagacggtcaatggagcggccagcatcgccacaacggcgacgccagccgccagtgcgtgtgccagacgtgtgcaatgtcgtaagactccgggtaggttcactcgtttgcctgcctgttcttcttcctggcgtagagccacgcgattttgcgttcgttgggatagctcaacacgtcatccaaatcttcaaaacgtacccagagggcgtcttccgcctcatgatccgggtctccttccaccgtcagttcgcctccggtctgtttgagcgcgaagtgatggaccagcttatgcacgcgctgcgtggtgccggtgaaccagtagtcgatggtggcgatggaatcgatcacctcgcccaggatgccggtctcttcatgcacttcgcgcacagcggtctgctgcggggtctcacctttttcgatatgccccttcggcaagcaccattcgagatggccggagcgggaatgacgggcgataatggccacgcgattctggtcatcgaaaatcagaccgcctgccgaatattcgcgtacgaccggcagttcctgggcatccagtgaagcgaatgtggtcggaccgtccgacgtacggcgttgcggcatcatggccggagtcgggctggatggcgtcaccggttctactggcactgccggttccggcgaggcaacatccgcggacggatgccggccgaagaccgtggccggcgtgggatgcgctgacgttgcgggcctcactggtgctgcagacggcgctgagaccggcatggtgaccggcgttgcggccggtgcggtacgtgccgcaggcggcatcagcacgtcgcgcggagtcggtatcgctgcggtatgcgcggaggcggccttggcgaccgcaacggcagtatctacggccgcgtgggcggtcgccgcggaatcgttcgtgacgatggttacggacgtttgtgccgtggcgataatcggctcgacctcggcaatcgtctcggcaccggcctcgccggcgataccatcggcctgcccctcgatagtgccgctggtagtggcgatggtgacggtggcatgcatgccgaagacggtggccggtgtgggcatcatcggcttcggtgtgggcatgtcgctggcggcgtccgatatttcggattcggatggtgcgggtgtggcgggcgttgcgggtgtgccgggtacaccggaatgttgcgcagtcggtactgcgtctacttcgtcttgatgaacggcctgattggtggagtggctcgcggtgccgccggcatcgggagaatcgcccgaatcggcggaatgatgcggagtttcggacgtatacagcaggtggtcttgggtatggctatccgccgaatctggtgtttgccccagtatgcgggcaaggtcggcgggcgtaatcatattctccaccttactcaaccccgtgtgcaggtggggtaacggtatgctggtagggcagaaaaacgtcgcacgcgggaaggtgcccattgaatttcgaagtatggcccgaagccatcgaacttggtcgactgttcgccgaacagggttacgagctggcattggtcggcggcccggtcagggatttgctgctccatagaaagagccacgatttggacttctgctcatccgcacggcctgagcagttcgagccgatactgcgccggtgggggcatgacggcttctgggacatggggcgcaagttcggcacgctgggtgccatgcgccgccgcccggacggcaccgaggtcaaggtggaggtcaccacctatcgctccgacacgtacgacacggactcgcgtaagcccgaggtcaattatggcgacacgcttgagggcgacctgtcccgccgcgacttcaccgtcaacgcgatggccctgcgcgtgcccgacctgcaattcgtggacccgtttggtggtgccagtgatctgtccaagggtgtgttgcgcacgccggtggacccgcgacagtcctttgacgacgatccgttgcgtatgatgcgcgccgtgcgattcgtggcccagctgggcttccgtatcgcgccggacgcggccgaggcgattacctcgatgcgcgaccgcatcgacatcgtatccgccgagcgcgtgcgcgacgaactgaccaagctgctgctctccgaccgtccgcgcgccggccttgaggcgttggtcgaatccggtcttgcggacatcgtcttcccggagattccggccctgcaattgcagatcgacgaacaccaccgccacaaggacgtcttcgagcacacgatgattgtgctcgaacgcgcgatcgccctggaaaccggcccggacggcccggtgcccgcccccgacctgacgctgcgcttggccgccgtgatgcacgatatcggcaagccgaagacccgccggttcgagccgggcggcaaagtgagcttccaccaccatgacgcggtgggtgccaaaatgacccgcaagcgtttgaaggcgctgcgttttgaccaccatctggtcgaggacgtctcggaactggtgaatatgcacctgcgcttccacggctatgtggacgagccgtggaccgactcggccgtacgccggtatgtcaaggatgccgggcacctgtacgagcggctgaacaggctcacgcgcgcggacgccaccacacaaaacaagcgcaaggcgatgatcttctcccaggccatggatgagatggaggagcgcgtccgcgaactcaagaagaaagaggacttcgacgcgatccgcccggatctggacggcaacgaaattatggagttgctgggcctggagcccggcccgatgatcggccgcgcctacaagcacatgctggaataccgcttggataacggtccggtggaccacgatgtggccgtcgaagaactcaagcgctggtacgccgagattcagtagtccgatactagtccgataccaaaaaaccgtacgctgaatacgtgtcagcgtacggtttttcgcgaagatgaagctgtatgcgccttactccgccgtgtatgcgtcgtgtttggtgtcggcgggcagcttggtcatgctatcggcggccttgcaaccctcgatattggtgatggtcttaccggattgtggggaggatttggtgtcctgcagatcgttgaacgtggcgccgatgaccacatcgatgagttgatcctcgcgagccgtcatgatcatggtggcgtcggtgaaattgccgatcagcgtatacgcctgattaatggcgttcttgccgaagtagatggtggtgcgttcaacgccggtgctggaatagttatcgattttctgcacgctgaatccacgattggccaaagcctcacccacggccttggcgaattggccgtgagaggtgccgttcatcacgcggatgccgaccgaagcgttggacacgtattgcgctttgccgctgctgtccttgaccgcgcacggtgccgcgttgccgtaattcggctggcgggccggagtctccacttcgccgaggccgaaaacgtggaaattgaacagtagggctatgaccagcactactgccaataccgcgccgctgatggaaaagacgatggtctggcggtggcgcacgtacgccttgcgggcttcacgttcatcaacctgatacgtcatcggtggacttctttcatgggtcgggtggctggttgctaccttagcgtcactgtctgacgccgatattggggtgtgcgggagatttggctcgaataatgcgatcgaccacagccgtatcgcgccacacatcgataatgcgttgtgccgctgcctcgtcggcggcgaaagcgaccactgaggggccggatccggagacgaatgcatggctggcacccgcctgcgtggcggcgtcgatggcctgcccgctgcggggatgcaggctgattgccgcagcctgcagatgattgcggtcgccttctgcggctcccacgaggtcaaaggtgtggtagacctcaggagtgctgagttgcgactggtacgcgccgaccaatacttcgccgctgaatccctgttctatcagcgccagctcatcgcggctgccgggggcgatatccgtgatgcgttcgccgaaaccggtgccgtatgcaaggccaccggtcaggcagaacggcatatccgcgcccaacgtggcggcaatggtgcgcagacgctctataggccagttcagctcccagagacgattgaccgccagcatggtcgccgcggcgtcggctgaaccgccgcctagtccggcacccacgggaatgcgcttggtgatggtcaacgccacatccggctcgcgctcggccgcctgggccatggcgaagagggccagtaccgcatggttgcggcgcatgtcgctgcgtgaggaggccaagtcgcccaaataagcgccttcgagctccagagagaatcccgctccgggttgcttggcggttgcggtgacggtgtcgtatacgccgattgcacagtaggtggtgtccagttcgtggcgtccgccccattcgtcgtgagcaggtcccacttccaaggtgagattggttttcgccgggcaatccaccgtaatggtgatgggggagagctcatcgaactgatgtcgggcagcggctgggtgtggatgtgagattaccggactcattgtgcctcatctccatctccacacgattcgatggccttggccagagcggtgaattcggcgatggtgagcgtctctcctcgacgggtcggatcgatgccggcgatggagaatgcctcggagggcgcaatggtcttcaatgccgcgtgcagggtcttgcgacgctgaccgaacgccgcatcaatcagacgaaatacgagttcccgttgtgcgccgccgtcggccgtgctgttcgaggctcccggggcggccgggtcatcggcctgataccgggtgaatctgacgagcgcggaatccacattgggagccggccagaacacattgcggccgatggtgcccacccgttcggcggtgccataccaggcgagcttcacgctcggcgtgccgtagatcttggaaccgggcttggcggcgagtctgtcggccacctctttttgcaccatcaccaagaacgagccgaggttgtcgaaacgctccaacagcgtgagcagaatcggcgtggccacgttgtacggcagattggcgaccagcgtaaacgatgcgtcatcgctgaaatcaggcacgttctccggggtgacggttaaggcatcccgattgacgacggtgagtcgtgatgtggcttcgggcatgaattcggcgactgtgcccggcagtcgttcggccaacggcggatcgatttcaactgcggtcatggtggcgccggtttccagaatcgccaatgtcaacgatcccaggccggggccgacttccatgacatgatcggcagcggtcactcccgcctctcgtacgatacgacggaccgtgccggggtcgatgacgaagttctgcccgaatttcttggtggggctgatgccggcatcggccgcgatacgacggatatcggcggcacctaacaggtgaccggtggcgggaatggtgtcgttcataagcgtgtgttccttgtgggcttcgtaaccgatcagtaccaaccgatttgttcggaatgttgccatgccttggacgggctgccgtaggtttgtgcgatgtaccacagaccccaatcgatctgtacggcggcatcgtcacggtaattggcgccgaacgcagccattttgtctgctggtcgcgactgaggaatgccgtaggcaccggagctcgcgttttcggcataccacagccatctggactcgcggttccatagtttgaccaggcaatcccagtcgttgcctgtccacccgcgctgcgcggcggcaccggcggcataggcctgagcctgggctacggtggcgtgccagagtcggccggagggcgtggtggttgttcctgaatcggagccggaagagccggaattgttgttcgtaccgccgccggtgttaccggaattaccggtgttaccggaattgccggtgttgccggtgttgccggtgttaccggagttgttgccgccggtgttgccggcattgttgttggtatcggtgttcgtgttgttgccagagctgctgttgttcttgtcgcctgtgttgttggcattgttaccggacgactcgtgctgattgttggaaccggaatcggccttgccgttatcggcggagtcggattttttgtcggaacctttatcggaacccttatcggtatcagacttggcggcgcctacggcgatgatctggtcgatggccatcgtggtgacggtttcggatttcagcgtctccgattcggccacgccatcgacatacgtgacgttatacacctgggttttctcgccattgacgccttgctggcggatctccgactggccttcaggcagattggagtcgatgatggtttgtgtggagtatggcactacggctgtgcgcgtttcctcgccatgcgtcacgcgccgtacgcgcaggatagtggtatcgccgtccttttcgacgctcacacggtcctctttgttcagcacgatgcctttggagtcaagaatggaggccgcaggcagtttgccgttgggggccacggaagtcttgccgtccgcaatgacggtgaccgggccatcctgattgatgaccagtccgccggtgagctggttgtacacattgtcgatgtcgacggtgatttttgtggcgttgttctggttttcctcgaaaaatcccagcaactggtcggcactggtggccacggtccagaagggaacggacgtgccgtcgatgttgatagtggtctggtaggcggactgtacggtgaccacggcatgattggcgagttggtcgccggacgaggtagtgacgatatcgtgggtcttgatatccaccccttgttcctccagaagacgggtggccgtcatcgcatatgtggtgacttgggtggtttgcccgttgatgttcagggctacggatttacgcgcggtgaacgcgaatgatccagccagcgcgatactggtcgccgcgatacaggcgattacgcggatgcgacgcagtgtaacaaaccgctgcggggtccaacgccgtgccattgccatactcttcctgctggatgaacgattacgccacccatcgtaacggttgttccggcccgtactgcggtttcaccggccaccgtcaccattcctgctcgtcagattgttctgagctcaaaaaaagaaaagaaaaagggggcgggagagaaggggatgttcccgcccccctgaaggcgcggagctggttgggggacgctccgccctcattccaggaagcccatagttgggggaaggctcctggagtacttacccaaggtaagaattatatgcgtagaaaagtctacgtatcatataatacgccacttttctacgcgtcgagcctcttgtcgggatcgaaccgacgacctgccgcttacaaggcggccgctctggccatctgagctaaagaggcgattgttcttaacgcgtaaatcgttttgaacaaatctctagtataccggtagttctcgagtggtcaattcaggccgagccgcgccggtaattaatcggccagcgaaatcggcttcttgttggcgccgatcgatggcatctggccttccacgcccacctgatcggagtccaagccgatggacttgaggaatccgtccaccatgctggtgtccgccagcgtgagctgcttcagatcccagtattcgccattgatggtgagcgtgggggaggagaacgcgccggagctgttgaacagttcggggcgtaggatcgtgtagttgttggaggcggtgagccacttgacgtattcgttcttaccactgaatgccgcggtggccacatcctcgctcacgccggcattgacggcctgcttctccagcttggcgttgcttaccggctcgtaattggacaattcgcccggctggaaatcctcagcgtagatgttggagaggtagctcatgaggtgatcgggattgtcatcatgctcggcaatgtagatggcaccgttgaacgcgcggttggagtagttgtcggagctcttgttgtcctggaaattgaggaagtgcaaatcgatgttgagctggccggcgttcatcagcttgatgagcgtcgggtcaagctggcggttcaccgaggcgcagccggggcacagcggctccatgtagatggaaacggtgggcgccccttcggccttctgaccgtaccccttgctcgagatcacgaagccggccttgtcatcggcgttggccggctgggtactgactttcttgagcttgctataggcctcgtccacggtcatgttgctttgctggctactgctgctggtgttggacggccgcatagccttgtatacggcgaatccagcgatggccaccagcaccacaataatggccaccacaatgcagccgatgatggtctgctgcttacgttccttagccgcctgctcggcccgtgcctgctgggcggcctcctcggccgctcggcgctcagcgcgtgtggcacgcttggcctgacgcttcggatctgacatagctatccccttgcaatcgcttcaatgtttgggccccatcataatgaccgggcctgaggaggactgcgcccagagctgatctgaggtgaattccctgtaaaagtgtgacggaacgaacgtatcggatacacaacggccatgtgtgcggatggctgatgtgtgagattccgccccgctctaggcgaacggcatccagttgatcggcatgcccagaatcggcatcgcgcacaaggccacggtgatgatggcccatatggtgaacagcacggtgccgcgcccgccgcccttgggcgccggcgccactggagcaggtggagccccacccacttcggtggatggcgcgcccgccgggcgactgtgtttgagcccgcgcagtacgccgccccccagccgaatcatcatcgactgtggggcgaacacagtgaccagccagccgatggccatgaaaccgcccagcgccagcccggaagcggagaacggcacatcattgagcaacggcaccggaataccccaatcctcggtgaaataccaggagatggtgtgaacgggcagtgccagagccgcggtggccacggcggttcccgccatatagatgatgactagcagcagtatgcggggaatggccagcagcagggctttgaccagatgccagggaaaagtcgccacgcgaatccacgaatcggagtttttgcgctcgccgccgcgtttgccctcgcgctcaagctggggttcggtgttataggccagggtgagcagtagccacaacaacgcagtggccgcgatgatggccacgagcggagcatttgccgccagtgccgccagcggcgccgccagcaggatcaatggcagggtgccgcgctgcagatattcccctcgcttcacgtccaccggattgggcatgggaggattttggaccatggtttcggtgggggccgcttgggcggtttggtcgatgatgcgctgcaatgccgggcgaatggcggggtccaccgctgtgggctggttgcttgcgggatcccagctgctctgggcggtgccggacggggggaatgatgacggctgcggcgtggggagtacggtggtgcgctcggccagcggcgtggtcggggccggagtcgaatcggtgttggtcattggtgtggtggcgccggccattggtgtggtttggtccggcatcggtgtggtcgcgccggtgagtacctgtgtgccggcgtcgtcggtgaaatcggcagcagcgtcgggcaacagttgcgtggcctgctccgcaccggccggcggacgtggcggcatatcggctaagggcagcgtggcggtagcggcgccagccggcgagaatacggcggtttcgccatcgccgttatcgcccttattgccggagaacacggccatggtgggagcctcagcggcttcctcggccgcgcgccagatggttcggggattattgcggtcaacgccgccggccgcgccaaaagggggcatcgcctccgcggcttcggcaacgatcgcagccggttgtccagccacggctcccgcggcgaacggtcccgcctgctcgccctgccaagcgttgggattcaacgcatccaaggcgatggcattcagcaattgatccggcgtgcaacgatccctgcgatccgggtccagtgcagaacggaaggcagccaatgtgccggccggtagtccggaaagattcgcgttgcccgaggcctcgcgctcaagtaccgccatcatcggcttggtgccgaacacaggcgcgccggttgcggcaaaagcgagcacggacgccaccgaccaccaatcggtggcgtcgtcggattcggcaccgtcaataatctcgggtgcgatgaatccgggtgtacccatcactaggccggtgcgggtcacgtgactttcgccctcgcccatcgcgataccgaaatcgaccaataccggtccggcggccgacaccatcacattggtgggtttgatgtcgcgatggacgatgccggccgcatgtacggctttggtggcttcgatgagcttgcgggccaagcgttccagatcgtcgcccacataccggccattggcggccacatcatccttaagattcttgccctcgatgagttcagtgacgatgaacgccaacgtatcgtcgagttccatatccacgatgccgcacacacccggatgattgaccttcttcaaggccatggcctcgcgccgcaggcgctcgcgcggcgtgacatcgggcttgaggtcggggtcgtgcagggccgtggacgcagagccggagcctgccactgactcgtcggtcagggagtcgcgcagaatcttcatggcataggtggtgccgccgtcgtcgcgcacccgccacaccgaccccatagctcctgagccgagccgggagatcagcgtatacccaccaaccacttcgccgggctcaagattcaacgcgttcaaatcgctcatgccctccatcctaatgccttgccggtgcattattctggctctctcctgggaggccgagcttgatatttcttggctcccctctctgagaggggagccaagaataagtgccgtttacgtattgagaagtgccgtttacgccattaaggtcgattgccctgaccggatgtggtagcaaattatgcgctcgaaatgacaggataggtgcgtgggcaggtgcgccagtcgtgaatttgcgactctataaccatcggcatcaaggatgtgtcggcggtgacccaaaggtgagccagccgggcacattcaacagtggcacagcgatgcaagggcagtatcgtgagccgctgatcgaatcgataacgatatcagattcgaatgccgcgacttcgccggtcgtaccttcgaatacttctccgaagacggctacctgttcggcgtgatggcctcccagcaggtcgctggcgctcaggccaaggcctgaggtgtgtctccgataactgaatagctaaatagaatggacggcctgctgagtgctactcaacaggccgtccattgtgtatctgaatgcgaaaagtcattatatggaacggaatatatcgatactgtgcattgtgccgattactgattccgacgcaagtattcgcgcaggaagggcacggcaaaatcgacttcgcctcgttctgtttcgcggataacgaaggcgtcaaggaggcgtttgcggtaggtggcggcatagttaggcgttttgcccatgcgctgtgcaacattcacggtgggagagggaccatctgacgctgccatggcttcgagatactcacggtcgtttttggataagccttgcaactccgggatgcacacggcgttatcaaggtcaatacgtgcttcctcgatacctgccgtaacatcagcgtcgatgatggtatccgagtcccgcatgtctgcggcatcccagatatggtagccaaccagttgaatcatataggggtatccggctgtcacattggctgcagtgcttaattgagcgtcggtgatggacatgccggaggcgcggaatgttgtggcgaaagcatcacgcacttcatcaagaggaatatctgtgagcatgttcgttttcgcgcgacgtaggaacgtgatgacttcgtcattgaacaaatcagaaatcatctgtgggagaccggcgaacacgatggcgatattgcgtcgttccctgatttgatgctgtatggcagtggcgatggcaatcatgtcggatcgctcagccgcttgagtctcatcaatggtgataagcaacccagcatggcgcttctcaagcgcatccaaccgtccggcaatggcacttctcaacgtttcgggcatacgcttcggggatagttcggcttctccgaggccgatgcccgctccagcaaaagtcaacgatggtcggatagtgaggtggtcaagggcccctcgcccggttcgtaaggcatcaacaaggcgttcgcatagtccggcagaggccgtttcttcgatgacatcccatctgcgcgctttggcccggtctccgaacacagtgagcatcacggtttttccggttccacgagcgccggtgacaagcataatgcgccctggggcaccgactccgttatcgagacctttctcgaaatcgcggataactttgcctcggccgatgagcaggggcggttcccctcctgccgttggcttgaatgggttttcctttgccttcatgtggaccgcctcctcgctgaatcaacctaaaataaaaattatcaaaaatatcaaaaaaataaaaattatcaaaagttgggttgagccgactgaagaaaacagccgtggcgacaatgattctgccgcaatccgcggtgacaacaactgacgcggaccttcttggcagaatcgttgtttgtcccgcttcgccaatcaacgtcgctcaagttcggtgcgcagaccggctaccgtagcggtcagctcacgcacttcctcgcgcaataggtcgatttcgggattggctgatgttgcaatagcctcttgcgcggcttccttggccacttccttctcccgagcgtcctcgcgccgatccgtctccagattgacctgatccacgatccacgaggccagcgtggccgtcacaataccgatcaacgcgatgccggtgaacatcagcaccaccgcaatgatcttgccttggaaggtgaccggcgagaagtcgccatatcccacggtggtcacggtcacgaacgcccaccacaacgccgtgccgaagtcggtgatcgtggatccggacgccccgcgctccacggaatacacggccagcgcgcccacgtacatgagcattcccaccgcgccgaccgcgtatacggtgatgcgcccgcgcaccgccatgccggaggtgcggttcagcacgtgcagcacggtcagcaaacgcaacagtcgcaagggccggagcatcggcagcgcgatggtcagcagcgtgaacaggttgtgcttgaaccaccgccagcgatcgtcggccaaccacagcgagaccacataatcgacgacgaacaccacccagatcacgttgatgacggtttcacacagcgcgatatgcgtgcgggagagaatttcccacgaatacaccaccagaaacaccacggacagcaccatcagcggccagtccgtccacttcttccacgtcttcagtcccatattccgattgtagtggcgcgtccgctgcgccactgcggagcatgactccggacatcagtgttgtatacgttcgtatacatttcacgttgtgtacgaacgtatacagcggtatttttcatctcgtatttcccttatgactatcaccacagtgatataatcaagaatatgtaaggagagagaaggagccggccaatggagaccgcatcgatcgaactgtggcatggctcttcgcatgtcatcaagcatcctgaatacgggctggtcaagccgaacaacgattatggccgcggattctattgcacgcgcagcgtcgagctggccaaggaatgggcgtgcgcgggactggatgacggtttcgcgaatcggtacacgttgaccacggacgggctcctcttcctggacctgtcccagccgccctacaccatcctgaactggctggccatgctggtcgaaaaccgtcgtttccagccgaccaccgccgtcgccgcgcaaggcatcgaatatctgaaacaagtgtttctgccggatgccagtcaggctgacgtcatcgtcggatgtcgtgccgacgattcgtatttctcgttcgcccgcgcttttgtcaataacgcgatttccatcgaccaactcgctgaggcgatgcggttgggcgagctcggcaagcagatcgtactcgccagtcctcaggcattcgcggcactgcggttccaaggctgcgaaatcgcccgcgcttcgacctaccacggattgcgtaacgagcgcgaccgcacagctcgcgaagcctaccgccgcaaaagtgcagaagccgatctcgacggcctgttcatgcgcgacatcatccgcgagaaagtgaccaacgatgatccccgcctatgatgagacatacttgccggacgccatggccaacttggccggcgccttcgattatgcgctgaacgattgcgggttgccggtcggcctattcatggacttcttcgccacctccgaggcggccgcgcttttcgggcgaggcacgcccaaatacgtgtgtggcatgtccggcgaggagctggtggccgaaatcatgcggcaaaccggttgggcgcgcattctcgatatgccgccagccgcactgcgtgccggctcaacacccgaatactgggccggatgggtactcgcatactgccaatggaccaggggagtgcggttctcggacattctcgatgtgctgtcgctcgacgatatcgtgcgactgtacccgactctgcacgaagccgacgaaagccgattcgtcgacgtgtacgacgagcgggccgcccataatcgcaccgagggcgactcccggctgcacacgatccgcgtgcgcgccggactcagccaatccgggctggcccgccgctccggcgttaccctgcgctccatccaaatgtacgagcagcgccgcaaagaccttggcaaagctgccgtctccaccgtgctcgctttggcccgcacgcttggctgccgcatcgaagatctgttggagccgtaaagacgcggagtagtatcgcgccgcatcgattctgataactgaacaactacttttaaggcccggccggatgctcgtttggacatccggccgggccttctggctccacacggggtgccgaggtatccgttctccgcttcgaggggctgatttggccttccgtagaggtttactcccgtttcgaggggctggtggcccgctagaacacgggtataaacggcttcgccccaccgtcattccgccattttggggatgcgcttacttgagtaccagcccctcgaaacggagatagatctccggaaagggtcaaaacagcccctcgaaactcaagatggcggttgcagggcggttgaggatcagtcgaagagcggttcaaacgcaaatgtgaacaatgccacatgtgattgggcgggtcgctgcacgccgattttcgggggtgcatgggaatggcggaatatcaacgaaaaaccctatatctaggtttgttatgtgacacgcgccactacatatagtgccttgatttcaaatcacaccgctgtaatatggccttcgcttcactgttcatcagaaccacatcaaggggagtcgccatgaccgtcaccgtgttcaccaagccgcattgcccgcagtgcgatgccaccaagcgccagctcaccaagctgggtgtgccgtttgaaaccgtggacctgacgcagaacccctccacccttgagcagctgcaggccgccggtttccagcaggctccggtggtcatcacgccggacaactcctggaccggctaccgccccgacctgattcgcgaagtcgcccagcaggtggccgccgacaaccgcgccgccgccacggtgtccgcgtgagtctgagccagcccgaattcgcggccgaaggcaagacgatcggcgcattggtctacttctcgtcggcctccgaaaacaccgcacggttcgtggccggatgccgtttgcaggacgaaggcatcaacgtctaccgcatcccgttgcgggccgccgacccggcgctaaacgtccgcgaaccgtacgtcatcatggtgcccacctatggcggcggcgtggtcaagaaagcagtgccgattcaggtcaaacgcttcctcaacgatccagccaaccgcgggtggattcgcggcgtcatcgcctcaggcaacaccaatttcggtgaggcctactgtgccgccggagacatcatcgccgccaaatgcaaggtgccctacctctaccgttacgaactcatgggcaccccggaagacactgccgccgtgcgaaacggcctcgtccgcttcttcaccgaacagtaaatcttgaccccctcgaggtattggctcccctctccgaggggagctgtcaacgaagttgactgaggggagcaactgtctgagtaaacacacttctgccatattccaaggatttccaatgactgacctcaccgccaccggcctgccgctcgacaatactgccgacaccgcagcggaacagtacgacccggcgcacgattaccacgcgctcaacgcgatgctcaacctctatgacgccgacggcaagatccagttcgacaaagacaaggccgccgaacgcgaatacgtgacagggcacgtggccaccaacagcaagcggttcgcctccaccgccgagcgtctcgaatacctgatcagcaaccagtactacaaccctgcggtcttcaaccagtactccgctgaattcctcgaccgcatctacgagcacgtggaatccgccggctttgagttcggcactttccttggtgcgttcaagttctacacgtcctacgcgctcaagacgttcgatggtcgcctctatcttgaggacttcccgcagcgttgcgccgctgtggccctggagctcgccgccggcaatgagcagcaggccatcgaatacgccgacgaaatgcttgccggccgcttccagcccgccaccccgaccttcctgaacctcggcaaggcccagcgtggcgaaccggtcagctgcttcctggtgcgcatcgaagacaacatggagtcgatttcgcgcggcatcaacgcggccctccagctctccaagcgcggcggtggcgtggccctgctgctgagcaacctgcgcgagctcggcgccccgatcaagcacatcgagaaccagtccagcggcgtgattccggtcatgaagctgctggaggactccttctcctatgccaaccagctcggcgcacgtcagggcgcgggcgcggtgtacctcaacgcccaccaccctgatatcctgcgcttcctggataccaagcgagagaacgcggacgagaagatccgcatcaagtcgctggctcttggcgtggtgattccggacatcacgttcgaactggccaaacagaaggcccagatggccctgttcagcccgtacgacgtggagcgcgtgtacggcaagccgttcgccgacatctccgttaccgagcattatgacgagatggtggccgacgaccgcatcaagaagacctacatcgacgcccgtaagttcttcaccaccatcgccgaactgcagttcgaatccggctacccgtacatcgtgttcgaggacacggtcaaccgcgcgaacccgatcgaaggtcgcgtgaccatgtccaacctgtgctcggaaatcctgcaggttcaggagccgagcgcatacaacgaggacctcacgtatgcgcatgtcggccgcgacatctcctgcaatctgggttcgctcaacatcgctaaggcgatggatggcggcttgggccacacggtggagacggcgatccgcgcactcacctcggtggccgagcacaccagcatcaacgcggtgccttcgattcgccgcgccaatgaggagggccacgccatcggtctcggccagatgaacctgcacggcttcctggcccgcgaaggcatccagtacggttctgaagagggcctcgacttcaccgacatgtacttcatgaccgtggcctaccacgcctaccgtgcctcgcacgcgctcgccgtggagcatggccgcacgttcgccagcttcgctacgagcgactacgccaagccggccggccagggcaactacttcgacaagtacaccgatggtcgtcgttcgctcactccgcgcaccgaacgggtccgtgcgctgttcgaacagtacggcatcgcgatcccgactgcggccgactgggaggccctgcgcgacgcgattctgaaggacggcatctacaaccagaacctgcaggccgtgccgcccaccggctcgatctcgtacatcaaccattccacgagctcgattcacccgatcgcctccaagatcgagattcgcaaggaaggcaagatcgggcgtgtgtactacccggccgcctacatgaccaacgacaacctcgggtactacaaggacgcctacgagatcggctggaaggccatcgtcgacacgtacgccgaggccacccagcacgtggatcagggactgtcgctgacgctgttcttcccggacaccgccaccacccgcgacctcaataaggcccagatctacgcctggcgcaagggcatcaaaaccctctactacatccgcatccgccagcaagccctggaaggcactgaagtccaaggctgcgtctcctgcatgctctgatcgttcgagggagcgtataccgcctttcttcggcactcgacgtaccttcgtacgccttcggcctcagacggcggtctccgcacgcattgaacaaccagagagccgttgttactcccctcactcggctaacgccgacagctcccctcagagaggggagctggccgcgaagcggactgaggggggctccaccatctaaggaaccaacaatgtcacgaaccatctatagagcactgctccggctgaccgcgccggaggagttcgaaaacaaatccaacgacgataacgacaacgacaacgacaacgacaacgacaacgagtaataaggaacactcatggcacctatctccattccgcgcaaaccgctgaaactcatcgaccgcgtctccgcaatcaactggaaccgcctcgaagacgagaaagaccttgaggtctgggaccgcctgaccggcaacttctggctgcccgaaaaagtccccgtctccaacgacatccccagctggcagaagatgaccgaggacgagcacacgctcaccatgcgcgtcttcaccggcctgaccctgcttgacaccatccagggcacggtcggtgccgtgagcctgattccggacgcgctcaccccgcacgaggaggccgtgtacaccaacatcgccttcatggaatccgtgcacgccaaaagctactcgtccatcttctccaccctgtgctccaccgaacagatcgatgccgcattcgactggagcgagaacaacgagtttctgcagaagaaggcggaaatcgtgctcgactactacgagggcgacaacccgtacaagcgcaaggtggcctccaccctgctcgaatccttcctcttctactccggcttctatctgccgatgtacttctccgcgcacgccaagctgacgaacaccgccgacgtgattcgtctcatcatccgtgacgaggctgtgcatggctactacatcggctacaagtaccagaagggcatcgcccagctgagcgatgccgagcgcctggatctgcaggactacacgtacgacctgctcaacgagctgtacgacaacgaagtggagtacacccagtcgctgtacgaccgcgtgggcctgaccgatgacgtcgagaagttcctgcggtacaacggtaacaaggcgctgatgaacctcggctacccggctttgttcccggctgagatttgcgatgtgaaccccgcgatcctggccgccctgagcccgaacgccgacgaaaaccacgacttcttctccggctccggctcctcctacgtgatgggcaaagccgaagaaaccgatgacgacgactgggatttctaagggtttcgcggtccgcgaacccgcagcgccgccgcgttcgcacgacggcgctacgctggaggcatggaacaggagccgttggtcagcatcatcatcccggtatataaggtcgagaagttcctcgacgaatgcgtggcgtccgttgccgcgcagacgtacgccaatctggagattctgctggtcgacgacggctcgcctgacgactgcccggccatgtgcgacgcctgggccgcccgcgacccgcgcatacgcgtgattcacaagcccaacggcggcctgtccgacgcccgcaacaccggcatcgccggggccaccggtgcgtacatatacttcgccgattccgacgacaccgtggcccccacgttggtggaggactgcctgaacgccatgcgc

SEQ ID NO: 982 - DNA, 30229 bp, Unknown
  R117_24m  MAG No. k141_24020
catgttcggcgccgtcgactagcaccagctgcgcgtccacgccgtgctcggccagccggtcgcgcatcttgacggattgatggtaggggaccacggtgacggcggtgccgtgcaacaggagcatcggtggatactgctggtcatcccgcacctgcaggtaggggctcatgtcagccgcgcgctgacggacctcggcattgatgccggtctcatgggtcgcgcccaccacggccgcgaacgggccgaaataatacagccggaatggattggtctcatcgtcgaatgcgtcgacagcttcaagcatgtcagtgggcgggaagcagctgaccacgtacttcaccgcatcgctctcatcggcattggtgccgtcctcataccgcggagcgtcggcggtccaccccaccagcagcgacgtgttgccgccggacgacgtgccccagataccgagacggtcggggtccacgtgccattggcgcgcgtttgccctgagatagcggatggctgcttttacgtcctcgagatatgcggggaacacgtcgtggggatcgctcgaggcgtcgcgatgattcaccgtagccaccacaaagccttcgcgggccaaagccgagagctgcgggatctcgtagtcgcgatgcggcgtggtccaggcactgccttgcacgaataccacggtggggtagcggcggttatcgtcatcgccggtggattgcggggcgatgatatccattaccagatcatcggccccggtcttgtacgccacgttgcgggtcagcgtggccaatccggcaagcgtgggattgtgcgggatatggatgacattgtttgcgccggcgttggcatcactgactttggctgaatcggtagtattcatggaatccccctagctctgttgctatagaggtcatcatacaagaaatgggcatgattacggcacaacgatgtctcggtcacagcgaggacatgaagacgcgaagacgcgcccggcagcgcgcgctgcctgcctgcgagttgccttcaagtgcacttcaagcgataaggtgacataagcagcggcaatggagattgctgcccggcaacgaagcggacagtgcccgttcgccgattcacgataacagaaatgagacactatgaagactcaggaaatcggacaatccggcatgattgcgtcacgagtggcgctgggcgtgatgcgcatggacgcgttggatgccgccgatgcggcacgtaccgtggccgtggcccatgattccggcatcgactatttcgacacggcggaatgcatacacagatgctcgacgctgaaatccaattcaatatggcgagcgatcccgcagccgatcgcaccggtggcatcctgccttattcacgactgaagcatatgaccattcaggcatggtgcccattccaatccggcacggaatacggtccgttcgtcggcaacgagcatttccccgagctgaacgccgaattgacccgtcttgccggcaatccgttggtgtgagcgagagatgacgagaccaatgccgttgaggcgcgtgttcagcgtgcatacatctcaacggcggtcaatgctgtgtcaatgccaacattcagtgcctccgggcgtgcaccatctggcgaaagctgatgtgtatgtccatacagcagcctgcgaccgtcaaacggcaacgccttgccgctgaacttcgccacatcatcgggccaactgtatgccagatcctcccgatacgggtaatgcgaaagattgaccgtaccgagtccctcaatctcaaccgtatcgtgcggctccaaactttcgaacaggttaagtgcggggcggtcttcccgccaccagtcatcatggttgccgatcacaccatgcagatgcttgcaattgagcgctcacaggcagttcttcagatgggtcagcgatgtgcggaaaccgatatcacccagaatccacagctcatcatccgggccgaccaaagtgttgatatgatccacaatcgccttgtcatgcgcatccgtatcggcgacctgacgaaacgtcagacccgcgccgaacgtctcctccttggcccaatcctcggcggtcttgcgatcatgcgcgtcgcacctcctcatagcgcgagcgcgtcggatcgaacgtcgtgaaccctcgcaacaccgtgaccagcggatgcccgaaatgcgtgtcggtcgtgaaatacctcatgacagtcgccttcccttttcggcgtgcagcaatgatttcccatcctaggcgcagccggcacctgtcggttcgtgttgccataatgaggcgcattgcaggggaacccgtgaacgcaagctgccggtcatcgtggcggcgaacgggttgagaaaggcgctgtgcctgacccttggaacctgttggccaacaccatcgaagggggcaaacgatgtcttttgacgccgccgcattcggtccgatcaccctgaaccacctgccgccgttcgcccagcgcctacgacatgcagtacacgtggaaacccgaatgggatgtgtgaggagttcgatggatgagcggtgggcacgtgctttgcgcgccaaaggcattgatattgacgaggttgaaggtgctggtgagaaacgggcgcacgacggcaaacggcataccaacatcacgggtactggtcgacgctccgagtcccaaccggctgccgggctccgcggtcgatccaataccagtacgaatctgccggggccgaaggtgacggcacgcgccacgccattcaaggccaccggtcataagggcggcatcagccggcaggggaattgagctgatcgcagaaccatcgcgcgatgaatgggcgtggccaacgccattccgccattgttgagccgcttctacttggaccggtacctctttgaacggagatattccatattgaagctattccggcatcatatggcacgtaggaaatcccggatatcggcgatttcctcatcacagatggcatgggccatgccggaatactcgcgataggtcagatgcccggcccgttcaaggacctgatgggccgtttgctggtcgggcatcggaatcgtgcggtcctgcgcgccatacgccaggaagaatcgggtaggggagtcaagcgccgcctgttcctcgcccatgaacgaaggactgagcaggatcgcggcatcgaacaacgtcggatgcgccttgaccagacgatacgacagataaccgccttgggagaaaccgatcaatatcttcctgcgatgggcgaatgccgaggcatccagcagtgaagccaccgcatccccgaccgccgcgcattcgcgttggcgctcgtccacgccgcagccgtcgggataccagtaattgccgcccatatagggcctcgcgtaggtggcacggaacgagatatagctgggtacggcggcaattgcggccggggccgcatcggctcgcgtcggcgcatatacggcgtcgagaatccgcaccatctcgctttcgtcgttgccgtaaccgtggaacatcaggaaaatggggtcattgccgccggcatcgatctggcttgtcatctgcattcgcatcgtcatcacctcaccaacgagcttacatgcattagacttgtagcgattgacccaccgagcacacaaggagcaagttatggagccgaggcgcgggcctctcaccgcaggcgagaaggtgcagttcaccgaccgcaagggcaagaagatcaccgatcagcttgtggccggcggctccacgcagaccgagcatggcctgattctgcatgacgatgtgatcggcaagaccgaaggcaccgtgatcctcaccgtgcatgccaagcgcgaggcacaggtcaatcaggtctaccccgagaaagacaagaacaagccgtggaaatcgtcgcgcgccatcggcggctgggagtatgcggtgatgcgcccgcgactggccgattatgtgctttcgatgccgcgcggcgcgcagatcatgtatccgaaggacatcgcccaggttgtccagctcggcgacatccgctccggcatgcgcgtgcttgagtccggtgccggctcgggcgcgatgagcgtgaatctgctggacgccgtgggcgagcgcggccatctgaccacgatcgagctgcgccccgaattcgccaaagtggctcaggccaacgccacgctgtattacggtgaagcccccagctggtgggatctcaaaaccggcgacttcgactccgtggccgccgaactgcccgaacactggttcgaccgtatcatgctcgacatgctcgacccgtggaacagactcgagcaggcataccgcgtgattgcccccggcggcgtgttggtcagttacgtaactaccaccacgcagatgagtcgactggccgaagccctgcgcgcggccggttgctggaccgagccgcagatccaggaatcgttcgaacgcacatggaaggcccaaggcctcgccgtacgccccgaccaccagatgatcggccataccggtttccttgttatctcgcgcgccatggcctccggattcgaggcgctcagaaagcgcgatcgcgtgaccaaggacacgcagaccgacatcgactcgctcaccgacgaacagcgtgaggcgcagatcgaggaactggaactgcgcgacatctccgaccacaaactacgtaaggtgttgcgcgacctcgaccgtcaggtgggggaacttggcaacacgcacgaataaccgccaaacgatgagtttgtgaacgctcacacacctctatactggaagcaacaccacaccgccacaccgggcagacggttcgtgaagggagccacggatgggcatcaagctgagcaaagtcgccaaagcagcgaaaaaatacgaccatatcctcatcatcatgaggcatgccaaggccgagccgttcggcgacaagggtgactcggagcgcgagctcaccgacaaaggtctgaaacaggcgaaggccgtgggcaagggcatcgagtcgctgggactggtgcccgaccagatctcctgctcgtccgccacccgcacgcgccagacactggaccgcatgctcaagacctttggcgacaagccgatcgtcgactaccgcatcagcctgtatgacgggggagtgcaggcggtgttcgacgagctcgcccacgtcaaggccaagaaccgcgtgttcatgatagtgggccacgagccgactgtgtcgatcagcgcccaatggctcgcctccgccgactccgacggcgaacgactcgacctgctcaacttgggactttcgcccgcatccatcgtgatcatgggatcgaacaaaccgttcgacgaatggcaggtgcacagcggcgaactgctcgcggtcatcaatgtgaaagacttcgactaaagcggatataaattccatctataacgacactctgcggccatttataaggggtggaatccggatgttttgctaccctaagtcgggttacgaacgcatacattggaggattcatgtccactctgacttccgtctccggcttcccccgcatcgggcagaaccgcgaactgaagaagatcatcgaaggctactggaagggtgccaacgacctcgccgccgttaaggccaccgccgccgaactgcgcgccaagcactggaagctgcagcaggccgccggcatcggcctcatccccagcaacgacttcagctactacgatcagatgctggacaccgccatcctcctcaacgtgattccgaagcgttacgagcgtctcgccttcgataaccaggaggacacgctcttcgccatggcccgcggctaccagggcgacaagggcgacgtgaccgccctgccgatgaagaagtggttcaccaccaactaccactatctggtgcccgaagtcgagtcggccgcggagatcaagctcaactccaccaagccgttcgacgagttcaacgaggccaaggcgctgggcatcgacaccaagcccgtgttcatcggcccgtacacgttcctgaagctcgcccgcaccccggaagccaccgaactcgagctcgacaagggcctggtcaacgccgtggccgccgtctacgccgaagtgctcgacaagttcaacgaactcggcgccgcatgggtccagctcgatgagccgtacctcgtgctcgacaaggagccgggcgatgtggagctcttcaagaccctgtacaccaagatcctgtccgccaagggcaacgtcaaggtgctgctcaacacctacttcggccacatcgccgacgtgtacgagaccgtcaacctgctcggcttcgacggcatcggactggacctcaacgaaggccgtgaagagaacctcgaagccgtcgccaagtatggcgtggcctccaacaccgccatcttcgccggcgtgatcaacggccgcaacatctggcgcaacaactacgccacctccctcggcctggtcgacgccctgaagcaggtcaccgccaacgtggccgtctccaccgcatcctccctgctgcacgtgccgttcagcactgaaggcgagaccggcatctcgtccgaagacctcaagcacttcgcgttcgccgtggaaaagctgaccgagctcaaggaagtcgccgctctggccgacgccaccgaggacgagaagaaggcatccgccgccctcgccgccaaccaggccctgttcgacggcacccgcgtggccgccgacccggccgtcgccgagcgcatcggcaagctgtccgacgccgactacgtgcgccagcctgcccgcgaggagcgtcaggccctgcagcgcgaggccctcggcctgccgctgctgccgaccaccaccatcggctccttcccccagaccaaggagattcgcgccgagcgcgccaagctgcgcaagggcgaggtcaccaaggaagcctacgacgagttcatcaaggcccagatcgacgccgtcatcaagaagcaggaggagatcggcctcgacgtgctggtccacggcgagttcgagcgtaacgacatggtcgaatacttcggccagaacctcaacggcttcctgttcaccaagaacgcttgggttcagtcctacggcacccgttgcgtcaagcctccgatcgtctggggtgacgtgtcccgcgccaacccgatcaccgtggaatggtccgcgtacgcccagtccaagaccgaccacgtgatgaagggcatgctcaccggcccggtgaccatcctcaactggtcctggccgcgcgaggacatcacccacgaggagcagaccaagcagctcgccctcgccatccgcgacgaagtgctcgatctcgaggccgccggcatcaaggtcatccagatcgatgaggccgccctgcgtgagaagctgccgctgcgcaagtccgactggcacgtcaagtatctcgactgggccgttccggccttccgtctggtgcactccgccgtcaagccgaccacccagatccacacccacatgtgctactccgagttcaacgacatcatccgcgacatcgacgcgatggatgccgacgtgatctccttcgaagcctcccgtggcgatctggtggtgctcgacgccattcatgacgcgcacttcgagaccgaggccggcccgggcgtctacgacatccactccccgcgtattccttccgagaaggagatcgaggatcgtatctacgagatccttgacaagatggacgtcaagaaggtgtggatcaaccccgactgcggtctgaagacccgtggtaacgccgagacctggccgagcctggagaacctggtcgccgccgccaaggccgtgcgcgccaagctcgacaagtagcggaaatcaccgagctccctctgtatgagggagctcgggtttatgtaaggaaatcagcatgcattccccgatgttcacccttgaggtctttcccccgaagcgcaacgctcccgtggacaccatctatgacaccctcgacggactcgaagggctgaaccccgacttcatctccgtgacctacggtcacggcacccattccgaccgcaccgccaccgcgcgcattgctcatacgatcagcaaggagtacggcattcccgcagtcgcgcatctgaccgcgttgtattccgacaaggcgaaaatcgacgaggccctcgacatgttcgagcaggccggcgtgagcgccgtactcgcattgcgcggcgactacatcgacggcgagcagctggtaggcgagttcaaccacgccagcgacctcgtgtcatacatccgctccgtgaagccgggcctcaaagtgttcggcgcctgctacccggaaggccactaccaggctgactcgctggaccaggacatcgaaaaccttaagatcaaggtcgatgccggcgtcactcacctgatctcccaactgttctacgacaacgaggacttctatcgcttcctcgacaaggcgcgcgccgccggcatcaccgtgccgatcgaggcgggcatcatgccggtgcgtggtgccaagtccgtgcgtcgcatggccgaacgcaacgcctcgcgtatcccggacaagctcaacaccctgctgaacaagtgggaggacgacatccagtccctgcgtgccgccggcatcctctacgcttccgagcagatcgccgacctcgtggcccacggcgtggacggcgtccacctgtattcgatgaaccaccccgccaccacgcgccgtatctggcgcaatgcggaaccgttgttcctcggtacgcaaggttgacgcatatcgcggcgcggcgcatctcaatgcgtcgcgccgcacgttaatctgctggcgaaacccagagttcccccagcggccgatggatatcatgaacgtacaagccaaccaaagcgatggaaggaagtccgttatgtgcactggtgtccgtttctccgatgatgagggcaacacctatttcggccgtaatctcgactggagtttctcatatggggagaccatcctggtcactccgcgcggctaccactatgacacggtgttcggtgcgggcggcaaggcgaagccgaacgcggtgatcggcgtgggcgtggtcatggccgataggccgatgtatttcgactgcgccaatgaacatggtctggccatcgccggcttgaatttccccggctacgcctcgttcgtccacgaaccggtcgaaggcacggaaaacgtcgccacgttcgaatttccgctgtgggtggcgcgtaatttcgactccgtcgacgaggtcgagaaggcgctcaggaacgtgacgctcgtctcccagatcgtgctgggacagcaggagtctctgctgcactggttcatcggcgacggcaagcgcagcatcgtcgtcgagcagatggccgatggcatgcacgtgcatcatgatgacgttgatgtgctgaccaatcagccgacgttcgacttccatatggaaaatctgcgcaactacatgtgcgtcagcaacgagatggccgaaccgacttcatggggcaaggcctccttgaccgcctggggtgcgggtgtgggcatgcatggcatcccgggcgacgtgagttccccgtcgcgcttcgttcgtgtggcctacaccaacgcgcattacccgcagcagaacgatgaagccgccaatgtgtctcgcctgttccacaccctcggctccgtgcagatggtggacggcatggcgaagatgggcgacggccagttcgaacgtacgctgttcaccagcggatattcgtccaagaccaacatctattacatgaacacctatgatgaccccgccatccgttcctacgccatggccgattacgatatggattcctcggagctcatcagcgtcgcccgatgactccttcccggctcatgccccattcggagggcatgagcgtatatagtggaatcttatggaatcgtcgatgttcaaacccagctccatggatctcatcagggcaggtctgcaagacctcgacaaggcccgcaccttgttcgaccagctcaagacggacgacattcccgatgagcgatgcgccgaactgctgagcatgctggcccacgcctgcgaccccgatatggcattgagcaatttcgtggatatcgtcaacgcgatgcaatccagccagcgcgatctgaaacacgtcatccccgacaacgacgccctgaagcgtctggtcacggtgctcggcgtctccgacgcgatgggcaagttcatgcgcttcaagccgcagcttgtggaggccgcagcagtcgacaactgcaacagccatctgttcaatcacgcgcaacgccgtgcacgtctgctcaaggcggtcggcgcggacccggacgaaccggccatgcccgtcgcctccaaggatctggccgaagcggccacggccttgcgttccagctaccggaaccaactggccgccatcatcgcccaggatgccgtggcggacgacccggcctccatccaaccgaccatcagccgcgaactgtccgacctcgcggacgcggcgctcgaaggcgcgctggccatcgcccgccacgaaaccgagggcagcgagcacgtgcgcttcaccatcatcggcatgggcaaactcggcgcacaggaactgaactacgtctccgacgtggacctcatctacgtggtcgaaccggccgacaaggacgtggaccatcagacgctgatccgcgtgggcaccaagatgggcaccatgctgcagcgtgtctgccagtccgccatcatgggcgtggccgagcagccgctgtggcagatcgacggcggcctgcgcccggaaggcaaggacggcgcgctggtgcgcgtgctctcctcgcacaagaactactacgagcagtgggccgagaactgggagttccaggcgttgctcaaggcccgcccggtggctggcgaccccgacctcggccgggcctacatggatatgactcggccgttcgtgtggagcgcgtccaagcgtaagaacttcgtctacgactgccagaaaatgcgcaagcgcgtggaagatctgattcccgcacctctgaaggatcgcgaaatcaagctcggccgcggtggtctgcgcgatgtggaattcaccgtgcagatgcttcagcttgtgcacggccgtaccgatgaatcgctgcgcaccagcaacacgctcgactcgctgcagcgcctgtccgaaggcggctacgtctcgcgcaaacaggccgtgcgcatgtctcaggactaccgcttcgagcgcgtgatggagcatcgccagcagatctggtccctgaagcgcacgcacctgttcccggacctcggccgggcctcggtcggaggcctcgaaaagaagcgcgacatcgacgtggatgagctcaaccagaaccaggagctgcgtcgcctcgcccgcgcattcggcctgcacccggaagaactcgtcgacaaatacgacgacacccgtcgcgaagtacgccacctgcacctcgacatctactatcgcccgatgctgccggtcaacgcccagatggagaacgaccagatcgtgctgagcgtcgaggccgcacaggaacgattcgaatccatcggcttcggcgacccggacgccgccatccgccacgtgcaggcgctcactgccggcgtgggacgcgcggccaaaatcaaccgcatcatcctgcccgccgtcttgcagtggctgggcgagggccagaacccggacatgggcctgctcaactggcgcaagctggaggagaacttcggcaccgaatccggctacctcggcttcctgcgcgactccacctccgctgcccagcgtctgtgccacatcctgtccaactcgcgattcctgggcgacgcgctcaacaagtcggtcgaatcgatcagttggctcggtgatgacggcaatctgcaggcccgcacgcgcgaggcattggatgtgcagaccggctcggcgctggaacgtttcggctcgaacatcaacgagttcgccacctccatgcgcgccatgcgccgccacgaaatcgaacgcatcggcctgtcttggatgagcggtgtgatcagcgactccgacagtctcaaggccatgaccgacgtgtatgacgcgatcatcgacgcctcactgacctgggccgtgcgccaccagatcgccgcgttcggcgtcgaaaccgcgccggccggcatcaccgtcatcgccatgggccgttacggcgggcgcgaagtgaacttcagctccgatgcggatgccattctcatctaccgtccggccgacgatgccgacgacggccaagccaacgccttcgccaagaaggtcgtggaagacctgcgcaacatcctgcaaggcccgacgacgctggaacccaagatcgaactcgacctggacctgcgcccggaaggcaagaacggcccgctcgtgcgctcctacgcctcctgcgaggaatactacgaatcctgggcctcgacctgggagcgccaggcgctgctgcgcgcccggtacgcggccggcgacgccgaactggcgcgggacttcctgatcaacatcgccgacccgttgcgctacccgaccacggagctgaccgaggccgaattgcagaacatccgcaagctcaaggcccgtatggaggccgagcgtctgccgcgcggcgtgcgtcgagaacgtcatctgaagctcggcaagggcggtctgtctgacgtggaatggaccgtgcaactcatgcagctccagcacgccggcgatatcaaagatctgcgcgtcaacggcacattggaggcattggacgtgctggaggccaagaagctcatcagcgctatcgatgcgattcagctgcgcaaggcatggacgttgtgcaccgcggcccgcaacggcaactatctgtggagcgggcgcgccaaccaggccgatattctgcctgatgacatctattcgctgggcggcatcgccgtctacctcggctacggcgcccaccgcggccagcatttcgagaacgacctgctggccgtgatgcgcaaatgccgtgacgtatgccagcgcctgttctacgggcaggccgaagacgaggcgactgcggcaaccaccgccacggcctccgccgcaacgcagcagccgcaaaccgcgcttcgcccgcgtatgcacgtgatcgcaccgcgactggagcggaaccgacgccgcgcgcagcgatagacctttcttgtattgcgttcactacgttcattaggtcgattcatcgttcattaggtcggtccgccgccgcataccttgttggaatggcggcattccaacaacagatacgagggtgcagtgacctaatgaacgtcaaatcgacctaatgaatgagctctggcgttccaaagcagatatcagctatacagacacagcatattcgttggattttcaggtgaacactcggtgaatgcggctgtccgaaaaatggcgtaagttatattaggtcacacaagggtggccacctgaaaaccacgagcgaaaaggtgagccttgtctgaagaaacgccaatggtcggcaaaagcgtcgtaacgctggacggcctgtctacaaaccagattctcgacctgctgcataaggccgaatacatcgattcccaccgcaaagaggttgcccatacctgcgatgggcgagtgctggccacgctgttctacgagccctccacccgtacgcgcctgagctttgagacggcaatgctgcgtctcggcggcaaggtcatcggattcgccggcgcgcagctggcctccgtgaccaagggcgaatccatcgccgacacgttgaagaccgtgtccaactacgtggacgtggtcgccatccgtcacccgaaggagggtgccgcgctggtggcctcccgcgccgcatccgtgccggtgatcaacgccggcgacggcggccacatgcatcccacgcagacgctggccgacctggccacgctgcagtcgcgcttcggccgcatcaccgacctgaccgtgggactgtgcggcgatttgaccttcggccgcaccgtgcactccctgatcgagaccctgtgccgcttcggcaacgtgcgcttcgtgcttatcagcccggacgagctcaagaccccgcagtacgtgatcgaccgcatcaacgccactgacaactgctcctacgtggaagtgcgcgacctggcctccgtgatcggcgacctcgacgtgctgtacatgacccgcgtgcagaaggaacgcttcttcaacgaagacgactacctgcgcctgcgcgacacctacattctcgacgaagaaaagctgcagctcgccaagccgtccatggccgtacttcacccgctgccgcgcgtcaacgaaatctccgtggacgtggacgacgacccgcgtgccgcctacttcgaacaggtcaagaacggcatgctcgtgcgcatggccctcgaaagcaccgtggtgggcgacgaactacccggatacgaaccgctcaaccccaaggaggttcaggcctgatggaagtcaccagcattcagaacggcatcatcatcgaccatgtgccggccggaacctcgctgaaggttctcgaatacctgaaaatcgaaccggccaaaaccaagcttgcgctcatcatgaacgccaactccaagcgttacggctccaaggacatcatcaaaatcgaggatgacaaggacatcgacctcgacgtgctcggcttcgtggcctgccaggccaccgtagacgtggtgcgcggcggcaagatcgtcgaaaagaagcagccgaacctgcccgagcacatcgtcggcgtgatctcctgcgtgaacccgcgctgcgtgaccaccaccgagcccggcatcaagcagatgttccacctcgtgcactctgaacggctcgaataccgctgcgactactgcgacgaggaagccaaactgtgagcatcaccctacgcaacatcaaggtctggaacaccggcgaagtcatcgacctcgtggtgcccgggaccgctgccgcctacttcgccgacacctccgccgtggctgacggtgccgatatcgacgccaccggactgaccgtggcccccggtttcgaagacccgcacgtccacttccgcgatcccggccagacctacaaggaatctatggtctccggctgccgcgcgtccgcatccggcggatacacgaacgtgctcatcatgccgaacacgttgccggcactggatgggcagaccgtgtctgacctggaagcggccggtgcgaaagaggttctggatgccggcttcgacaacgtcatcgacttcctgcagcagtacgatactgcgcacgatgttcaattgccggttcgttacgatctgtgcgtgtgcgcgtccaaggatcgcgccggtcatgaggcaagcgacgttgccgactggctcaggtacgtgcccggattcgaggacgacgccaagacgccggccatgctcacgcaccccatcaccgcaattagcgacgacggttccgctgtgacgccggagatcctggaccaggtgctggagaacgtcaaggcctccgacctgtacctaatcgagcattgcgagcatcacgatacaggtgccgtgaacgaaggcccggtctcgcgcgaacttggcgtgcccggcattccggaagacaccgagctcaagatcgtggcccgcgatatagaagcggcccgccgcactggtgtccacgtacacttccagcatgtgagcactgccatctcgttcgaggcgattcgcaaggccaaggccgaaggattgccaatcacctgcgagaccgcgccgcactatctggcgttgagcgacgaggcgctgctcaagtacggcacgctcgccaagatgaatccgccgctgcgctccgaagcggaccgcaaagccaccatcgcggccatcgccgacggcaccgtggatctgctggccaccgaccatgcgccgcacacgttggcagagaaggaactcggcttccttgaggcgcccaacggcatcatcggactggaatgcgcgtacggcgtgtgccacaaggtgctcgtcgacggcggcttcatttccgatgagcgtctgatcgagctcatgtccgtgggacccgccgaactcatggggcatgtgccaaccgacgtggccgcgctggtcgaggactacgccgaacccgcgcccactggggatgatccggatggcgtgattgcgggggagagcgacgctcagccgcagcgtgaaggcgtcaaccgactgctcgacctgagccgcgtggatgacgccgacaatgtcgacctcgtggtgctcaacaccgctgaggaatggaccgtggaccctgaacagttccactccagggctcgtaacaccccgttcggcggctggcaggtcaccggacgccccctcgccacgatcatcggctcccagctgatgttcagccgtctgtagataacataaggagcagcatggatcgcctgatcgaagcgattgacaacactcagaaccccagcgtcgtgggcctcgaccccaccgaggcgttggtaccgccgcaggtcgtggcgagctttgccgacgaggtgcgtgactcggtcgaatccccggaggaaatcgaatccgcgcagctggccgtcgcctacttcgaatacaaccgcacgatcatcgacgccatcgccgacatcgtgcccgccgtcaaaccgcagatcgccatgtacgaggcgctcggccccgccggcgtggacatctacacgatgacctgcgaatacgcggcccagcagggcctctacgtgctcggcgacatcaaacgcggcgacatcggctccactgcagccgcctacgcccaccacctgaacggcgtgggcgacttcgacccgtggcatgaggatgcggtgaccgtcaacccgtatctcggcaccgacggcatcaccccgttcgtcgaggccgccgccgaagccgacaaggacatcttcgtgctcgtgcgcacctccaacccgtcctccagcgaactgcagatgctcgacctggccgacggcacgaaggtctacgagcatgtggccgatctcgtggaaggctggggcgccgagaccatcggcagccacggctactcccgcgtgggcgcggtggtcggtgccacccaccccgaggaaggcaaggcgttgcgtgaacgtatgccgcacacgttcttcctcgtgccgggctacggtgcgcagggcggcacggccgcggacgtggcaggcatgttcgacaagcagggcagcggcgccatcgtcaactcgtcgcgcggcatcatcggcgcatggaagaagagcggcaagtactccgaatccatgaccgccgacgaggcgctggaccttgtggcgagcagcgcgcgccaggcggcgctcgacatgcgcgataatctgcgggttgccgtatataggtaggtagattgtccggctgtgggctatacgtgagtgtgggctggaaaccggagccgagtgtgtttaactacccctcagtcaacctgcggttgacagctcccctgataggggggagcttgatgtgctgaataggaatgaaatgacaactttcacccccacccatgatgtggttgcggaggcgactgcggccggattcttcccgccgcgccacaacgtcgaaatcacgcaggttacggaactgaccgaccgcgtgatgcgactgacattccgcgacccgttcatcgcctcccacgccaagcccgcccagttcgtcaacctgttcacgcacgacgacttcatgctcatgccgcgtccgttcggcgtcagcgaagtcgacggcgatgaagtcagcgtgatcttcgccgtcgtgggccacggcaccgaacagttggcaaggctgcaggccggcgacaccgtcgacgtgctcggcccgctcggccgcggcttcaacctcaaggaagacgccaactacattctcgtcggcggcggactcggcgtgcccccgctaatctacgccgcgcaaaagctcgccgaacacgacgcctcctttgccaccgccgtattcggctaccgcaacgaccacttcgctgaggaatacgtctcccggtacgcggactggtcgtggagcatcgacgacgccgaaggcaacgtggtcgacctgctcaacaaacttgaacaaggcgacgacctgaaggcctacgatcgcaagccgatcatcttgtcctgcggaccgctgcctatgatgaaggccgtggccgcttgggccgccgaacgcggcatccccgcgcagctgagcatggaacagcgcatgggctgcggctacggcacctgcgtgctgtgcaccatcgacaccgtggacggccggctcaaggtctgctccgacggacccgtgttcactcgcgaacagctcggatggggggagtgacgatgagcgcaaacaaccagtccgcgcagggcatcgacaaccacatcaacctgtacgagccccacgtgtggaagcaccacaccaaggtggccggtctggaatggaagaatccggtcggcaccgcctccggcaccttccagtacgccgccgtccgctggttctacgacgtcagccagctcggcgccgtatgcaccaagggcgcctcgcccgtgccgtgggagggcaacccctcgccgcgcaccgccgaatcgccggccgcgaacatcaacgctgtaggcctgcagaaccccggcatcgaccattacttggccgaagacctgcccaagctcaaggccgcgggcgcgttcgtcatctccaatgtcgccggacattgcgatgacgattacgcggcggtcgtggaaaagctcgccgactccgacgcggacatgctggaaatcaacgtcagctgcccgaacgtttccgccggcggcatgagcgtgggcaccgacccggtggccctcgccaatcttatggaccggctgcgcccgatgaccgacaagccgatgatcgtcaaactcacgccgaacgtcaccgacatcaccgtgccggcgcgcgcggccgtggaacacggcgccgacgcgttgagcatgatcaacacgctcaaaggcatgcgcatcaacattcgcaccggccagccgatcatcgccaacgtcaccggcggcgtatccggcccggccgtgctgccggtcggcctggcagccgtctatcgggtgcgcaccgcactgccggagattccgatcatcggactcggcggcatcgacagtggtgagaaggcgctcgaatacctgtacgccggcgcgaatgccgtcgaagtgggtgcggccgcgctcttcgacccggtggccccgctgcgcgtcgcccgcgaacttgacgacctgctggacagccgtcccgaactcgctgctaaactggccgcaggacagacttggaggtaaggaacatcatggcagaaacactcgcacatcgcttcactgaattcctgttggaatccaacgcgctgaagttcggcgacttcacgctgaagtccggccgcaagagcccatacttcatcaacgccggcgccttcgacgacggcaagaagatcgccgcgctcggcacgttctacgccgaaaagattagccaggccatcgtgcacaacacgattccccgcaacatcgacaccgtgttcggccccgcctacaagggcattccgctggccgtgtccaccgcgatcgcgctgaacgccggccacaacatgaccgttggatacaccttcgaccgcaaggagaagaaggaccacggcgacggcggctggatggtcggcaccccgctgaccgacggcatgaaggtgctgctcgtggacgacgtgatgaccgccggcaccgccgtgcgcgaagtcatccccaagctcaaggccgaggcgaacgtcgaggtcgtgggtctcgtgctctccgtggaccgcatggagaagaccaaggactccgacctgtccgccgtgaaggccgtggaagccgaattcggcttcccggtgctctccatcgccaacgtgcgcgagatcttcgacgccgccgccaagatgaagaaccccgacggcaccccgttgctcagccacgatatccagcagcgcgccgccgcctaccttgaggaatacggcgcctgatcgtcttcaacctaaaaccaaaagcgggcttgcgagcccgctttttttattacgatccatgaacagcagtaccatattaaggcagaagctttggcaaggagcgtgctatgaactggttagttggtatagggctgtttgcgctcgtggggatatgcagttacttcggcatcgagcatcatctggacagcaaagcgaacaagttgtcgcaaggtaatgaagaagaccgccgagatgctgccgaattacgtgatatcgccgccaaaatcgatcacggtaagtattacccgatgctgtaacgggcaatctgggcctaaattgatgctatctccgtttcgaggggctgatgtcgtggtttccagagatctacttccgtttcgaggggctgatgcccaagtagaagcagcatgaaaatggcggaatgacgttgacatgttgccgtttgtacttgggatatgacggatgaacagccccttgaagcagagatagatgttcccgggaggccaaatcagccccttgaaggcgagatcggcatctagacggtagggtcgcccgtggtggaaactcgcgcggcgtagaattgtcgtaggttcgtttctctcgaatacattcgaacaaggaaggccgccatggggaacatcaccgacgatatccggcaacatttcgacaccttcgccgcactgccgttcaccgaggcggacagtctcgccctgtcccagctggcctacgcgcgcatgccggataacgtgccgcgctatcacgaggattcggcggacgtcagcggcatgattcccgcggtctccatccgcgacctgctacgtgccgaatgctatgacgacatgttcggcaaggtgtggtcgccgcagatgaacgtcgatctgctgcgtgcgatgggggagagcccgcgctggcgcgacctgcgcgtcggcgaatacgtggatgaattcgacgccgaaaccaccaaacagttctcggcctgcgtcttcgaactgggcgacggcacgctgtacgtggctttccgtggcaccgacagttcgatcgtcgggtggaaggaggatttcacgatggccttccgccgtccggtcgcctcgcaggaggccgctgtgcggtatgtgactgatattgccggccgctgggccgggccgattatggtcggcggccattccaaaggcggcaatctggcggtatacgcggcggccaatgtgcccggcgaaattcagggacgtatcacggccgtgtattcgcacgatggtccaggcttcgatgaggcgttcttcgatgaggatgggtacgcgcgcattgcgccgaaaatccataaatcggtaccgggatcgtcgatcatcggcatgctgtttgagactcgtgagcatgtggaagacggctatacggtggtcagcagcgacggtgccagcatcatgcagcatttcgcattgcactggcaagtcgatcatggccaattcgtacaggctgatggactgacaagtagcgcgcgatacctggcacgcacgatcaacggatggatggcaaaatacgacgacgagcatcgccgcaagttcatcgaaaacctgtttgccatcttcgaggctggcggatacgacacattcggcgacctcacttcgcatttgacacagtcactgccgattatgctcgccgcggcccgcaacattgatgtcgaagatcgcgacgtgatgattgaagtgctcaaaggcttcgccacgacagccgccacgtcggtaatctcggccaagtagccggaggccatcaaactggttttgccagtcagtctcaatagcgcaagagccggcccctgagatactcaggggccggctcttacttccatttccccagcggggttggcttaatcgcagtatatctcactgctgaccatgactgttttacttactcctaatcaatgagcttgtagccgtgatcggcgactacggacttgagcttggtgaggtaggtttcggcggccttggagagcttggaacgctcgttcgtgatccagccgaccaacatcgtttcgtcggtgtcgagcggcacggtgacgatcttctcgttgttgaggtcgccgttgtcgatgccggtgcacaccgtgtagccgttgaggccgatgatgaagttcagaatcgtggcgcggtcggtcacgttgatctgcttgggggagtattccggccagaccgcctcctcatagaagtagaacgagccttcctcgccctgttcgtactggatgaacggatagggcttcagatcctccatggtgatgatctttttggcggccaatgggttgtcccgtgagatgaacacgtgcaggggggcgcggaagagcggatggaattcaaggtgtttctcgcgcaggagtttgccgatcacgtccttattgaagtcggacaggtagatgatgccgatctcggactgcatgttcgccacctggttgatgatgtcacgtgtacgggtctcacggatcgtgaactcgtattcgtcggacttgatggagttgatcatctccacgaaagcctcgacggcgaacatgtagtgctgggtggagacctggcacagctgcttgcgcggtttggcgtgcttgtagcgctcttcgagcaggtcggcctggtcgagcacctggcgggcgtaggtcaggaattccgcgccgtccacggtcagggcgatgccctgcgaggagcgggtgaaaatctcgatgcccagctcgttctccaattccttgaccgacgagctcagggccggctgggagacgtacagggcatgggaggcctcgttcatcgagccgcactcgacgatcttgacgatgtatttcagctgcagcagtgtcataaagtctatttatatcgctagggatggtcgccacacgggtttataacctcatcaatccactatggcgacacaatatgagatgcctcgcatatcgcggacgctgtgtaacgggatatgcgccacattggtaacctgaggcaggaccagtacgatgccatccagaccttctccttctccagcatcgaccgcttctccacgccgagcctgatgaccaggctcggcgccgacgtgatgaacatccagaacgccttcatgatgattctgcgcatggtgccgcgtgccgcgtcgttgaagtgctcaccgaacagtgcgacatgccggtcgccaaacggccggtcaccgtcgtcaaggacgggtccatagacttcaactgccgcgacgcaatatttggcgacttacaggcgtacgccgagttcggcgagcgattcgcgcgcctgcgacgcgttctcgaagaggatgctgtggatgccgacctcgttggcgccgacgatgttcttggcggtgtcgtcgaagaacacgcagcgctcggccgtgaggccgaagcgggtcaggaccagctcgtagatgtcggcgttcggcttgtgcatcttctccacgccggagaccacggtgccctgcagcagctgttcgaggcgcgggtacttctcgaaggccaagtggaaggtctcatgcgaccagttggtcagaccccatacgccgtagccgtgggccttcaaatccgccagcagttcgaccatgcccggcagcgtgcggggcagcgcgtccgcgtagtggccgatgtagaacttgaagatgtcggcgagttcctggccttgttcgcgtaccacatccgggtagatgtccgcgaaatcctcgccggcgtccatgcggtcctcgtagtggaagaagccgcaggggtcgtcgtcggcgcagatgcgttccacgatttcatcggggaatcggccttcaaggcatgcgcgggtgttccagtccagcagcacgccgcagaagtcgaaaatcacgtcggtgatgggggagttggccatgatggttccttgtgtgtttgggtcgttgggtggggtctgcgatttagtgtacggggtttgtgtataggtcggggtatgtggagtttgaggcttatgtttctctccctccgtctcggctttgcgagacacctccctcgtcagagggaggtcaacaaggttatgcgatgacgtcggcgatggcttcggggatggcgtggatcacgtcgccggccacgattgggtggccgagcgtcatgaagcgctggcgatgctcgcggccgatcagttccggctcctgccagccctgctgctcggattcggaggcgatcgccgccgccaggccatgcaggtaggcggccgaggccacggtctcgcccgtggtggccacgtcatcctgctgggcgagtagggcgccggtcagaccggccagtacgtcgcccgcgccggcggtgcccagccaggccggcgcactgcccgacgcatagacatggtcctcatccaccacgatggtcaccgcgcccttcagcaatacggtggcaccggtgagctcgtgggcgcgcttcgcgctggccaacgggttcagccgcacgtcgtcggcggtgtacggctcgtgcgaatcggcatgctccgcggtgctggcggtggtttcgaaccggttgagcagtttcgccatctcgccggcatgtggcgtgatcaccacctggccgggcacacgctccggcagcaggtcgagtgcgccggcatccaccacgattggcggcatgtcgtaggcgtccttgttctcatcctcgctgccgagcgcgtaatgcttgagcaatgcggcgatggtgtcccgctgcatatcgccgtcggcgccctcgacgctagcctcgggcacgccggaccccacgacccaggactgcacatgtcccttgccgatcacggcttccggcagtgcggtgagcaccatgttctgcgcgcgctccgggcccagataccggaccatgccggtgttcgcgcgggcggcggcgctggtggtgagcacggcggcaccggggtagcgctgcgagccggtcaccagaccaaccacgccccgggaatatttggaatcctcgaaccgggggagacggaccgcgtcggacgcgaacgaattatccaccacctcgacgtccggatccttgtcgtcgatatcgaatccgaaatcgaacaactcgatacggccgcaggcgaacgtggcgggcggcagcaccgcgcacggcttcatcgcgccgaacgtgaccgtgaccgtggccggaatgtacgggccgggcagagaaccatcgttcacaccgacgccggatggcgtatccacagcaagtaccagcggaaaatcgcctgacgactcatggttcggcagggcgggctcatcgggagactcgccgtcgagaccaagggcggaggcgagcgcggcgggaatgccgcgtagcgagccttgaatgccgatgccggtcatcgcgtcgatgatcagatgcgatttcctggccacggcgatggcggtctgcaatcgctcaccggcctcaccggcggaaaacccggacgcgcaaccgggaatatcggctgccgggtcaagcaccagcaccttgccgccggcgcgcacgagcgcggcgaatccggcctcatgcagcgaccggcccacggcgatggcagtgacgttcgcgccctcctgggccagcgcggcggccgcgaacagaccatcgccaccattgtctccggccccggccagcagcacgatcgacgtgtcctccagcgccagatcctcgtcgtccagcatgccggccgccatgtgggccgcggcctgggcggccatgcgcatcagcggcacgcctttgtccagcaggggtcgctccatggcccggaccgtatcggagtcataggcgctgtgcagcagcagttcgcgatgatcggcgtcttcggtgtattccatggcaacccctttcttgtgtttgttacttgcggcccgtgtttacaggccgtacacctcgtgggcgaacttttcgagcacggggatcgaacgcttgactttctcggtgtcgatgcagtaggccatgcggaagtatccgggcacgccgaagctgtcggacggcacgaggatcaggtcgtattccttggccttcatgcagaacgccacggcgtcgtcctccaacgccttggggaagatgtagaacgtgccgccggggcgcaccacgtcgaagccgatgccggtgagcgcatcgtagagcaggttcatgttcgtctcgtagacgttgaggtcggcggtctggtcgatgattttggctacgcccagctggatcgagctcggcgggcagttgtggccggtgccgcgcgagatttggcccatcatcggcacgagcaggtcggcgtcggtggctgcggggttcaccgcgacgtagccgatgcgttcgcccggcaggctcagcgacttcgaccacgagtagcaggtcagcgagttcgcatagaagctggccgggtagggctgggtggctccgtcgaacacgatttcgcggtaaggttcgtcgctgatcaggaagatgtcgtggccgtactcggcctgcttggcggtcaggatcgcggccagacgcttgagcgtgtccgccgaatacaccgcgccggacgggttgttcggggtgttgatgagcgcggcctgcacgttcgggttgagcgcggcctcgaacgcctcgaagttgatctggaagttctcggtgtcggccggcacgatggtcagcttggcgccgatgcccttgacgtacggctggtattcggggaagtagggggcgaaggtgatgatctcgtcgcccggcttggtcaccgcgcgcatcgcgtgggacagcgcgcccgccgcgcccgtggtcgggaagatatggttgccggtgtatgccatgccgaaacgttcgttgaggttttcggcgatcgcgtccttgacggacgggatgccgagcgagggggagtagccgtggatggccgccggatcgccgttttcgtagaggtcgaccatggcgtcggtgaaggatttcggagccggcaccgagggattgccaaggctgtaatcgaacacgttctggtagccgatttcagcaccgcggctcgtggcgtactcgctcagcccgcgaatcacggacttgccgccaagcatggccttgtattcctcattgatcatggctgttctcctcgcatggttgtactggtatgcaccacgctactactatcgcggccagtttgcgccatttgccgcgccgtacctaagccggctgttctatttgttctattagtggagtttgaaccggcatatacccttgcaataaagccatttgtagggtctgaggctttccggggttgcttgtctcatagattttcggcctcttgatatttgcggttgatagctgtgatgtgtgtgggcgatggctgttgaggcatcatggggatctcttcgactgtccgccgtcgccatgccgccatgatgcctacagaaagtcgagttgcgtatttccgccaagcagggtggtgaccggtggggggcgatcggtgggggtgaccgacacccgctataggcagcaggcagccgcacacatcccaatatctgtgggacggcagacgagtcaatcgtttgtcgtccgcgccgtccctcaagagcgcgggatggcagacaagtcaaccgtttaacgtccgtagcgtcccacaccgacgactgtagaaaccgcggaataacgccgattctcgctgcagctccatgattatgcacaaccgttcatagcgagcgctgtgggacggcgagcggaaaacggccgaatccgcgtgccgtcccacacctcgtacaatccgcgttttgggaaagcatcaccgtaaggctgacgcgcatccgcatccacagcaggagccttaccggccgtaatcccgcactcgattattttttctgacaggaaatcgaacccgaaacactaacccatgcccgccccaccgcaaacagcgaataaccaaaaaaatgcatgatctatccttggtgccgaataatgagagcctgactgtagtggctacgggtagctatatcggagaaggattcgatcagaagcgtttcgacacgctgctgcttgccgctccggtctcgtttgagggtactctctcgcaatatgtagggcgacttcatcgcgagaatgatggcaagaccgaggttcgtgtctatgattacatcgacgtgaccgtgcctttatccgctgtcatgtatcgaaaacggctgaaggcatacgcaaatcaaggatattcggtaaatcctgaccatactgacaaaatggacatgctcagtgcaaaggcggaagcgttgcgcgcttgcgtgacggccgcgacgcagggcgaagatgctgcggatgcgttgctcgacacccggtctgacggattattcgaaggcagcatcgttacagccacgaattatgcagagatactccgcaaggatattgccggttgcgcacgttccctgattatctcggctgaatatgtatcacaacagggactcagcgcaattgacgatgaattgctccgactggccgacaggaaagcgctcatcgaagtttatgtccgtttgccggcgactgctgcggtggcaaccagaacacgaatagaacggaatattaatcggctgcgtgctattgggtgcattgtccggaccgtcgaatcgtgttccgattttgccataatcgatgacggattgatttggtttggaggcatccctttacttggcaatccaaggagtgacgactgtgcacttcgattcaaagatacgaaaatcggcgagaatctagcagatggactgaaacgacggtcgtcctgagtcaatattcagttaagataatcgcgcagtacgagggcgtgattgatgtgcgggtccttggcggcatagagcagggtcacgtcgggatgctccgcgcagatgtggcgcagattgtccacggcggcattggcgtcgagctcggcgatgtaacgcatgcggaattccgcgaatttggcggggtcatggccgaaccatttgcgcaggaggggagagggggcgacgtccttcagccacaggtccaacgccgcacgctctttcgtcatgccgcgaggccacaggcgatccaccagcacccgatacccgtccgacgcagtcggctcttcatatatacgtttgattgcaatacccatacgccccatgattggcgtgcgcttgccggaagtcaaggggagacgcgatccatctacccgttcgatttctgggtgttctgtctaaggccttgtgctatgacagctagcgattcagcagcttttggtgatatcgtccaaccggaccgccttgcccctgtcgaaggtgttcatagtgagatcgacgggtttggtcttgatgaacgctgacagcgcggtgtgcggcgggttgtcgatcaagtgggtgatgggggcaatcgcctcttcgacgctgacgcccacaatggcgtaaatggcacgcgccagcagcttcatcagtggcgaatcgaaactgttcaatgcctcattgctgcgcacggcccaagggttgaacaacacatagtggatgcggcctccggtctgctgttggttttccgcgaagagcactcccagcagatcgttcagacgactcgtacagatagtcgcgcaatgctagaacgtgattgatgtgcacccttcattgacggtctctcaattgatctcctgcgattcatgccgtataaggaagttctcgaccaaggcgatcatcgtgtccttccccgcaggtgcggacagcgcaatcatcagtgtcatcgccgccaaggcgttaccctccacaagcaggggagtcatcgtcgcccggtatactgttgccgttcaggaaatacacgaacagtgcggcggcacaacgtttattgccgtcggagaacgggtgatccttgacaacttgatacagcaggttcgcggctttctcccgggtggaacggtacagttcttcgcctccgaacgtctggtagagtcctgcgacgattccttggaacgaaccgttgcgttccctcccgaacagatcggattgcgtgtagaacggcatcgaccggatgaacagcatcgcgtcctcataggtcaagacccactgggactcgtcgcccttgggtatagggacattgcctgtgtcatagtcgttaagcagcacaagactcggcaaatatcgttccaagatctctgcggtgccagcaatttccggttcggtggacctcgatagcaccttgacgacggcgtgaagtgcgtcaagccgcttgcgattgatgatataaccatcaacgagatgctgcttcagaactgagttggcccatcgccgggaatagacgccttccttggatttgacgcggtatccgaccgacaggatcatatccaagttgtaatgctcgacttggtatgtcttaccgtcagatgcagttgtcgcaaattctgcgacaactgaaaatccattgagctcttccctcaatgcattgccgacatgcttgccgattgttttgatatcgcggccaaacagcaa

SEQ ID NO: 983 - DNA, 4148 bp, Unknown
  R117_24m  MAG No. k141_24177
cacctccgcattcgcacgattccgccggaaacagactaccttacaccctctactcggggcgcggccatctcacgcaatcgggcttctggtgtctttgccgcgcgttgcgcgaggcgggccgacaccaaggcgccgccacggcgaatgacagtttatttgggtgttatctgagtgctttgccggccgagccgagttgcttgcatgcctcagccacgcgggcggacatggattcctcggccttgcggccccaggaacgcggatcgtagaacttcttttcgcccacttcaccgtcgatcttgaggaccttgtcatagttctcgaacacatggtcggcaatcgggcgcgtgaacgagtattgcgtgtcggtgtcgatgttcatcttgatcacgccatggctcacggcttctgcaatctcttccggacgggagcccgaaccgccgtggaacaccaattcgaacggcttgccgttgggaaagtcgactatgccggcggcgctgggcagctcaccctcgaccaccgcgcgcgccacacgggactgaatatcaccgagcagggcgggacgcagcttgaccacgccgggcttgtaggagccgtgcacattaccgaacgtgaaggcggccatgtatcggccacgctcgcccaaaccaaggcgacgggccacttcaaggccatcggccggcgtggaatagaggcgttcgtcgattttggcggaatagccgtcttcctcgccgccgaccgcgccgatctcgatctccagcaccgtgtgcgcggcctgcgacttatcgagcagctcctcggcgatgtccagattttccttgagcgacacggtggagccgtcccacatatgcgactggaatgtgggctcctgaccatgcgccacctgatcggcctcatgtgcgagcagcggttgcacccattcgtccagatactgcttggcgcagtgatcggtgtgcagggcgatggtgatgttcgggtacttcgcggcgacctcgtgtgcaaaagcggccaaggccagcgatccggtgacacggtcgttgacgccgatgccggaaaggtatgcggctgcgccgacggacacctggatgatgccgtcggattcggcatccgcgaaccccttcagcgcggcgttcagcgtctgcgagctggtcacgttgatggcagggtaagcgtagccgccgcgtcgtgcggcgtctagcatttcggcataacgttccggtgttgcgattgtcatggcttcattatcgctcggggtgtgcccgccagactaggttctggagccaggcgagctgtgaactatctcacgaggaacaccatgatgataatcatggcgaagccgaccaaatcggtcggggtaaagaccgcgccggcgaataggacaccggtgatagtggcggttacgggttcactggtgccgagcatggtggcgcgcattgcaccgcagcgctgggtgccgccgaggaatagccaataggcaccgaatgtgccgaacaccacggtgaataccatcagaccaatgccgaaccagtccaacgcgggggcggtggtccacgggcgcacgagcggcagcagcattaggccggaaacgatgaacatgacgccgctggccatgaagttgccccatttggccattaatgcgatgggcagaatcgcaagcagtgacgtgcatacggcatcggtcaggccccacagcagaccgggcagcggcagactgagctggctgagatcgccgcctgtggcgatgagcaccgtgcccacaaaagcgagtaccacaccgatgctttcgcgtttgccgggcagccgtttgcccataatacatacgaatacgagtacaaccagcagattgagcgtctgcagcactgtggccgtgccggaattggtccagtcaatggccttcaagtaggagacctgcaccatgagcacgcagaagaacgcgcacagcaggagtctcgggtaggaacggtagtccttaagcgagttgatgaacttgtcaggcgtgaagattcctgcgcaaaccagaaagatgacaccggccaatagctcgcgcacgcaggcgatccacagcggatcggcgtgatagtcgttcatcaggagtttggagacggtggcgttgacgccccagaagacgcctccggcgagcgccagtccggcaccgacgaagatgtcgtgcggggtgcgttcgagggttggcgttggttggccattggttgcagcggtcttgggttcacacatcgcccatcacgatacgcggacgacgtgaattgttctcatatagcggtcatacggcaggaaaataagctctcaaaagagggaaaaccgttgaaatttcaaggaaaatcgatggagcggacgacgggagtcgaacccgcctctaaagcttgggaagctttcattctaccgatgaactacgtccgcatgtgcgcttccacgcacgagaggcaagtgtatcacctatgcggcaccttgcgccatgtgccggtttgagttctgtgctggactagtgaattgcgcgcgtggaatacgtggatgcggccaccggagtgccgttcatttcattggccatttgcatcaggcgtgcgatgcgctgatcagtcggcggatgcgtggagaacagtttggagaaaccgaccgcggagaacggattggcaatcatcatcgcggagacggactgggtgccggccgttttgcgcataggcgtggtctgggcaccataggagatcttgttgagcgcggaggccagggcctcggggtcgccggtcagcagactgccgtcttcgtcggcgtcgtattcgcgagtacgggagatggccatctgaatcagtgatgcggcaatcggcgcgagaatcacgctgaggagcacgccgatcaagccgagaccgcctgaattatcgcggtcgtcgcgcgagttgccgccgccgaaatacatcagagaataaccgaggtacgtgatgacggtggccatggcagaggcgatggcggaggtcagaatgtcgcggttgtacacgtgcatcagttcatgacccagcacgccgcgcaactcgcgggcgttcagaatctgcaggatgccctgcgtgcagcatacggcagcgtgacgttcgttgcggccggtggcgaaggcgttcggactcatggtgggcgcgatgtagatgcgaggcatcggcttgccggccttggcactcagctcgcgcacgatctggtagatttcgggggcttcctgctcgctgacctccctggctcccatggatgcgatggcgagtttgtcggagaaccagtatgagccgaacgtggtggccaacccgataatgacgtagatgcccagcgtctgctgcctgccgcccgtggcccaccatatcagcatgatgatggcccacatcaaggcgaacagcagcgtagtcttcaggccgttgaaatggccgtgcacccgtactttggcatccatgaggctcacactaaaatcactgcctgaatattggctggatgtgcgccgaggggtgaatcggatgggggttggcggtgcttacggtgcggttggcggggatcggaatagcctgtttacatgagattgacgatgcttgacagtgcggttgcttggcctgttttaccgctttaccgctttaccgattggtctgatcgagacgctttgcttgtttggcctgctttggctgcttggatcgtttggcccatcggcctgctcgactggcatgacaatggcttttatataaataagaacgctggcgtataaccggcgttcttatttatcgatgtatcaatcgcgccgattgctgctggtgcagttgccggtgcgatgagctgatagtcaatcaggccagagcgagctcacgcatctggtcgggctcgatgaccttcttgtgctcgcggccctccttggcgccttcggcgcgctcgaaggcgtcgaccttcttccagccagcgaagtcaatcggcttgacgccgcggctttccagcagtcggtcgatggattcggggtcgcgatcctcggccacgcgaccaccttcggcggccttggccagatcctcaagcatgttggtcacgatggcaagtgcgtcggacttggtggagccgatcaggcccaccgggccgcgcttggcccagccagtggcgtacagacggtcgcgcacttcgccgccgtc

SEQ ID NO: 984 - DNA, 6182 bp, Unknown
  R117_24m  MAG No. k141_24217
cgcacagagcagcagaaaaattgcgttgggccagccatcggagacgccgagcatgtcatcggcatacaccgtcaccgcaatgccaatcagaatagccgagatgccaccgacgatgccgattaccagcagccgcaattctcggctgcggtcctccccggtgtagaaatcttctacgtatgggtgacgccgtttgaagtcaatacgcgacagacctcctggaatcagcatcgccagccccgcaatcacacccacgcagacgcacagaaacgtcagaaaatcgttgagcggcgtcgctccgagaatggaattgctggaatcgaacaggttgccgatgccaaccccggcgacaatcgcagcaacaccgccggcaatcagcagcgcgaatcggcggcgatgttcatcgtagccagtgatatcctgcgcaagctccgcgataggagcgattatgcccgccgttttggaagaagcggctaaaggcgatgccgtctcagccgaggagtcaacattcgacgaaccggccgcagaagccgacgcggcaggccgactcacatcgccaagtaccagatcatcaagcgtgcagccgaacaggtcgcagatcataagcagcttgtccatctcgggataggccttttcggattcccatttcgaaatggcctgacgcgagacgccaagcaacatggccaatcgttcctgggtcaggttgcgttgcgcacgtaggtactgcaggttagcgcgaaaactcattggaatgtcccttcatacgtaatctttatcatgtcatgttcggccgatgggctcactatggcatgccgtccatgtcacccgccaccatctttgggttgcaatcgccggttattcgagcgcaaccacaagttgcatcggcggaattccgccattccgttgacctgagcagctttaacatcgcactccacgagaccgaagcttttccagccatgcgagggcagcttgtctcacctgccaccacgaatccgcttcgacccacgtacacatctgtgtacagcagcgctcgcaatcggttacctacgacccatatgatttgctgagcgaccgcaaaacacgcaatagccgagacaacaccgtcagcgttaaagcttaaggcgactacttgcccaatagtccgggaatctggctgatgatgtcagcgggcagtcctgcttgttcggcaatggatccgaggtccggattggcaccctgctcctgaattgcgccagcgacctgactgatctggtcggcggagatgttttcctccgccagcgcctgcagctcgtcaagtcgatcggcgttcaaatggtcgccaacgacctgttgatttcacccaactgatcggcattgaaatgctcaccgattaccgccggcaaatcaccaatcgaaccgagattgaaatccccgccagcacattgcctagattgtctgcggcaaaatttttcaggctatcgaacagtcccacatgtgccgctggtactgcttgttcagcaactgctgcagagcatcgcacagaccctgcatcaatcgccgctcttcggcagacaagtcccgcgtgaaaccaatctctgcctttgcgctcatcagctggggagctcacggtcacactcatgcgtcgcagaccacgagcctcacgcgcctcctcattccacatctgtgttaacaacatgtgttaatcgcatgcatcgccaccatgattccccaatgatttcaagggttccccggtctcactattgtttcttccctaaaacggcctcaatcatcggcaccttcctggtagccaccaccacgtccctgaccggcaacgcctcgttcggcgtgctctccatcgccgtcctgctcgttgtggcgctcgttttcctgctgctccagaaggatccgacgcgcgcaaacgtgctgagacatcgccggtgaaccaagttctgcctttttaccgacgccagctcgcataagcaggaatcaaacgtcggcgctgggacacagaacgggaatccgccgacgttcagagtatctgatgtcggtgccgggccatgttttggacgccaccgacacaagtaccactcttggcgacggtggtggggcatccgctgtcccaccaccgtcgccaatcgttctcagcggcgttgacaatccattatctgtcctttcaacgccgccagacgtccacagcgtcggcgacggtccggattttgacgcaccaccgatgcaaaaccattgcaggctccgtacggaacatcagccgcgaccaccgaacgagcaccagatgcggcatcagccgcgacaccagccgcacttatcgacgcgcccttaccgcgtcatcacgtccatcaatacaatgactcatcggcatatccggctgcagcccaataatcgtcggccgatagcgagcgattgaaaccggtggcatgatcgcttccgaggtcgccctcgccaccgaaatcgacatcgaaatcagtaccagcatcggaagtaccgccggacataccggcaacggacccgacttcggttttcagcaggtatttctccgcgaaattcagcgtggtgcacaccatcgcaaacccctttccatgcgcgttgccctggcggaccaagacgtccttgtgtaagtaagtaagtatggcggctccccttccgcaccgccatatccactatggaagcacgccgcggcacacgacacaagccccgggacatatgaagcagttatggccggttcaaagcacccgtattacagcccaaacggcaccgcgcgcagcgggattgcacgacggccggacgccactcataatcggaaaccgctcacagccaaatgccacccgaggccggacgccatataaggaaccgtggcacggcagatatagaaaatgcccgccatcatagactgacgagcgtgatatcgggtgggcgatgtaggaatcgaacctacgaccccttcggtgtgaacgaagtgcgctagccgctgcgccaatcgcccgagcttgtgatgaaaaaaccggcaacattctgccggcgattcatcgagtgggcgatacaagattcgaacttgtgaccccttccgtgtcagggaagtgcgctaccactgcgccaaccgcccgggtcatcctcaggctgaatcaatcatcctgaaccagccatccgagagcggacaacgggactcgaacccgcggtctcaaccttggcaaggttgcgctttaccaactaagctatgtccgcatgtgttaccttcacgggcaacaggtgacaaagatacgccaatctcaggaaaaagccaagcccccgcgtgtcccaccggttttccaacgattatcgggtgccgccgtgcacataactcgcggtggccgtatacagcagccaggcgatgggcatggccagcataaacagcgggtagaaccaagcgatgggcacattgcacggccatggccgtggaaatcaggaacgcatgacgataaccgatcagctggccgaagaggccaaggccttgatcggcgaccgtgccgaagtgaagttcctgaactacgccgacgtgccgttcttcaaccaggacgaggaattcccgaacccgacagccgccgtggccgccgccttcctggcgctcgttgcggagtaatcccgcctgaatcttggttacgttccgcctcaaggcggacggcggaccagctgcatcagcaatgtgccgaacccctctgattgactccaatcagaggggtcgctgcgtttcaaggggctgatttggccttctccggaggtctactcccgtttcaaggggctggtggctgagtagacacgggccaaaaacggcgtaatgacgttagcccggagccgtttatacttgtggtttcccggatgaggagcccctcgaaacggagatagacctccggaacagcccaaatcagcccctcgaaacggagttagacggttgggatgtcggaaagaacactcatgccggcccaagaacccccactatgtcagatatcgctgcccagcacgcaatactgaccgtacagcacgacccgtccttcatgaaatcaggcacggtatgggcttcatccctcaacgcgcgataatggcggtatgacgcaacgacaactgatgcgggccacagtcgaaacgcccatcggcaggatgatgatggcctcggacggcgagggacttaccgaactctgtcttgaagactggtggtgggccaccgatcaccaagccgttctcgattcgaatcgcgaatccgatcgtgaacccgatgtgttccgtatgacccgcgtatggctgaccgcctatttcgccggcgagcgccccggcctagatcagacgccgccgttgcatcccgccggcacgccattccaacatgaagtgtggaatctggtggccgaaattccctatggcatgacggtaagttacggcgaactcgccgccgaattggccgaacgacgcggtggcggccgcatggccgcgcaggcggtcggaggcgcagtgaagcgcaatccggttaccatcatcgtgccctgtcaccgcgtagtcggctcgggccgcgcgtttggcggctacggcggccgactcgacatcaaggccgagttgcttgaactcgagggcgtggatctggcgcgcttcgatctgccgaacctttgacggcctcagcggtccgcctcgtcaaaaggattgagtggttacccctcccgctggcgggaagtggcacgtaacgccggagggtggtcggctggctggcatcgcaacccccgctacccgacaattttcgacaagctgacgggaatcctcccacgaattgttcgccgtcggtgcagtcttgctcgatcgcgccggccaaaaccgtacaatccctacaatggaatgtatatggttaattgctgcgcgcagccgcacggccgcacgcaatcgcaagaccacatggcccaaggggatatgcaatatcaacggaagcaggaggtgcgtatgaccggcattatcgattacgcgcacaccgaaacgcgctccttcgccgacttgccgttcaacgaaatcgacgccttgatcatctccacgctcatctatgaggatgtggccagtatctgtccgacgttgatgctggatgagacgcagtcaggctcgttcgccgcacgcattcgcgctttcgagcccaagcatccactgatctggctgaagggtatctggcatcccgagcttgaatcggtaagccttgacgaggccaaccgcgagctgcaccgttcgccgaaaacgcatgccgacgacaagccgcacgaagcccaaatggtttcagtggtcaatccggacctgacccacgacctgttccaggccgcaggcgagaacccccgctacgccaacgttcgcctgggcgcggtggtcgagcacatcaatcagggcgagcaaacccaattcgccgccgccaccttccaactgcccgacggccacaagcgccggaagccgacctacaaaggcacgttggttatttccttccgcggtaccgatgattcgctcatcggatggaaggaagatttcaatatggctttccagtatccggtgccggcgcaacgttcagccagcgcctatctggatacggtggcgcgactgtgggagggtccgattattctggtcggccattccaagggaggcaatctggcgatttacgcggccatgaacgccgaccccaaggtgcgcaagcgcattcagcatgtctattcactggacggccccggtttcccgccggagattgtgaccagccccgcctaccgcaccatccagccgaaggtgacgaaaatcgtgccaagttcgtcgattgtgggcatgattttcgagaccccggagccttgccgcgtggtctcttccgattcggatggcattatgcagcattccgccttcacctggctattggatggcgaccagttcatcaccgagccggatttgagttccagctcgcagttgtttaacgaggagctgaaccattggatcgccacgcttacgcccgaacagcgcgagcgtgcggtggacgcgctgttcaccgtgctgcacgccaacggcgccaccagcttcagcgaggtgatgagcaacttccccgcttcgattccggcgatgcttggcgcgtatgtagggctgacccccgcagaccggcgtcatttggttgaggccctggcgatactgttcaaggcgtccacggccaaacgcaggccgacgcc

SEQ ID NO: 985 - DNA, 4271 bp, Unknown
  R117_24m  MAG No. k141_24485
tcggacgcggtattcgtgttcgatgagccgaccatcggtctccacccgctcgacgtgcgtgtgctgctgggcgtgttcgaccggcttgtggcgagcggcgcaacagtcgtggtcatcgaacatgaccttgacgtgatcgccaatgcggactggatcatcgacatgggtccgggcggtggcgaaagcggcggacgcatcgtcgccaccggaacgccggaacaaatcgcggccaatccgaacagcatcaccgggcggtatctgcgctgactcgtatggcggtaacgcgcctttgcataggaccctgcgcgagtaggatagccgtccatggtgcagattcatggcattagacgcgcaagcgcggacgcgaaatatcggcagatgaccgggcagccggtcaagccgctgattctcaaactgtgcttgccggccgtcatctccaatctggtgaccaccgcctacaatctcacggacacgttctttattggccagcttggcaccgcgcagtccggcgccatcggcatcgcgttctccatcatgaccgtgatgcaggcgctcggcttcttcttcggcaacggcgcgggcaactcgatgagccgcgaactcggcaaacagaacaatgagcgcgcctcccgactactggccgtgggcttcgcgggtgcggtgctctctggtttggtgattgccacaatcggattgctgaccctgcggccgctggtcgtcatgctgggatcgacctcgacaatcgccccatacgccgtgcaatacctgacgccgttgttggtcgccgcaccctgtgtatgcgggtcgttcgcgctcaacggactgctgcgataccaagggcaatcggcgttcggcatgatcgggctggtttcgggcgcattgctgaatttcctgctcgcgccgttgtttatcttcgtgctgcacctcggaatttttggtgccggcctggccaccgccatctgccagacggtgagcttcacgattctgaccacaatgagccgcaaattcggcgtgatgaaactgtccctgcgcaattgcaggccggatgtgctgctcatgcgcgaagtggccggcggtggcctgccctcgctgatccgccaaggcgccggttcgatttccgtgacctgcgtgaacattgccgccaatccgttcggcgatgcggccatcgccggcatggccattgtgatgcgcattatgctgggcgccaactcggtgatcgtcggcctcggccaaggtttccaaccggtgtgcggctacaactacggtgccggcctgttcgcgcgcgtcaaagaagggtactggttctgcgtgcggctcgccacctgcgtgctcgtggtgttggcggtgttgctgtgggtgttcgcaccgcaactggtcgagatcttccgctccgacccggccgtggtcgcggtgggtgtggccgcgctgcacatccaatgctgcacggtgattctcaacggcttcaacatgatgggcaatatgatgacccagaccatgggccgcaccggcatcgcctccttcctggccctgtgccgacaaggtctgtttttggcaccgatcgtactgattctgccgatgatgttcggcgtgctcggcgtggaaatggcccaatcggtgtccgacgtgctgacattcgtggtcaccatcccgttcatgcggcgaatcctgcacgaattgcggtagatgtcatcaagattttcgacttccagaccaggtggaccgagcatatctcgctgaatctctgtagtttttccttaccgttgcgttcattaggtcgattatgcgttcattaggtcggtgccctgcttagcatgagataatgagcattggaatgaagccattcttgaaggcagtgttcatcacaagtgacctaatgaacgcataatcgacctaataaatgaatggcggatggctaatacggagcctgaatgcagaatatgaaacgtatgaaagccaaccaggcacacaagtggcctgtgccggagcgcatcgaattgctgtaccgcaccatggctgacgcactcggcccgaccggatggtggccggcggagaccacgttcgagattatggtgggcgcggtgctgacgcagaatacggcgtggggcaatgtgaatcgttcgcttgcggcgttgaacgcggagggtgtgctcgaaccccataagctggtggccatggagccggagcgtttgcaggaactgattcgaccgtcaggcttttatgtcaacaaatccaagaccgtacagtcgctgagttggtggtatgtggagcgttgcggggccgcgcccgagggtgccgcggctatttccgatgccgaattacgggccgagttgcttggattatttggtattggcggcgagacggccgacgatctgatgctgtacgtgttctcgcgccgcacattcgtggccgatacctacgcgcggcggctgttcgccttccttggattcgacgtgccggccggctatccggcattccacagggcctattcgcccgtggtgctggatacgaacctcagtgtcaaggatttgcaggaattccatgggctcattgacgagttcggcaaggcctaccgcgacgacgcggccaaaagcgagtcctttttgggtggatggagggcttgactgcacggcgaatcgttctcaataagaaaagtgtgaggcccgcacggtgccaatcgcacatctgaatccttgactggctgcgctcgatgctgggtgtcgaaaacgagtctgtgacagaatagttcgaccgacacaatcgccaaaacgccgaacaggagccaatgatgaccgaagacaagccgatcgccaagccgattatcgatgatgcgacgcgcgagaaaatggcgcttatgttctctggcgaggtctacctgccggatgatgtggacggcttttttgatctgcaggccgcccagcgtgatctccagctcgaactcaacgccacgccgctgaccaacccgaagcgccgtaccgaactcatgcaggcgttcttcggcgcggcgggggatggtctgtacctcgaatgcccggtgtatgcgaactggggctgcaatacttattggggcgagcgctgttacgccaacttcaacctgacgctggtggacgatggtgagatcttcatcggatcccacaccatgatcggccccaacgtcacgcttgtagccaccggccatcccgtgcgtccggacctgcgctatcagggtgcccagtattcgttgccagtccacatcggcgagaacgtctggatcggcgcgaatgtcaccgtgctgcccggggtcaccatcggggacaacgcggtcattggcgccaactcgctggtcaccaaggacatccccgccaacacggtcgcctatggcagcccgtgcaaggtaattcgcgaaatcaacgaacgcgacgacgtctactactggcgcgaccgccaattcagtgagcgttttaagctcaaagagcagtagcgcgaaagctcactcccacacgtcgagcttgcgatttttgtagaaatactcgcggtccttgtcgccgatttcacgcacgacctcgcagggcgcgccgtaggtgacggagttggcggggatggaatgtgtcacgaccgaaccggcgccaatcacgcaattgtcgccgatggtcactcccggcagaatcgacacgttcgcgccgacccacacgttgcgcccgctgatcaccggaatgcaatacgtgtaatggtgctcgcgcagcaccggcaacacggggtggccggcggcgcattagcacggggaacggttgaacgagaagtggattggcatgtggtggtatcgaacatactgatgcgtgtgccgccgagcctgtccagatggctgcctatatgaaccagtgacagaaaagcacgggaacgcgagcgagaggagtgtgcatggggcagttcggcgtcatgattggccagttagtcggatttctgatcatgctgatggtcgggtatggatgtgtgaggcttcgattctacggtcagacggcgttggacggcatgtgctcgttgctgctcaacgtgctcatccccgtgcttgtgttttcgaacgccgtcgatggtgcggaccgcgcgcagcttgcctctaactggggcgtgatgctgctgaccgccgtgatgtacgtgctgctcatcctggtgttctggctggtcgccgaactgttgcggctcaaaggttcgcgtagccatgtatttcaggcgtcgcttatcttcggcaacgccggattcatcggcattccgttgattatggcactttggccgcagaa

SEQ ID NO: 986 - DNA, 17899 bp, Unknown
  R117_24m  MAG No. k141_24685
ccggtgaccattaccgatacggcttgtgcttctttgcccttgtcggccaaggttttggcgatgagtgtggcggtgccgaaaaatgcgccgtgcggcaggccggcaatgaagcgcgcgacaatcagcgtggcggcattgaccgagaacgcggaggccagattaccgataagcgcaatcaccataaacaatatgatgaggttcttcggcggcaccttgcggccgaacaccagaatcagtgtgccgaagcacacgccgatcgcatacgcggaaatgtaatggcctgcggtggggatgcccacgccggtggcggccgcggcctgcggcagaatacccatcatcacgaactcggcggcaccgagaatgaacgcgcccgaagccagtgcaagcagactcttcttcatggttcctctaattacttcagtattacttacaaaaacagtgcggcaatcgattgattcgagcgatatattacggtggtccgccaacaaatacgggccttgccgcgacgcggtttgtcgctgtgcgcggcgggttgtttaccgctgtccgatcgcttggtctgattgttgggttaggaaacgaaaaaccggattgctgatttctcaacaatccggtccaattgtcgggctggcgggatttgaacccgcggcctcttcgtcccgaacgaagcgcgctaccaagctgcgctacagcccgtttggcaacagacgtagatattacattgtggtggtggacaatgcaaatcggcatgtcgcgagtgttgcgtgatggtggattcgccgtgtgtacaggtctctcaagccttgtgcagagccggttttgcgtcatgtgagcgggtgttcagatggccgtacggtctgccgggctcataatcgccggccttgcgtacactgatgaatcatggctgaagttgtcgaaaataccgaaaacactgagaatgaaaccccggccgtcccgcagatgagcaccgtcgaacgtgcggaaatgctgctcgagcaggacgccaccatccgcgagaagatcaagtccggtgccacgctggacgaagccgtggacccctccaacaaggagttcggcccgctggctcaccccgagcaggtgcagatgcgcgtggccaagcgcgcgatgatgcttgaggccggcatcgccccctacccggtgcacttggacgtcaccgacaccatcgaggcggtccgcgccaagtatgacggcaagctcgaggctggcgaagagaccgaagacatggtcggcattgctggccgcgtgctgttcctgcgcaacgcgggcggcctgtgcttcgtgcagctgtccgccggtgacggtaccaagattcagggcatgatctccaagaaggagattggcgccgactcgctcaagcagttcaagcagctcgtcgaccttggcgatcacctgtacctcaagggccgcgtcatcgcctccaagaccggcgagctgtccgtattcgccactgagtgggctatcgcctccaaggccctgcagccgctgccggccctgcacaaggacctgaacgaagacacccgcacccgcaagccgtacatcggcatgatcgcggacgagaacatccgcaacatggtgcgcaaccgctccaaggccgtggcctccctgcgccgcacctttgacgaccacgacttcctcgaggtcgaaaccccgatgctgcagaccctgcacggtggcgcggccgcccgcccgttcaccacgcacatgaacgccttcgaccttgacctgtaccttcgcatcgccccggaactgttcctcaagcgctgcctggtcggcggcatcgatcgcgtgttcgaaatcaaccgcgacttccgcaatgagggcgtcgacgccacgcacgcccccgaattcaccatggtcgaggcctaccaggcctatggcacctatgattccatcggccagctggtcaaggagctcgtgcagaagaccgccatggacgtctacggctcgcacaaggtcaccctgctcgacggcaccgaatacgacttcggcggcgaatggaagaccatcagcatgtacgattcgctgtccgaggcattgggcgaggaaatcgtgccgaacggcggccctgagcatcccggcacctccgttgagcatttgggcgccatcgccgacaagctcggcgtggagcgcgacgacgtggagaaccacggcaagctcgtcgaacacctgtgggagcacttctacgaggacaagctttacgagcccaccttcgtgcgtgacttcccggtcgaaacctccccgctggtcaagggccaccgcaccaagcccggcgtggtggagaagtgggatctctacgtgcgcggcttcgagctggctaccggctactccgagctcaacgacccgatcgtgcagcgtgagcgtttcgtggcccaggccaaggacgcactcgccggcgacgaagaggcctgcgacatcgatgaggacttccttgaggctctcggcgtgggcatgcctccggccggcggtatgggtatgggcattgatcgactgcttatcgccttgaccggtgccacgattcgcgagaccatcaccttcccgctggtcaagccgctcgttggctgattaggcatactctggctcccctcagagaggggagccagagttatatatgaaagggattgcttatgtctatcggcttgtgggttcggggcgcgcgtcccaagaccttggtcacttccatcgcgtcggtgatggttggggcggtgatggcgtacgtgcatatcgagcggtcgggcacctgcatcgcaatatatccagaaccggcctcctgcgccacggcccgtgaacagcagaccttgctgatggaccgattctggccggtgaccatcctgtgcctgctagtcgcgctgttcctgcaaatcgccgtcaactatgcgaacgactattccgacggcatccgcggcactgacgccgggcgtgacacggacgaatcgaaatcaggcaaaccccagcgactgaccgcatccggactggtaccggccaagcatgtactgttcgcggcgatgatttgcgccgccatcgcctgcatatgcggtgttgtggcggtcgtgctcgcccaagcatggtggttgctggccgtgggcgcggcctccttgctggccggctggttctacaccggtggcaagcatccgtatggatacgtcgggctgggagaagtcggcgtgttcctgttcttcggcttggctgcggtattgggcaccgaatacgcgctgtgcggcacggtggacgtcggcggactattgggtgctgtggcggctggcctgttctcctgcctgatcatgatggtgaacaatatccgtgacatcgacgaggatcgtgagcatggcaaacacacgctggccgtacggctgggggagtccggcgcgcgtacgttgctgattgtgtgctgcgtcatcgcatggatcatcgccctgctgatgtgcggtacattatggtggccgtggggtgcggtgctgttgctctcgggcaccggaatacctgtgcgcatggtctccagcgtgaataaacgtcaattccgcccggctctgcccgccgccagcttccagaccttgctgtttgcggtggtgctggcggttgccgtggcgctatgagagcgaaataataagacgaatactcgtgtttgggcgcacgcggctgtagactgaaccgtatgacttataaactagtactgctccgtcatggacagagcgcatggaataaaaccaaccagttcaccggctgggtcgacgtaccgctgaccgagcagggtgaagccgaagccaagcgtggcggcgagctgctcaaggagaagaacgtccttccggacatcgtgttcacctccctgctgcgtcgcgccatcaacaccgccaacatcgctctggatgccgcagatcgtctgtggattccggttcagcgtgactggcgtctcaacgagcgtcactacggcgctctgcagggcaagaacaagaccgagatccgcgaagagtacggcgacgagaagttcatgctgtggcgccgttcttacgccaccccgccgcccgagatcgacccgaacgaccagtacgcccagaacaacgacccgcgctacgccggcgatccggttccggaagccgagtgcctggccaacgttgttgagcgtgtgaagccgtacttcgagtccgccatcgagccggagctcaaggccggcaaaaccgtgctgattgccgctcacggcaactccctccgcgccatcgtcaagatgctggacaacctgtctgaggaagagatcgccaaggtcaacatcccgaccgccatcccgctgctttatgagctggacgagaacttcaagccgatcaagccgcgtggcgagtacctggacccggaggctgctgctgccggtgccgccgctgtcgccgctcaaggccagaagtgagcctaagccgctaacacggtacaagctgtaaggggagtcgcgcataatgtgtggctcccctttgctatgcctgccaaatccccatggggcggtgattaccccatggggcggtaaaaccctcatggggcggtaaaactctcatggggcggtatgccagaatggcttaattccgcggtttcacatatctttcaaaccgccccatgggcaagttaccgccctatgggtgttttgccgccccatggatacgccggtgtaccgcccagaagcaacaaaaaacggcgtccagccgtagccggatcgccgctttcgggcatcctcctcaaaccataggaggacaagtgttcagttattcgcccaatgtgaggacaagccccaatcagtcgatgtcggtgccctcgtcgcgggtcggctccttggtggggtcgaagccggagacgatgtacaccacacggcgggcggcggacacggcatgatcgccgagacgctccaggaagcggcccagcagcacgatatccacggtctgctgacgggtgatgtcatcggacagcgccagatcgaaggtctggtggtgcaggttgtccagcttgtcgtcggccaggatgatggcctcggcggtcttggcatcgcgatcggagagcatggccaccagctggtcagcggtgttgtccaggaagtcgatcatctcggcgaacaccggctgagcggattcgggaatcgcggcggccgggtaggtgcggcgagcggcctcggccacgtggcgggcaagatcgcccatacgctcgaacgtggaagccagacgcatggtggaaacgaccacacgcagatcggtggccaccgggttctgcttggcgagcagcttgacgcactggtcgatcacagaggactccagggcatcaatctcgatgtcgccgtcaatcacagtctgtgcggcttcaacgtcctgattcagcagggcttctccagcgcctttgatcgccttgcgcacgttctgcgccatacggtcgaggtcgtcagcaacctgcttcagctcctcgttgaaaataacgcgcatttctctagcctttcatgcttgcttattgcaacctgtaccagtgtattattccagtacttgttccccacttcaacgtaggtaatggcaacctcaagttgttctactgttcattgggttgttcacctgaaattcatgttaccggcgcgccggcaaaccgcaatcccggcgtgtggtgtgaaagaatgggggcatgacacagatgccgctcgtcgccgcgattgctcttattgtcgcggctgttttatttgtggtaggaatcatcacgctcatcgtgggatttgcgacacatcgagtgtccgtggaatcgccgctggccgatgatgacgacaatgacgatctgtccgacgacaccgccacgctgctgtccatgctgccgggtgcgtccgtggtggtcgacgagcacgacgaggtggtccgctgcaatcccgccgcctaccgcctgggtgtggtgtcagatgacgccatcgcccagcagcaggtgctggatgccattcacgaggcgcgcaagtccggtggcaagcgccagttcgacttgaccaccgatactccggagcggtacgtcgcagaccagaacaagggcgatcacgtcgccacgcagtccgtccaccgccccaactggctgaaggtgactgtagggcgtatcaacgagcagttcgtcatcgtgttgattaccgatgtcagtgacgtgattcgtttcgctcaagtgcgtgactcgtttattaccaatgtatccgagcaattgttgggccccactgaagctctggccaaactcgccgattcgctggagtccggcaatctggacgaacagcaggtggctgccgatgctcgccaggtgcgttccagctgcagcaagctcaaccatatggtgtccgatttgctgctgctcatacgcgcacaggagccgattacgccgtcttccgccaaccgactgaacgttatggaacagctcgaggccacggtggcgcgactggagccgcaggcggccgcggctggcgtgcagctgaacatcaagggcgacgatgatctagtcatcaatggtgaggcggatcagatcgacagcgccgtgaccaagctcatcgaaaacgccatcggctattccaaggaaaatggtgtggtcagtgtgtccgcatccaaagacaaggatggcgaccgtgcggtgattcgcgtgatcgaccagggcgcgggcatcgcgaagaaggaccaggcgcgcatcttcgagcggttctaccggggtgcggaacagagcaatcgcacggcggatggcgtgggccttggcttggccatcgtcaagcatgtggcgctaacccatcatggcgatgtgaccgtatggagcgcgcccgggcaaggcagtacgttcagcctgacgttgccgttggcgcagtgaactttattactgtccgaggcggcggtagtcccagcggtcgaagtattcccaaatcagcagtagcaagccaataatgacaccggccacgcacataatcaccaacggcattacgctgtagcccacggccagcagaatcagcacgacaatcaacgccacaatccatagaccggtaccgatggcaaacaccttacgtaggtccacccgtacgggcttgggcgcgggtttgcggacggcagggtcaatgagaggcgcgaacttcatactcatgcactgtagtaagagtagggaggggcgtcaaacacctctccctacgatttattcaatcggtatcagttgagaccgatcaatgtgcatggcatatatggtcggccatgcgaggcatagaccgccatcacaggtgctcgaccacatagtcgacgcacttggtgaaggccatgacatcagccggttccaccgaggggaacacgccaacgcgcagctggttgcggcccagcttgcggtagccggcggcgtccacgatgccgttctctcgcaggatggacagtatctgggaggcctggacgcgctcgtccagatcaatggtgaccacggcgttcgagcgggcgtccgcatcgacgacgaacggagcggcgtattcggagcgctcggcccacgagtacaggatggatgcggacttggcgcaacgcgtggtggcccaggcgaggccgccgttgctgttgagccagcgaatctggttttccatcatgatcagggtggccacggcgggcgtattcagggtctgatccttgcgggagttgttcagtgccgtggtcagcgagaggaacggcggcacccagcgatgtgcgccttccagatgagcgcttgattcgacgcctgccgcacgatcgatggcttcgggggagaggatggcgacccacagaccgccatcggcaccgaaggccttctgcggtgagaagtagtagacgtcggtctggctgatgtccacgggcaaagcgccggctgcgctggtgccgtcgatgacggtcagggcaccggcttcacgactgccgggcacgcggcgaatcggggcggccacgccagtggaggtctcgttgtgagcccagcaatatgtgtccacgcccttggtgagctcaggcagacggtaagtgcccggctcgccggggaacagcaccgggtcttcaaggaagggtgcgttcgcggcggacgcggcgaacttggcactgaacgagccatacgtgccgaatgcggcgcgacgggtgatcagcgaagcgcaggcaatctcccagaacgcgctggcgccaccgttgccaagcgccacctcatacccttcaggcaggtggaagaactcgcgcagaccttcacgaatcgaagcgaccagttgcttgactggtgcctggcgatgtgatgtgccaagcagggtggtggcgccggcatcgagcgcggcgatctgttcggggcggattttgctgggaccggagccgaagcgaccatcttcgggcttcagcgactcgggaatactcagtgtgatagtcatggtttcaagggtagaccagtgttggggaatatcgcggataatgctcggtgtgcgggattgctgcggggctactgcggaattccggggtgccgggcggtagtagcggcaatgcggaatgcagtgcagaatgtacgcagcacatcatggctacggtgtgtcggaatgacatgagttagtgattcttccgataaccggatagtgaggttcgtgaacgggcggaaacaaggcagtttttcaccctgccgcacggttacgtaaatcgtttgacatgcccggatggtgggggatcgcattgaggattgacctctgttcgttgtacagtactcaattgtgccggtcatacggggtcgttgaaaggaccccgccgaacccatccaaggagttaacgtagtatgaagcatgcttcgcataaagcgaccacggtctcgcgccagaagttcagcttagcgaaggcattgtttgcctccggcaagggttctcattccgttcgtgccgtgcgcgcggtgcaatccgctggcagcgacgccgttgttttggggcttgatccggtcattgccgagaagatcaatgaaatcgctccccagactcgtcgttccattcgtgaggccgctcgtgccgctgaacgccgtagccatattcttgcctcggcctcactggccgctctggtcggcacggccgcaggtgctcttgcattttccaacaataaagacgccacgaactcgttcgtggctgatccggccacgacgaccacgcagattaagcgcatcagcgatgtgactgcggcttctcgttccgaagcacgtactgatctgagttcatcctccgttaccgcacagtccaccaatgaaggcggttgggggctgagcaattcagacagcaccttggacgccaagctgatgaatcgcaataatgcgaacaatcctgtggtgtcggctctcatggatgccgatggcgatgctgtgccggctggcttcaacccgaaccatgccgttggcaccaactccaacaactatccgtggggtcagtgcacgtggtacgcgtaccagcgtcgtgccgaactgggactgccttccagcggcaacttcggcaatggtggcgagtgggcggcgtcagcttccgctctgggctattgggtggacaacactcctcgccatgtcggtgatgctgtggtgttcgctcctggccaggccaatgccgatggcacatacggccatgttgccgttctggaaaagatcaatgccgacggctccattgagatctccgaatccaatgccaagggattgggtgtgatttcgacccgtacgttcagcgccgccgaagccggtaagttccagtacgtccactactgattcatttcattggcttacattcggtgattactgttcggatgtgacgtcgccctatcggcaatcgttcgcgcgaaatgacatttcaagtgttgcgaccgcgtattagtccgaactgacctgtgccgacacgccgatatatcccaatagctccggggtgttttatttcttccatcctgtacgagttaatgcgcaccgtgtaaggtgatggttctatgaagaccaaaactgtagcttcttccattgttgccgcgattgtctcctgtgcttgctcgtttatgtttgttcctacagcgactgcagctgagggtgttactgtgacttccaccaagtccttcccctcgtacacccaggtgcgcaaagatctgacgactgaagccactgccacgaatgttgaggacaatgctgattggggcggcattgagaacctcgacgtgccgcagacggaatctcaggcggaaaaggatgccgcagcggccaagaaggctgccgaagaggaggccaagaagcagacggaggccgaggctcaggcgacccagaagcaggccaacgccgcgagccgtaatgagtctcgctcttctgttacttattccgatgccagtggttcggtttccgctggtgccggtgcctctgtcgaccgtgcgtattctttgatcggacagagcatggactgcaccgcattggtcagtcaagcgttggcggcccgtggtattaacttccacggttggcctgaagagtacgtcaatgttcccggtggccacgtagttacagacgggtccctgcagccgggcgatattctgatttatgccaacaccggtggatggaatggcggcgcgcactacgatcatgtggcgctgtatgtcggcaacggtcaggcggtccatggtggctggaacggctacagcgtggctctcgctagcgccatgaccgaaaaactcaccatcgtggtacgtatcccgtgacgcagtcttattgattgatatattgcaggcctcggatgccaatcggtatccgaggcccgttgcgttctcctgccgagtgatacacccgcgacatcatcttcgaaaagacattcctgttatgaaatcgacccatgtgtgctaaggtaaggcgctgatgacgaacgttaagaatattatttccacatcagtggcggttatcgccacgggtgccatgtttgcatgcgtagccccgtttgcctctgccgattccgcgcagacgagtgctgtggtgtcctcacgttctttcccgaaggcgagttcggtgaagaagaatttgttcgccgaatccacctccacttcggttgacgagaactctaaatggggtggcatcgagactcttgatgtgccacagaccgagtctcaggccgagaaggaagctgctgctgcggcggctcagaaagccgctgatgaagctgcggcagcccagtccgctgctgctgcagcagccagccgctctgaacagcgtgcgtcgattccacaggttgacttgggtaaaatgactggcactggcgctgagcttgccagcttctcactgaagttccaaggctatccgtatgttgccggcggcaacactccggcaggatgggattgctccggttttgtacagtacgtcttctcccagtttggcatctccctgccgcgaacctctggtgctcaagccactgtgggtactccggtcgcaagcttggcggatgccaagccgggtgacattcttgcgaatggtactcatgcggccatttacatcggtaacggacaggtgatgaatgctatgaacccggtgcagggaacggcaataagcaacgtttccgtgttcggtggagctggatattccattcgccgcgtgatgtaacaagaattatgcggtaagcgaattcgtattaaggcacgtcctttgggatgtgcctttttcgtatacgcggatttctttttgagcggaggataccggccaaaccgagtgtcgcggggtattgttggaggtacgcggtattcgtgccacaataacttcaaggaggtcgtcatgattaacgacaaggccattctcgtcggcgttgacgggtcgcatgccagttacaaggcaacatggtgggccgcgaattatgcaaagcacgcggggctgacgctgcagattgtctgcgcatattccctgccgagctatgccgccgtttcgttcgatgcaacttacacggcgatgggggacgataacgccgcgcattccgatgctcaggagattctggccaaggccaaggccatcgcagacgagcagggcgtcgaagccgccacactgattgttaccggagacccggcatcggtgttcgtcgaattgtcgcgtaactacaatctgatcgtcattggtaaccgtggcaagggcggtctggccgagcgtctgctgggcaccacgtcctcgtcgctgccggcatacgcctactgcccgattgtagtggtgccgtacaccgatgatgacggcaacctgatgcacctgaacaacacgattaccaaggtggccgtaggctccgacgaatccaagtggggtctgaaggcgctggacattgccgccgacttcgccacgtgctggggtgcggaactggacgtgatttccgctgtgccgaacctgaagggcgtggatggcgaggatgccatcatggagtcctacaaggacgatcttgaggtgcgtatcaagccgttgcaggaatcgcatcctgatctgaaaatcaacaagcagatcgtttccggcccggccgtcagcgcactgaccaaggccagctacgatcacgatgttgttgttgtcggctcccgtggtcgcggcggcttcaccggtctgctgctgggctccaccagccagggactgctgcagcatgcggccggcccggtgtacgtggtgccacgcaagtatgttgaggctgcggaatcgcgtctcgacaccgtgccgagctcgcccgccgaagtgcctaccaagtcgctggaggagattgccggcgtcgaggagattccggtgtccgcagccgagcctgaagtcgcccagcagatcgaaaagaccatcgatcccgacaggcagtaaagtccgggtatacaatgagctccctcatcagagggagctcaatttattagtacgtcggtttattagtacgtcagtgcttgacggtgacgttcatgcgcaccggggtctcctgtacgtaggtgtgcttgaccgtgcagcccttgtcgatatggcgggtgacgcgttccttgagcttgttggcatcctcctcggacaggctggcgtcagaagcatcaatcaccacctgctcctcgaaaccggtgtaggcgtcgttctcggggtcgtacgtgccatccaccacgatcttggcacccttgccctcacccagcgtatgttcgatggcgaactggctggacagcgcggcgcaaccggccagcgcgaccttcatcagatcgcccggcgtgaactggccacgatccttgccgaacttaatgtgcgcgccatcgtcgctgaacgcatcccacgaaccgtccttgttgcgttcaacccacagtcgcttacccatagctgctcctttattttcagccgccggcgatctggcccatcgccatgccagcgggggagcgcggcacctggccgctctcccgcatcatcggacttctctattatgcccctaagctacactggtgcacatggctttgaccgaagaacaactcgcagatattcgctcccgtatccccgcacgtcccgaaacggacattccgatgccctatgaggacctggtgcgcaagatcctgaccgaaggcacgctgaagtccgatcgcaccggcaccggcacgatttccctgttcggccagcagatgcgcttcgacctgtcgaagtacttcccgctgctgaccaccaagaccgtgttcttcaagggcctggcctacgagctgctgtggtttttgaagggttcctccaatatcaactggctgctggagcacaacgtgcatatttgggatgagtgggcggacgagaacggcgacctaggcccggtctatggcgtgcagtggcgttcctggcccgcaccgacccccgaggacccgaatcgcaccatcgaccagatctccaatgtgctcgacctcatcaagcatcatccggattcgcgccgcatgatcgtctccgcgtggaatccggccgaggtggagaagatggcgttgccgccctgccacgcgctcttccagttctacgtggccgacggcaagctaagctgccagctgtaccagcgttcctgcgacatgttcctcggcgtgccgttcaacatcgcttcctactcgctgctcaccatgatgatggcgcagcagaccgggctcaagccgggcgaattcgtctggaccggcggcgactgccacgtctacgacaaccacgtcgaccagttccttgagcagctgggccgcaagccctacccgtacccgaccatcgagattcgtaaggccgattccctgttcgactaccagtatgaggacttcaaggtcgtcggctaccagcatcaccccactattaaggcacctgttgcggtctgagcgttgttcgtggacagcgaagactgtggaggcgacgggccccgagtcttcgctgtccactacactaaggcccagttccgcaatccaggaggagtaagcgaaatggagcatgacagtagccgtagcggctatcacgaacccgagcccggatctgccgggctgtctgccactgaagaagactggggtgacgattatcccaagaccttctcggtgaatcttatctgggccgaagcccgcgacaaggaaggtcgcgccggtgccatcggcctcaatggcggcatgccttggcactgtgccgaggatatgaagcatttcaaggagctgaccgtctcccacccggtgattatgggtcgtaagacttgggaatcgcttggggtcaagtaccggccgctgcccaaccgcgacaacatcgtcgtttcccacgatccgatgtaccgtgcgccgggagccactgtggtcaccagtcttgacgacgcgctcgatatggcccgtcaggaggcgattccggacgacggtctggatcgttcggagatttggatcaccggcggcgcccagctgttcgccgaggcgttgccgttcgcggacaaagcctatgtgactgatctggccgtcactgtggatgccgacagctatgcgcccgatatggcgtcgctggtcgaggccgggatgtggcgggaagccgaagtgggtgagtggcgtacgcccgccaaggaggagtccggcatcgattcctatcgtttccgtatcttggtcaaaaccaagtaagcatgcgaatccggcttgtgtcctttatggcggcatgagccggattcatattcattcgaccccaaaaacacattcgggccgtgtgcggcccggtgaagcccgattgaggattgattcaaagctatgagcaatacccagccctacaccgtaatgaccgtctgcaccggcaatatctgccgttcgcctatgggcgagatcattctgcgtcacttctttaatgagcgcggtctcggcgaccaggtgaacgtggaatccagcggtgtgtccgacgaggagtggagccatccgatcgacccgcgtgccgtgcgcgtgttacgcgaacgtggctatggtgatgagattccgcgtgaccacttcgcacaccgcatctcacgtgaggaaatcgaccgtaccgacctgttcctgccgatgaccgcctcccacatgcgcgccctgctgcgcatgctgccggccggcaagcgcgccgaagtgcacatgtaccgcagcttcgacccgaatctgcccaagccgaagcccggccgcgaggatcagattgatttggtggatccgtggtacggcggcaagcacgagttcgaggtcgccatcgaccagattgaggaagtcgctccgtacatcgtcgattgggtggcgaagcagctgtaggaatcggcctgtggccgatgctgtgtgtttcgcagtcttacgaccgcgggtctctacctccgcttcgctgcgttcagcacctccctcacagagggaggtggtcgccgaaggcgaccggagggagagatcaacgaaggagaagccgagcccaacctcagaacaccagctgcaccagtagcatgtatacgatcgtgccgccggcgattgaaagcagcatactgcgtttccagacgtgcagcagcacgatgacggtgcaggcgatgagttccggaaggccgtgtgaaccggtcagaatcggggtgttgcgcagtgcgtataccaccagcagaccggtcatcgcatagggcaggactcggctgaaatattcgatgacgcgcggcggctgcttggattcgggaaataccaggaacggcagaaaacgggtgcacatcgtccccagcaccaccgtcacgatggtgagcgcgccttgccagatggtcatcgtcatcgcgtctgtccttccttctgctggtccgctgcgtggctcatggcacggtctgccgtggcttccggggcgtcggcggccggccgcaacacatccagatgcgggcgcaacgcgacgaacagtatcagcatggcgatcattgagggaatcatgaaatcattggccccgaatatcagcaggcaggccagcgacgtcagcacaccgatgacggcggacagtcgctcgcgatgcttgccggcgagccactgatcgaggaagatcaccagaaacagcgcggtcagtacgaaatcaagaccgtcggtattgaacggcagatgcgcgccaatcagcccgcccagtgtggcgccggtcacccaatacagctggttgcacagcgtgacccagaagtagaaccagcttcggtcgataccggcggggattttcgcggtggagttgatggcaaaggtctcgtcgcacatgccgaaaatcaggtacggacgcttccagccgagccccttgaatttgccgagcatggatagtccataaaacaggtgacgggcgttgaccatcagggccagcagaaagccggcgagtgggttgaacgcggagagcagcagattcaccgtgacgaattccatcgaaccggcgaagatgaacgcgctcatgcacatcggccatacaaacgagaagcccttggtgcccatgagaatgccgtatgaggcgccgagaaacaggaatcccaggcaaatcggtatggtcagcggaaacgccgctttgagcgccggcaaccaggcgttggtgttggcggtgtctgccatgtggatgatgttctccttgtgcaactggtctgccggccgatattcgccgataatgccatatgtggttatacacgcatggtgccgataaacgaggtgaggacggtgtcgggactctgtgcgcgaagtcacagtgtggatgatgtcacatcgtctacggtgggacagtccttgtggcgggcgtgaacacgtgctgagatgaaagcatgagcacatatcaaggtaacgaaccatcgcaaatcgtctacaccgctacggcgcaggttacgggcggccgcaacggccacgccgtgagccatgagccggaactggagttcgacctggacacgccggtcgccatgggcggcaagggtcagggcacgaaccccgagcagctgttcgccatcggctggggcgcctgcttccaaggagcgttggcgcttgccgccaaggagcagcgcgtggcggccaccaagctggccaagagtcaggtgcgcgccagcatctcgctcggtcctgaaggcgagtccttcggcctgaagggcaagattgaggtagttctgcccgatcttgacgatgaggctgccgccaagctcgtcgagcgtacgcaggagctgtgcccctactccaaggccaccgcgggcaacgtgcccaccgaggtcgttgtggtgaagtcgctggactgaagccttccgggttgaaacccgagtccaagcattcggcccgtttccttcagggaagtgggccgaatgctttcaggcctggtcccgcgaatacgaaaagacctcggtcgctatgaccgaggtcttcaatgaagtacccccagagagggggatacgaaaggcaattgcctcaagagcaaacggcaaatccttcaaatgtatatttacttattatcaatctgaattttaggtatagcaacgattcccgcctccttccagtagacacgcgagcggtgttgctcctta

SEQ ID NO: 987 - DNA, 19017 bp, Unknown
  R117_24m  MAG No. k141_24787
cagaatcgaaccctccacaaaaaaatgcgaagagacatcgacagatgactctcaaaaaaaatcgacgagcacgtccttaaggaaggacgccctcaaaaaacctcacccctcatcaaaccctcccgggtacccgaccaccacaacaggcgatcaggcgaggaatgaactggcaatcattgactataaagaagtagtacaaacacgctcttgagttctcaaaccaccaccacaccagcaagacaggaaaccaaccagaagaaggaacccgccgcgctgagcggcaacaggtgaataacctacacgcaaccacgccgcaacgcaaatcaaagcgcacaagaacccaaggaatcggcataacagcgcggttccttcggcgtgtcgcacagagcccaatttgctctgatagggctagcgtaacccctcgaatgtttccggaaaacatcgaatccattattcggctggcgtgtcgcacgagttttcggactgtcagctccatgttcatcgttcggcaaccacaccaccggcgcacaatcaatgcatggcaacaacgctccatcatcggatttcgttcatgaatcacgggtatacctgtagttatgaccaagaagattgctgtattaaccggggcgggcatttccacgtccgctggcatccctgatttccgcggtccggacggtgtgtggaccaagcatcctgaccaaatgagcgtttacgacatcgatctgtttctgcgtaacaaagaagaccgtgagtactcctggcgctggcagaaggaatcaccagtatggaacgcacagcccggcaccgcgcataaggcgctggtcaagctggaacaagccggcatgctgacgctgctggccacgcagaacttcgatgcgctgcatgagaaggccggcaacagcgacagcgtcatcgtgaacctgcacggcaccatcggcacctcgcattgcatgaagtgccatcaggaatatgccacggcggacatcatggcccgtttggatgaagaacccgatccacattgccatcgcaaactgaagtatcgtggcgatatgccatgcaatggcattatcaaaaccgatgtggtgtatttcggtgaggcactgccggacggagcgatggagaagtcgtgcagcttggccaccaaagccgacgaactatgggtaatcggatcgacccttgaggtgtacccggcagcgagcattgtgccggtggccgcgcaggcgggcgtgcccatcaccatcatgaatatgggtcacacgcaatatgaccatcttgcgagccgcttgattcatgaggatatcgccgtcgcgctgccgaagttggtggacgagacgattgcggagaacaagtagtcctcagcataacgaaagcgccggtgggtggttaagcaactgatgattgttggttaaccacccaccggcgctttcgcgccacctcccgctagcgggaggtattggagcacacttctgcgcggcctcccgccagcggtattggaatcagtagatgcgcttgggctggaatccagcttccctgagtgccacgaggatgcggtcaatgtgctcggggccgttggtctcgaccgtgacgccgagagacaccgcgttggtgtagtggccggatgccttgaactggtcgtggtcaagctgaatgacgttggcgcgctgctcggcaagcagggtggccaccttgacgagctggcccggagtatccggcagctcgacctcgaagttcatgatgcgaccgcgggcgatcatacctttctgaatcaccgcacccatggtcacggtgtcgatattgccgccggacataatcggcaccaccacgtgcgggccggtggcggcggcgaacttgcgcgaacgcaggttcaggtgttccagcgcggccagcgagacggcgccggccgcctcgaccaccagcttgtgcttctcgagcatgagcagaatcatttcgttgatgtcgcgctcggtgacggtgaccagatcatccaggaactcgttgatcagcgcaaacggcagatcgccgggatgcttgaccgcgacgccctcggcggaggtgaccacatggtcagccggagacacacgacccgcggccagcgagtccttccatgccggggagccctccggaatcgcaccgattacgcgcacttcaggcttgaacgtcttgatggcgagcgccacgccggcacccaagccaccaccaccgagcggcacgaccacgtcagtgacgttcggcacgtcttcgaggatctccagaccgatggtgccttggccgcagatgacttcgtaatcgtcgaacggcggcacgtaaatcatgccttccttgtcggcgagctcagcagcgtgggcggcggattcgtcgaacacatcgccgtacagcaccacatcggcgccgtaggccttggtggcatcgaccttcagcggcggggtgatctgcggcatgcagatggtggccttcgcaccacgctcacgggccgcataggccacgccctgggcatggttgcctgcggatgcggtgacgatgccacgggcgatctgctcttcggtgagcgatgcgatcttgttgtacgcgccgcgaatcttgaaggaaccggtgacctgcaggttttccggcttcaggagaatctcatgaccagtcatctcgctcagcaccggcgaagggataatttccgtatgacgggcagtccctttgagacgtttggcggccagcttcagttcggctgcatgatcacgctgcagcgccttcaaaacatccttttgttccatagcttttaattgtatggcgcggggacaccgaaaacagtggcttatctcgctaacgagcgctcatttacggtaattcccgttcgtaatcagctttcgaggggctgatttggcttcgcggggaggtctatctcctcttcgaggggctgcccgatcgtgcaatgcgtgagtatgacacatcatttgcagcggtattatgcggttttcggagcccggctattcaggcaccaaccccctgaaacggagatagacctccccgcgaagccaaatcagccccttgaaatggagataccgcctagcaacacttataggctgacgacgacgccctcccatggtgcaagctcacggccggcaagagcggccacagcgtgcgcggcgtcatacgtgctgatcaccacgttcgactcggcaaggccatcggccactgccaacagttcggcggattcgcgaggcaaatcaacggttcggccggacatgttgaccacgaccagcagcttctcatcgccgagggtgcgggtgaaggcgtagacatgcgcgtcatccgcatcgagcagatgccagtcgccggccgccacgacaggcatgtcgtggcgcagcgcgatgagctgcttgtagaaggcatacaccgaatccggatcgtcgaattcgccggccgcgttgatcgccgcatggttgggattgacggagatccatggctccttagcggcatccggcgcagtgaaaccggcatagacagagccgtcccattgcatcggggtacgcgaattatcacgaccgcgcgcggcgatacccgccaacatcgattcgggcgactgcactttggcttcctcaaccctttgacggtaagcgttcagggactcgaggtcacggtactggtctaggcgcgtgaagtgggcgtcggtcatgcctagctcttcgccctgatatatgtacggggtgccgcgatgcatgtgcagcatcaggccaagtgccttggccgaacgcacacgagattcctccgaggagtcatcaccccaacgagaaacgacgcgaggctggtcgtggttaccagtaaacaggcttgcccagcctgcattcttcacggccgcttgataaccggccataatgctcttgagcttcggcaggtcaagtggcagtggcttccatttgacgccttcgcagtcaaaatcaacgtgctcgaataggaagagcatgtccagctcgccgttggcggggtcggtgatgtattcgttgcgctgtgcggtaacgccgggagcctcgcccacggtgaggaagccctcacggccttcgaacacttcacggcgcatttcggccaggaattcgtcttggcgagggccgtccgcgcagaacggattcgggttggaatagccttcctcacccacgggcagatcgtccagctcggaaccgtactcgccgggcagcttgccagacaggtccgtgcgcttggaaatcagcgtaatcacatccatgcggaagccgtcaacgccgcggtcaagccaccagttcatcatgtcgtataccgcgcggcgcacagccggattttcccagttgaggtccggctgcttcttcgagaactgatgcaggtagtattcgccacgctcagggcaatactcccatgcagaaccgccaaagtaggagccccactggttgggctcggcaccgggctcgccggcagtggtgccgggacgggcgggacgccaccaataccagtcggcgtgctcatcatccttgtttttggacgcttcaaaccaggcgtgttcatcggaagtgtgattgacaacaagatccatcacgatcttgagcccgcgcttgtgggcctcggccagcagctcatccatgtcgtcgagtgtgccgaacagaggatcaatgtcctgatagtcggaaatatcgtagccattgtcgtcttgcggagacttgtataccggggatagccacagcacatccacgccgaggtcggccagatagtcgagccgtgacgtaatgcccttgagatcgccgaggccgtcgccgttggtgtcttggaaggaacgcgggtaaatctggtaaacgaccgcattggaccaccacggatttggggtggcaccgttggtgcggatggaatctggaattactgtgcgttgtgaagtggtcatcgttggctcctccattatttatggtctacattgcctgttgctcatagtctaaaaagcgctgaattacatttccattggggaactgcgttggtgtgccggaaacaaaaaccgcaaagagccggaaggcactgctacggctcaattctcataagctgcacatgctatttagcaacatatgggccctttcgctgtttgtggtgggtgactgtgccgtggggtgatgttggtcgggtaggttggaggcatggatgcctctcacctgttcaccgccgcgcttcggctgcggtcgccttggagggtcgggtccgcggacttccgtgacgccgacggcgacgggcgggagccgcacatcacgatcggcttcgagcccggcagagggttcatgctcctgttcgaggcgtgggtgtggctatatcgcctgtgctcgtggatgatgcactcgaggctcgaacctatgaaggagctcgcccgcttgttccgccgccataatctacctgacctgcggcagctcacatattaacggttcttctgattgcgacgcgcaagagcaacttcgggcgcgcttggattgcctgcttgaacccactggtgcggggatagatgatttagttgacacgcctgcgggaatctggtggggatttcgctggcacaccggatttcaagcaaaccccgcctcgggaaccgctccggacttcggcgttggcccggttcgtatgtcaatcgattgccgtctgaaccgggacagaatccgctgtcccggttcgcgatttttgtccttttttacaaacagggacaagccaatctccgcagttcatatgctccgtaatacaaaatcggcggaatagagccgatcccggaatcaacatgttgtcccggttttcacataaaacgattgacattcataccgggacaatgaaaattgtcccggttcgtgaaaatcgcccgaaaccgcgaaccgggacagcggattctgtcccggttcgcgcgtcaaacggttgatatgtggaccgggacaagccagtggcacggcgacacagcagatgcgctcaattgcaccgtaagccgtacggtttcgtcactttttcattcgtacaacgagcaaaaccacatgacctttgtgcgccaccgccacatcaaccgaccgtcgcctttattgtggcggtttccagtatggcaacaggacagaagagcctcctccggtgagagccggaggaggcttgggtggaagcggacctttacttcacagagtcctgcaattcaggactggcctacggccagacccaacatgacctcgcgagtacgcgacctatccggccgcccgggccgggaaacagcccacggggctgtttccttaatcggctcgtctcgctcgacgcggtgaagtaaagcagcgcctgcgctgttttacttgaccgctcccctcatcacaccaccgacgacccacttttgggcgaagatgtagacgatgaggatcggggccatggccatcaggtagctggagaaggccatcgggtagttggtggcgaactgcgagctgaagacgtactgggcgagcgggatggtctggttcgactggtcggtcaggatgatcaacggcaggaggaagtcgttccaggcccacagtgcggtcaggatggcgatggtggcgttaatcgggctcatcagcgggaagatgatggtccagaaaatgcgccacgtggatgcgccatcgattcgggccgcctcttccagcgaaaccggaatcgaacggatgaagccagtggcgatgaacaggttcgtgcccaggccgagcaccgtgtacaggatgatcaggccgacctggttgtccaggtgcagggagcccatctgcttcgcaatcggcagcatgacgaccgggaacggcacgaacatggcggcgatgaagaagtagtacaggaagcggaagaagcgcttatccatgttgcgggccacagcgtaggccacgaaggtgttggtcagcaaggtgagcaccacggcggccaccgtgatgatcgcggagttgagcgcggccttcgggtagttgaccttggcggaggcgtcggcgaagttgtgccactgccacgaggtgggcagggcgaaggtgccggcttcggccggagtcttcagcgcggtgacgatggtgaagtagagcgggatcagaatggtcaggctcagcacggccacggcggcggtcagccaccagttgatcttgtggtccctgcggaacttggcgggcttgccggacttggacggggtaactgttgcagtagtcatttcttatcctcccctaaatcagatctgttcctggctgcgggagatgcgcagctgtacgaaggcgatgatcgccagcacgatgaagaagagcacggcgtttgcggtctggtaggcgtactcgccaccggtcaggccacccttccagatgaggtaggtgacggtttcggtggaggagttcggaccgccctcggtcaaggcgacgacctgatcgaaggtgccgagcgcgttcttcatggacagcacgaggttgatggtgaagaacggtccgatcagcgggaatgtgatcttccagaacttctgccaggcgttgacgccgtcgatggcggcggcctcgtagatttcgtcgtcgatggtctgcaggccggcgaggtagatgagtaccgagtaggcgatgccctgccagacggcgaggaagacgattgggatccagctgagttgctcattggtcaacagcgaggtggacagccacttgatgcccagcgccttgccgagctcgggcagcgggttcatgaagatgtacttgaacacgtagccgatgaccagcacggagagggtgtaggggatgaagaagacggctcggaagccattcttgaaggcgatcttcgagttcagcagcaccgacaggaacagggcgatcacattaatcagcaccgtgatgagaatggcgatgaggaacgtgaacaggtaggcgtggcccacgcggttgtcttggaagagggcgatgtagttcttcaggccgatgaacttgtaatcgccgtagccctgcgagttggtgaaggaatactttacgccgtcaagaaatggcaggtacaggaagaaggcgaaaatgatagccgccggaaccaccatccagtagtaggcggggtccaccttgcgggtggagaaggcggagaccttcttcttggccggtttcttggcagcggtcttggttgcggttgcgtgtgacatgatgttctcctctcctaccgatcactcgaaggtcctggcttggaccttgtcccattcggtctgcatctggttcaggaagcggtcggtgttgccggaggtcaccatggtctgcaggtagccaccgatgttgatggacgaaggaatgtagtggtcgcagaagtcggccagtcggttttcctcgaagaacgggcgcacggtttccagcgcatcgttgccgaagtaggtgtccttcagcggcgtgatggcggactgggcgtcggcgtaggcgtcaagctgatccttctgcatgaggaactcgacgagcttcatcgcttccttggggtgcttggtgttcgcaccgatggtgagcatcacgtcgtcgccggcggtgaggatctgctcgctggcgtcatcggtggccggcatctgggcgaaaccaagttcgatatcggggttgatcagcaggatctgcgggatggcgtaggtgccgagcgggatgatcgcggccttgccttgggcgaagttctgcgtgccctgctggtaggtgacgccggtgtccgcagtggagtaggtgaagagctcggattccttctcgactgcggtcttccacagttcctggaacgtggtcttgccttgcttgagctcggtgtacttcgattcgggaaccagcgtgccggccagggaggcgagcggtgcctgggtggtccaggcgtcggccacggaaccctgcagcgggttgatgccggcgtccttgaaggtgttgagcatatcggtgaactcgctccaggtggtcggcggattctccgggtcaaggccaaccttgcggaacagagccttgttgtagatgtagccggaggcgttacccgcgaagggcaggccatacaggcgcttcttggaggaatcggtggtctgcaccagattcttggcgatctgcaccatgccggggttgagggtgtccacaatgggttcatcggtgaagtcgtagaacacaccggaggcggcgaagttgccgaagctgatgtcgccgttgaaggtgatcacgtccggcacacgattcttgacgaaacgggtgcgcagatcggtctgggcgttggcggagttgttgatgttgaccttgatggtcgggttctgcttctcaaagtcggcgaccatggacttgaactggtcggcggcctcggacttgaactggaagaaatccagcgtgacggtgcctgcggtgctggagccgcagcctgccaggccgaacccgacggcgatcgcgcacatcacggcggcggtgcgcacggccagacgcttcagtctaggcgttgcatgtggggaatcggacagcataattgttgactcctttatctttcttttcctccggcttcggtgccggcggttcttccactttccaaggtaacggttcggccatttcattcccagcgccagcgagcccacttgcgcaagcaacaaaaagcgcggtattttgtgattaacgcaataaatacagcgaaggggcttgcatgtctgatgtcaacgcgattccacagtggttttccggatccgagcatacgcatcgcgtggcggcggcaattgcccaatacgggccgatagcccgcactacgttggcacagatgctgggactgagccaaggggccttgtcccgcatcaccagcgatctgatctacgccggggtgatcgaggagcttccggccgaggccggcccgtcaggcaagctgcccgagcgattcacgccaagggaaagttcggagcgtcgcggacgcccgcagacttcgctggtgttgtgttcgaacgcacgcaccttcattggtgtcaaggttcatgggatgtcgattgtggccgctgcggtgaacgcgcatggcgaggtggtgtccggccggcacgaggtgccgatcggggcggatcagtcggctgagtatgtggtgtcggccatcacgcggctggtgcgcgaatgttccgccgatatcgcctcttccggactgccctcccccactgcggtgggcgttgcggtaggtgggcatgtggtcgacgattcgattgtgacgttcgcgccgttcctgcattgggacggggccacggacttggggacgatggtcacagaggcgaccggcctgccgtgcggggtgttcaatgatatcgattctctgctggtggatgcctcctggttcgggccgggtgtcggcgtggatatgttcgccgtggtgaccatcggcgtgggtgttggttattcgctggccgtgaacggcaagccagtgcagtacccggataagagctatggtctggtgggccacgtgcttatcgatccggaggggccgcgctgcaccagcggacatatcggctgttcacaatgcttgactgacgattcgatcgccgaacagtactctgcgattgtgggtcgcgcggtcagttttgaggactttgcgcgcgatgccaagggacgcgtgccgcaggccacgcagttggtgaaccggacgtgtttccggttgggttcgctggtggctacggtggcgaacatcgcgatgcccggacatgtgatgattgccggggagtccgcgtttttggccaagctcggcaccgattcgctgcgcgatggcattcgtttctaccgtcacagccagacccagccggtcaagttcacgattatggaccacgactggcagctctgggccaaagccgccgccagtcgcgtaatcgtgaagcatattgggtaggccgttcttggctcccctcagagagggaagccaagaacgttgcttcgccacagttactccgccacgaccagcaattacggacttgcctatcggcaaggctcaatcccaccttcgctcaggccgtggctactgacagcctactaggctgtcagcttaacgccacagccttgagcaatactgcctgctgggggtggagggacgggggacggatgccgtaacgctgcagggcttcgccggtcaggactacgccttcctcgttccaccagccgagagtgctctggccgttggccagaccggtcaaatccaagctcgggtcgagcgggctgacgcggtaggtgcgctcggggtcaagtccgggcaggtgcacgggcgcggccggataggtctggctggtggtcagctgggtgaagcggtagatggcggcgtcgcggttcggcatcaccatgccatccaagcgcacggccggatcgttggagtcggcgtgcacgcaggtgtcgatggcgaaccagtcgcggtgcttcttgaattcggccacccacacggccagcttggcgagcgcctcgtccggctccttcaacaggttccattcgatgcccatgtggccgaagaacgccatggccatgcgcagttcctggctggtggcacgctgggtggagtgcgcgggactggcacccacgtgctcgcccatcatcgccggcggcaccagcagcgaggtgtagcgctggatgtccgcgcgctcgaccgggtccacgcagtcggagacccagatacggtcagcgtgctctaggatgccgaggtccacgcggccaccgccggaggagcagctttcgatctcaaggcccggatgtgcggtcttgaggcccttgaagatgttgtagacggcgagggtctgcgcgtgcacggccgggcggccggagcggcgggaaccgggctcggtgacgagcttgttgtggtcccacttgatgtagtcgataccaagctcgccgacaagctggtccatgcagccgtagatgtagtcgaacgcatccggattggtcagatcgagcacctgctgagtgcggccctgcagcggcagtcggccggtggtgggcgaaagaatccaatcggggtggttgcgggccacgtcggaatcggggttgaccatttccggctcgaaccacaagccgaattccatacccttggcgtgcacgtagtcggcgagcgccttcagggacttcggaccatcgggccagacgtcctgcgcaatctgccagtcaccgaggccggaggtgtcgtcgcggcgggagccgaaccagccgtcgtccaccacgaatcgttccacgccggagtcggcggccttgtcggcgagcgccttcagcgtatcgaagttgtggtcgaagtacacggcttcccatgtgttgaggatcaccggacggccgtgcgagaacaggcgcgggtgcagggagcgcacgtaggagtggaagcgggcggcgatctcgttgagaccatcgccataggagccgaacagccacggggtgtcgtaggagttctggccttcgccagggccagcgagcgtcacttcgccgccgaacaggagttcgccgccgccgatcacgccggttgtgtagggcagacgttcggcggacagcacggagttgccgctccagcccacgtgcaccgaataggcgtcgccatgctcgaagctgaaaccgggcacgccggcggtcaggagcagggatgcgtcgaagtcagggcggccggcgagctgcggcttttcgaaacggccgacggtcagcggctggcgctgcggactgcgttcacgtagatggtgaccggtggtggtgaggatttcgccggcggattcgggcagcgggaagccgagctcgatcttgccgatctcgagcggggctccggcgtctgcaccgaacaggttggttacggtggccttctgacggaccaggccgccggggagcagttcgaggtgccactcgacttccacgccctgctcctcatcgcgcgcggtgactatgacgccgggcacgcgggccgggccggtggcgtgggcatggccggccacatcggtgtagctttcgccggacacggcatcgagggtggcttccagcacgccgccggcctcgatattggtcacagtgaacttggggaagagctcgacgccggcgcggcgcagcaccacgcgctgctcgccgatccagctttcggcctgggtgggcaggatagacggccaggcggtgtcgtcgagcgcgccggacacgcgctgcggcttcagggcgtcataggcggccagcagggtgtcgggcttggccagcgggcggccccagtggacgatgtgcggcaggtcgctgccggcaaacaccagaccgatcgccacattggcggcgggctgggtcaggtagacggcggtgagtgcggtgccgtcagcggcggcgccggtgaaagtggaggtgttctcggccatattgtctccttcgacgtgtgtggatttgcattgcactactggtttcgatggtagaagaaatggaatatgttgccttggtgccgcgtgttggttgcgtgaggtaagtaatgcgtccgtgtctatcgccgctgggcgaagaaatcagtcaggatggactgacactcgccttccagcacgccgccgtgcacttcaggactatggccgatatgcggatcgcgcggaatatcccaaatcgaaccgcatgcaccgagcttgggatcccaggcaccgaacgcgatggtaccgatatgggtctggatgcaggcacccgcgcacatcgggcacggctcaagtgtgacggccagcgtgcaatcggcgagattccaagcgcccaaggcttgggccgcctgacgcatggcgatgatttcggcgtgggcaagcgggtcaccatcagcctcacgcgtgttgtatccgcgcccgacaatctggccggccgcatccagcaccaccgcaccaaccggtacgtcaccagcggctgcggcctgaccggccagttccagtgcacagcgcatcgcctcgtcatattccataccaacgagtgtatgcctttttctcatatcgtctcatgatgtgcataatcggccgcaatcttaacgttttcttcatggttcccatatacttttggtggagaaaaaatacgagaaggcggcaacatggcggtatttgagctcatcctatgcatcattgcggcggtggtggtgagctcgtttgccagtcgcttcgtaccgaaggtttccacaccgctggtccagattgtgctgggcgtgctggttacgtatctgccgtttttcccggatgcaaagctcgacccggaactgttcatggtgctgtttatcgcgccgctgctgtatctggaagcgcacgaaatcgataagtcggcgttgctgaaaacgctggatctgagcctatcgctggctatcggactggctatcgtcacgatggcggcggtcggattcactttgcatgccgtctggccgtccatcaccttagcctcagccttagcactcggcgcggcactcggcccgaccgatgcggtggccgtcagctccctaggtaaagaagcctcgctgacgcagcgtcagcgcagcgtgctgaaaggcgaatcactcttcaatgacgcttccggcatcgtcggcttccagttcgctctggccgccgccttcactggcgaattcgccgtggggcaggccgccggcgaattcgtgatctccttctttggcggcaccttatttggcctggtgatagcagcagcggccaactggctattcgagaccgtgcgatccctcggttgggaaaccaccaccacacgtattctgatggaactgttcctgcccttcttgctgtatttgggcgcggaggaattcaatgtgtccggcattctgtcggtggtggccgctggcctgttcatccgattcgaccgtaccggcgtggggccgaatgtggcacgtacgaatatcgtttccacttcagtatggggtgtgctgagtttctcgctcaacggtgcggtgttcattcttctgggcatgcagctgccgcgcgccatgagggccagctggtctgacccgtatatcagcaataccgtgctgatcggcattattctgctggtcactctggtggtaatcgcgcttcgattcttctggattgcggccatgctgcgcgttgcgcgagatacaatcaccggccagcgccgcaaaatgacacccgaacgctggcgctcggccgcagtgatgacctttggcggccccaagggaaccatcacgctgtcattgatgtttaccatcccgtattacattgccggcggtgcgccgttcccgatgcgtgacgagctgattttcattgcgtcaggcgtgattatcgtgaccttgctgctggccaacttcctgttaccgctattggccccgaaccgtggcaaggatcccagcgcggaaatgattccggtgaccatcgatgtgttacgcgccacggtggaggaattgaccggacgcatcacgccagagaatcgccgtgcgattctgatggtaatcgaccaatacaccaagcgcatcggacgattgcagcagcgcatcggcgataccgatcctcagggattcgagcaattgcagatcgaagcgctgcattgggaaaaggaattcgtgcgcgaccgacttgccgacaccaaggcgcatccggcggcggatacggccacgcaagagctgaacgtcgaagcctgcgagcgcatgcttgaccagattatgaatacgctgcgtcacacttccactgatccgacttcggggcatgcggtatcgcagattcgcggtcgcttacgcatgttccagcggcagatgagcaattacgccaaacgcacggtgtccaagattcgccataccacaccattggtgagcgaggatcagattttcgcgcgcacccgcgaactgcaggtcgaggcgattcatcatgttatcggccggcttattgacgagatgggccaggatacgtacaacaccgagcattgttcggcgctgttgctggattatcgtcgcgctgaggcttcattgcaggcacgtccgaatatgagcggcactacggaaaccatcacgcaggtcgaggacgtaaagcgcgagagctacggtatcgaactcggtgtgattcaggacatgtacgaagccggcgacatcaaccgagcccaagcccgctccctgaggcgcaacatctacgttatgcaggtcgatgccgattccggcatctagtttccttggctcccttctctgaggggagccaagttggggattgctatttccgtatgattctcttcagtatgtgcagtagtgcttgcagtgctcacttcgctcatgggagaacagtctatgaccgcgccggccacaagcgccctcgatgtccgattgctgtgacggccgcgccaattccagtgatggcggctgactacagcacgccagaggtaatgtcgttgtcgagcagccactggcgcaaatcggcgaactcctcaagactcacattgtgatccagaccgtggtagctctttgttttcagccacgtatgctcttccaaccaagcggcggtggcgaacagttcgtatttcgggattacgccatcgttcttgccgtacgtatagaacacggggatatcgtaatcggccaggcgggagtcggcgggggccgtgccgggcacctgaccgggtgtgttgaagccggacagggagacgacggcccggtaccgctcggggttgatgcgcaacaaatgcacggcgaccagtccaccttgcgaaaacccaagcggcaccacgtcacggtcggcgggaatgttgtcggccacccatcggtcgactgctgtggcggcggcatacgcgtcgtagtcacgatcatcgccgataggcagggcatcgtgaaaccacgcgtagttgccggggtcgggactgccttcacgggccggcgcgagtgtcagcggcccgcgcaatgccacgaagtcgttatatggagcgatgaggcgcatgatgtccgccatgtcttcttcgctggatccccatccatgcaggcacaggaacagcggatgcgtggcatgctggtcgaagccgccgcgcgaggcgacgctgtgttccacggtgagtggctcgccaaaacgtccaggcacagtggtggattcgcggccgatcagaggctggctggcattcgcttctttgctcataccagtccaatatagaggtcttgcacgctgtgcggaaaacgatggaccatgatttcaatcacattgggtaatccgcgccgaatcgccttgggactttccaggggataccggcaatctgtcaggcattaccgctgtttgcggctgcggtgtctgtggctgcggtgattgtctcaagttcgccgccccactgctgctgcagtgcggtcatcttgctgccctcgccgaacaccatccagcgtttgccgttcagcaatcgccaatcacctttcgtttgctcattatcagcgtattggctcagcagttcggaaatcttgctttcgataggtgcccggctgatggctgcggacgattccgattcaaaggacacgaaggccactctcggatcagtgcacatctgtacggtggtgatgcctggcaaaccgcccgcatcaagcccctgccatccttctttgcacgcgccggcagcttgttctatgccttgctccatctgtgcggtatcttcgacgggtgccttgtcgttcgactgctgaatcagtccttccgggaacaatacgcccatggccacgccgataaccaagcaaactatggcgcacaccagtgcgatgatgccgcccgcgcccactcccccgtgagtggcgtaccgaggcatggtgactcgcgcagcgatgaccagaatcagggtgatgccgataagcaccgccgccgtcaacgcaatgtatcgtcctggcactgccgtcataaaggaaatggcgtaaggcgcgatttcatgaaccgccgaggtggccgataccacgacggctagcagtccgctgacaacggcaagtctgcggcacaatatcgacgttgggctgctggcttttgtagcggcaaatcgccggccggcattccgcctggatgggcgtcgattctgtgcacgacgtgagctgcgcgaatcgtcatactgaccatcgccgaagaaatcgtagtcctcatcgttgcgggccatcggtgcccccttcctgccgattacacagccagtgtaccgctatggcttgggaatggcggtcattcgggggaatgattcagggcaaaaaagaaccccggcggttgcccgccggggagagaaaggagagagaagaagaaagggggttcaattgtcgggaactgctgcggctcctgatcagctttccgctgacatcatttatataaccactgctttctgggtctacctctaagtttctctgagaaaaacctgagaatacttgcgattgatggaccgcggaagcatgaggagcctctcacgtttccgcccaaggcgctagacttgaaggcagtatttatttgcccaaggagtttttcacatgctgctgtccgatcgcgatattctcgccgcacagtccgcaggtcatatctcacttgatccgtggacccccgaaatggtgcagcccgcttccatcgacgtgcgattggatcggtacttccgtttgttcaataaccacgcctacacctatgtcgatccggcggaaaaccagggcgcgctcaccgaacagttcgaggtggatcccgacgaaccgtggattttgcaccccggcgagttcgcactgggttccacgtgggaatacgtcaagttggacccgtccattgccgcccgtctggaaggcaagagctcactgggtcgattgggtattctgacccattcgactgcgggcttcattgaccccggtttcgaggggcatattacgcttgagctgtctaatgtgtcgacgctgccggtcaaactatggcctggcatgaaaatcggccagatgtgcttcttccagctgagctcgcccgctgagcacccttatggctccaagggcaccggctcgcattatcagggccaacggggcccgacgccgagccgttcctacgagaatttctaccgcgcgcacatcgacgactgagcgttgcgacgtatcattcggccggcggatgccggccatttgcttaatcccaaggagatgtcatgaccaacagcgatggtgggttccagttcgacttccagcagcacgaaaagccggtca

SEQ ID NO: 988 - DNA, 4525 bp, Unknown
  R117_24m  MAG No. k141_24832
tacggagacaacacgctcgacgcctacgccaaacgtcagggcgcgcttgattccgcccacaacgaacgccacttgggccttgaggattcgcacatcatgctggtggccatgaaacaccatctggcggcgctgaaagcgcaaaggaaagggccgtgggggcccgccggcagggctggcgtcggcggcaagtcctgcggtcgtaagcggtgagtacactattggtctcgtgagtaactatcaggacggccgacagcagcgtgagaaccgccgccgcaccatcgtgcgtgtggtgtgtgtcgtcatagctgtggccatgctcggctccctgatcatcccggcgatttacgcggggctttgacgttgccttcgcatattcgtgcccgcagttgaacacgtctgatgcgagggatttgtgaggtcgcccggccggctatcggcaaggcaggcccggaaccttctggcagcatggattgcaggcggatgcgtgtgtggcgcggcaatgcccaccaacgccagaggaatgtgcgaaggctgtcaacaaggacgtgacttcccaaagaatctcaaagaatcaacagtaaggtaaaccacgatggcagaatttgactttacccaggcgatcggcgaagcccgcgccaaatacgaatccatcgccaaggcgctggacgtcgaccggctcaaggccgatatcaaggatctcgaaacgcaggccgcggccccgggcctgtgggatgatccggaaaacgcccagaagatcaccagccggctgtccgccgcggaatcgcagctgaagcgtctgaactccgcctcccagcgcatcgacgatgtggaaacgctcgttgaactcggccacgaggagggcgaccaggactctctggacgaggcgcaaagcgaaatcggcgagattcagaaggatctcgaccagatggagatccagaccctgctcgatggcgaatacgacgaacgttccgccgtggtgaccatccgctccggtgccggcggcgtcgacgcggccgacttcgcgcagatgctgttgcgcatgtacctgcgctactgcgagcgtaacggcttcaaggccaaggtcatggacacctcctacgccgaagaggccggcatcaagtccgccaccttccaggtggacgccccctacgcttacggccgactgtccgtggagggcggcacccaccgtctggtgcgcatctccccgttcgacaaccagggccgccgccagaccagcttcgccgccgtggaagtggtgccgctggtcgaggccaccgaccatatcgacattccggatacggacatccgcgtggacacctactgttcctccggccccggcggccagggcgtgaacaccacgtactcggccgtgcgcatcacccaccttcccaccggcatcgtggtgaccatgcaggatgagcgttcgcagattcagaaccgtgcctccgccatggccgtgctccagtcccgactgctcgtgctgcgccacgaggaggaggccaagaagaagaaggagctcgccggcgacatcaaggccagctggggcgatcagatgcgctcctacgtgctgcacccctaccagatggtcaaggacctgcgcaccggctacgaaaccagccagactcaggccgtgttcgacggcgacatcaacgcgttcatcgaggccggcatccgctggcgccatgaacagcgccgcgccgccgaaaccgaggagtaaacagcattatggcactgatctcactggacaatgtgtccaagatctatcccaaaggcacccgaccggcgcttgacgacatcaacctcgatatcgaacgcggtgatttcgtgttccttgtgggtgcgtccggctccggcaagaccacgctcttgagcctgctgttgcgcgaggaggaggccaccagcggcgagattcgcgtggccggcaacgatctgcggcgcatcaccaaccgtcaagtgccgcagtaccgccgttcgctgggcttcgtgttccaggattacaagctgctcaataacaaaaccgtatgggagaacgtggcgttcgcccttgaggtgatcggcacgcggcggtccaccatcaaatcgttggtgcccaaggtgctgaataccgtgggactcaccggcaaggaaaagaactatccgcatgagctctccggtggcgagcagcagcgtgtggccatcgcccgcgcctacgtgaatcacccgcagattctgctggccgacgagcccaccggcaacctcgacccgaccacttcgctgggcatcatggaagtgctggacgccatcaaccgcaccggcaccaccatcgtcatggccacgcataacgaagagatcgtcaactcgatgcgcaagcgcgtggtcgaactgcacaacggcaagatcgtgcgtgacgaggctcatggctcctacgattccgccctgttcttcccggatgccgaagtcgaagccaagtccgacaccgcccatcatgtgctggcggcggcgaccaaggccatcgagggcagtgacgagccgtctgaaggcatcgcccgtttggccaattccgtgcattccggccgcaccggccgctatggcgagacgtttgcgccgctggaagacacgctgacctggggcaagggcatttcgttggatgagcaggccgccgccctggaaagcacccaggcgttcgacccgttcaaggacgagtccgccgcgaccgccgcggttgccgatacgtccgtgtcatccgccgccgagccgccggccccgccggagccgcccgcaccgccggaaccgcccgcgccgccggccaacgagcagtccgccgccgagcagcctgctgacgagcagtccgccgacgagcagtccgccgcagaccaaacatccgacgatcaacccgctgagggcgcgaaggagtaagggggatcatcatgcgagcacgattcattctgtccgaaacgtgggccaacctcacccgtaacctgtcgatgctgctgtcgctgacgctggtcaccttcatctcattcctgttcatcggcgcttcggtgcttactcaggcgcagatcaccaaagccaagggcgactggtacgacaaggtcgaggtcgtggtgtggctatgtcccgacggcaccagccagtccgcgaactgtgcttccggcaaatcgccctcagccaatgagatcacggcactgcagaaaaccattcgcgatgaactcaacgacgtggtctccaacatcgactatgtcagcaagcaggatttctacgacaacaccttcaccaagcagtacccgaacggtgaattccaaggccgtacgctgaccgcggacgatatgcaggactccctctggctcaagctcaaggaccccaccaaatatcaggtggtctccgaagtgctctccggcaaggagggtgtggaagacgttaccgatcagcgccagatcttcgacccggtgttcgccgtgctcaaccgagccacggcggttacggctgtgctcgccggcgtgatggtggtggtcgccatcctgctgaccggaaccaccattcgtatgtccgccgcatccagacgaaccgaaaccgaaatcatgaggtacgtgggtgcctcgaactggacgattcgtctgccgttcattctggagggcaccatcgcctcgctgatcggctcggtgctctcgtgcctgatgctttcggctatcgtcaacgtgttcgtcaccggctggctggcgaaatccgttacatggattccttatgtgaatcagctcacggtactggtgatatcgccgttcctggttgtgggcgcgatactgctgtccatcatcgcttcaaccatctcgttgcggcgttatttgagggcgtaacgcgaccggcttacccgcgagaaatgtgatgacatcgtgtgcaagcctctcaggttcgcatgttatggtattggcttaagtgagcgaaaggactattcacatatgacgaacgtacgtgtgatcaagcccgcactggcggcactggtggccgccgcagcctgtgtgggaggtctggcgttcagctcggcacagcctgcccaggcagacacctattccgacctgatcaatgcgcagaaccagcacgccgcgtcggtacagcgcgaggccgaactcaagcagcagctggccggtgccagccaggacctggcgaataaggtacttgagctggacgatctgaccaacaacaagattgtcgccgcgcaggccaaggtcacacaggccaacgaggatgccgccaccgctcaggacgaggccgatgccgcatccggacgtctttccgccgcgcagaaagacaaggagacgcttgaggagcggatcaagcagaccggcaaggactacgatgacgcgcacgccgccgtggcccagctggcccgtgacgagatgcacggctcgaatgcttccgacgtgatgagcgtggtgacgggtgccaccagcacacaggacttcgtcaactccatgcagtcccgggacgcgttgtcccgcaacgaggcgaatgcggcttcctccgccgcgacctcactgagcacgtcgaagaa

SEQ ID NO: 989 - DNA, 5925 bp, Unknown
  R117_24m  MAG No. k141_25117
ctactgaccgcgctgaccggcgcattgccgcaactgccgatcacccatgacatggtgctgatgattacggtcatcgccggactgccgaccatgaccaccattgccatgttcaccgggcgcaagaacaacatgcccgagtatgcggtcggcttcgtgctcgtaagcacgctgttctcgctggcctctctgacgattgtgtcggcggtcgtgttctgaattgtccccttcgatgaaaagaatgccgggggcctccggcgcttggaatttcatcgacgccgccaacgactcggcatccgaggcggccgtgccgtatttcaaggagatattcgattacgcgcgcacgctcgatccgcagcatcgcccgctgacctacaccaatctgctgatggccgccggaggcaaagacaagtgccatcagttcgcggatgtcatctgcctgaaccggtattacggctgatatgtgcaagatgggtatcagctcatcggagccaagaaggccttcatcaacgagatgaaccaatggatgaacaccgaacccaacaagccattcctgttcaccgaatacggtgcggacaccgatgccggtgcgcacaagctgccaagcgtgcagtggagtgaggaataccagtgtgagtacctcaccatgcagcacgaagtgttcgacatgttcgaggcagtggtgggcgagcaggtatggaacctctgcgacttccaaaccggtgaaggtatcatgcgcgtcgacggcaacaagaagggcgtcttcactcgcgaccgtcagcccaaagccgccgcctatgtactcaaggagcgttgggagactaagtagcggcccgcccttggaatattccaggagcaacacacatcgcataacacacaacgcaacatacaaaaaagaacctcgtgaaacgaatttcacgaggttctttctagttacgctgaatgactcccattagactcccacgagggaagagcaatggcgaaatcccaacgttgctaagctctcaaactcagatgtggaagtagagctcgtactcgagcggggtcggggccaggcgagcctggtcgatctcgtcgcgcttgaggccaatccaggtctcgatcaggtcgtcggtgaacacgtcgccggcggtgaggaagtcgtggtcctcttccagggcgtccatagcctcggccagggagcttggcacctgcttgatgccagcgtgctcttccggcggcagctcgtagaggtccttgtcgaccggctccggaggctcgatgtggttcaggatgccgtccaggccagccatcagctgagcggagaaggccaggaacgggttgcaggacggatccggagcgcggaactcgatgcgcttggcagccggggaggtgccggccagcggaatacggatggcggcagaacggttacgagcggagtacaccaggttgaccggagcctcgaagcccgggaccagacggtggtaggagttcagggacgggttggtgaaggccagcacggaggaggagtgcttgatcagaccgccgatgtaccagcgagccagatcggacagaccagcgtagcccttctcgtcgtagaacagcggcttgccgtccttccacagggactggtggcagtgcataccagtgccgttgtcgtcggcgatcggcttcggcatgaaggtcgcagccttgccggccagagcggcggtctcgtggacgacgtacttgtacttcatcaggtcatcgcctgcgtgctgcagggtgttgaagcggtagttgatctcctgctggccagcgccggcgacctcgtggtgggaacgctcgaggatcagaccgaccttctgcaggttggcgaccatatcgtcgcgcagatcctgggtgtggtcaatcggcggaaccgggaagtagcccttcttgacgcgattcttgaaaccgatgttcggggtgccgtcctcttcggagtcaacgccggagttccacggagcttcgatggagtcgacctcgtagaaggagcgctgcatggagttctcgaaacgcaccttgtcgaagatgaagaactcggcctcaggagcgaaggatgcggtgtcggcgatgccggtggacttcaggtaggcctcggccttgccggcgacctgacgcgggtcgcgggagtacggctcgtcggtcagcgggtcgacgatggagaaggccacgtcaagggtcttgtgcttgcggaacgggtcaacgaaagaggtctcaacgtccgggaccagcttcatgtcggactcgttgatggcctggaagccctgaacggaggaaccatcgaacggcatgccgtcggtgaaagcgtccttcaggaattcgctagccggcacggtgaagtgctgctgaacgccgataagatcggtgaaacggacggagacatactcgatgccttccttgttgataagggcctcgacgtcttccttggacttgagttcggtcacgggaccgctcctttcgtatgagatataacggtatatatcgtaaaatagcgcgtttcgccggctcgaaacttgggttacgagaatgtttcgtgactgtggccgacaatcgcgcaggcgcgttatttcaacgaaacatcattacagaatggaaacggagactatcgggggagtaggtagagatgtccgcaacgtggacagtgggtattgacaggtgacgtaggtggatgtaagtggacgcgattatgagacatatgacgaagccccggaaccgattgaacggattccggggcttctgtgcgatttggtggtgtgctgccgatcagcgaccgcgcatcgcgcggcgggagatcttctgcgggcggttcggatccatgcccttggggatggcatagcccttcttggcctgcagcgtgcgaagacgatcgttcagcgtttccatctcggccttggtcagcaggaagcgacggcgcggatgaatcttggcgatcagtgcgttcttgtggtgcgtgggctcatagctcttggacttgatcaccgtgctacgcagcttggtcagcggcacctgcttggggccgtggcccacggcgatgcggtatatcggaatggaggagccggcggtgacgcccttgatatcgcgttcctgacgatccatcgccttcatgacgcgaccgtattcgccttcgccgatcaggtagatgccgttcatcgaagtgccgcgccagatggcatccttggtcttcgggtcgatccacaccggttcctgcgggaagtcaaagccggctttctgcatgttgctcagcacgccgatggcggcaccaggcttgccatcaatctgcttgtagccgactgcatccgcgcggcgggtgagcatcatggtggccagcagaatgccgagcatgatggcggtaatcatggtgaagatccaggtcagccaggtccacttgacaatcagaccgatgatgatcatcacgactacaggcagcaggaaagcaccggcctcaagccacggcagggccttgtcttccttagccgtgtacttgtagatctggatgatctgcttgattgtgctctgcttcttcggcttcgcgtccttttccgccatcacttcttcctttgttgggacgaaacacactgggcaatatcttatcaggtgcgctggtccgaacttgcttgtgctggttggtctcagcgtgtgtgcaacggtcgtccgtcggccttgagcagcgcctcgccgagcgtttcactgaatgtgggatgcgggtgaacgaggcgggctgcgtcggcgagcggcacatggttgccgaccagctgttcggcttcggcgatgatgtcggaggccatcggggagaccatgtgcacgccgagcacgcgcggggtgtccgggttggccgcgtcgcagccggagacgatggtcaatgagccggccgtgccgctcatcagcatgcgcgcgttcgccagcatcggatagttggtctccttgatttcgacgaggtcctctctcgcctgcgcctgttcgacggtgagcccgaccgacgccgcttcggggaaggagaacacgatctgcggcacagcggcttcgtccaccggcttgggattgagtccggcgatggtctccgcgatgacgatgccttgctcaaaagcacgatgcgccagtgcgtgaccggccgtcacgtcgcccaccgcccatacgcccggtttgtcggtgcgaccgtacgcatccgtggcgacatgtccgtggtcatcaatcgtcacgccccatgctgggtcggtgatcgggtcacgcccgatggcgacaagggcgatttcgccccaaacgctctgttcgccgtcctggccttcgcgcgtgtagtgcacggtggcaccaaggttcgcgccggtgtccacatgggtgacgctggcgcgggtgatgatgttcacgccatgacgtttgagctcacgggtcagcgtggtgccggctctccggtcccaggctgagagcacgcggtccttgcgaatcagcagggtcaccttcgaaccggcggcgttccacatcgaggcgaattcaagggcgatggccccggcgccgataatcaccgccgaagagggaaattcgttgacttccagcgcctgtgtggagtcgatgagggcgccggcgaacgggttaccgggcaatgggtgtggcttggcaccggtggcgatgacgatgttcgtggccgtgaggtccatcgtggggccgctgggttcggggacatcggccttgtgataggtgaggatgtcgctttggtcgggggagggaacgaggtggacgatgtggttggaagttgctggagcgatctcatccgcatggaacgcggcattggctcggaacacggtgatgccgcgatgggccagcagtccggccagtcctcccaccatcgtcttgaccacgcgcaggcgatagtcgcgcagcgtgccgaagtcgatgccattcaccgaggcgttgacgccgagttcggccgcacggtgcacggtgtcgatggtgtgggtggcggtgatgagcgctttggaggggatgcagccacggttgagacaggtgccgcccacggtggcgtcacgctcgacgagtgccactttcatgccgagttcggcggcgcgcagggctgtggaatagccgccggggccggccccgatgatgaccagatcaaactgttcgctcatgattgcctccttggtgcatataagtatggctcccatgctagggagccatatgcggctatcgccgccacttcgcctaaaaacagtccactggactgttttctttacggctcagcccctcaacgaggggagccagagtatatatggacatcagtctgccggccagtgaccgcgcttcgggtaacgcggcttgggaagcctccaacgacgcatctgaatcgaacgtctccaagcgtaggagaaggagcgggagcccttggacacggactgttcgccgtacttggcgatgagcttggccttgagcttgcgccacatcagccatacgtcgatgatcacggcaatcaggtaaccgtacataagcgccatcatgatgatggaagcccactggttctgcatcaaagaagtgacgaacatggagacgatcagaatcgcgaaggccaccgggatgaaccattcgccaaggttgaaacgggcatccacataatcacggatgtagatacgccaaggcaggcgttccgacttgggcatgtggttgatgtcgcccttctgcatcgcctcgtactcggcgttctccctctcgcgcagacgggctttggcggccttggcgctggccttgcggtccaccggaaccagcggacggataccggcggcctgagcctgcttcatcttcggggtaggacggccttttttctcagaaggatcggcggccttcttcggggcctgctcaacgggaacttgggcctcttcttttttcctaaacggattccatgtcatgctttgaggttacggtgacgttcagacacttgta

SEQ ID NO: 990 - DNA, 21783 bp, Unknown
  R117_24m  MAG No. k141_25250
gctcccagtcgcggtgcgttctggctcatccagatgctcggcacgcggccgtctgcggagcgtgagccgagcagattgaagccgttcttttccagcagccactccgggtgctgggtggcgatggccaagccttcctcgagggtgagcggcaggcgttcatcggagtcgataagcttgcgggccacgtccggctcgcgattgatataacacgtgccggtgtgcggattgacgaccagatagaacgggccttccggcggcatgaagccgtcttgaggcaggaagctggcgatgtcacgcggcggcatggtggtgaagccggccatgcgattgatggaggttcgtgcgatcagtgactcaggcgaaaccagttcgcgcgtgggcaccagcaggatgttcgatcccaaatcggaatgctcgagcgccccgatcaggggtcgggccagcgagcggaatgcggcggcggaaatatccgccacatccggatagccgagagccacgatacggtcgagctgtttttgggcctctactgatgcgatagacatggctaccagtgtagaacaccgccgtctcttcgttagtcaccccgttgtctatttagaagtgcaacatccttgttgttcggttaatgatagtggttcgtcggcgaatgcctcggccggggtgcggtagccgagcacgcgcatgggacggttgtcggtctcgtccacgatggcctgtatctcgtcggccatggacgggtcgacgcgcgtgcgcttgggcaggtagcggcggatcgcgccgttgcagttctcgttgccgccgcgccggcacgacgggtacggggcggtgaagtaggtggccatgccgagccgttcgcgcagttccgcgtggcgggcgaactcggtgccgttgtcgtgcgtgacgccggtcccggcgcggcggcgtccggccttccggtgcgcggggccggcgatgtggcaccggccggtccacggccccgtcttgagacgctccggccggtacggccggtaggattcgttctcgttggacgggaaccatgtgttgcgtttgattccgcggctgaccgtggaggtgtgtctgccgatcaggccggcgatccgccgtatgctcgtcccgttgccgatctctatccggatgatccgccgttcctcttccgacaggtgcgaatacacttgacccaaggcgcgacaccccttcactggttatctggacaatctccaatttaaagggtgttgcactttcatctagacaacgggtgccaattttcattggcatccatatgatacgattaacttatcagatgtctgatgtctcgatatcgagacgtacgacaacccatcacaagaccgaggcgacgagcatggcaccatggcagacaacggatttcccacacggcgcgggcaccgtcatcgccgaattctccgtacgtgcggacgggccgatctggcgggcgcaggtccccgccaccgccgacggaattcccactgccgccccatacctttgcctggccgtgcgtgacgggcacctcacgctgacggcgcggtccctgtccccggacccggccgacccaaatgcgcagtcccacgtcagcctcgacatcgaagacgccttcggcctcgatcctggaacgatacacgaggccgcattgaccttcggcgcgttcggcacgcgcatctacctggacggataccaatgctttgcctgcgccggcaatctcaatccctcacgggtccacccatcgggcgcattcgacctcggctcacccaatgccattgcctgcaatgcgttcctcgtcgaccccgtggattgggacgccgtccgcatcgccgagcatgccgcggcggccaagccggatatcgtcttcgcctcggaccggctctcccccagggataccgatcgcatcgccctggcggatgcgggcagcgtccatgcgagattccgcctgcgcggtcgcggacagcatggcacgatcctcgcggccggcgtcgatggaagcgagcgcatgaccgtcgccatcggcgccggaggactgacgctggccatgcgggacgaatccggagcgggcatcgcatgccacgcgccgggccattgggatgacggaggctggcacgatctggccgtccgctcctcgcgcggcgccgttgacctctttatggacggcgtcagcgtgctgcaccagccgggccagatgtggttcgcggatctggccggtccacgccacggccgaaaaggcatcgacgctttcaccgtggggcgcaatatcgccggggtgcggctcatgggcgaggtcagccgtggaggcctgtacgtccacgcgcttaccgacgggcagatcgcacggctcgctcacactcccccgatggtcaccacggcgctgttcgacgcgggatacgccgggtcggccagctatcgcataccctcgctgatccgcaccgtccgcggcacgctgatcgccggggccgaccagcgaacggcgatcagcaacgacgcccccaaccacatcaacttcgtcatccgcaggtcaaccgacggcgggcgcaactggatgccgatgcagacggtcatcgacatgcccggacgcgaggacgggctggacggggccagcgcgctcgactcctgctccgtagtggaccggagcatcggacgcatcacggtattaatcgatctcaatcccggaggcatcggcctgaccaactgcgagcgcggcatcggcgtgaaccgcgacggcgttctgcgtctgcgggacgctcagggcaatgagaccacgctggacgccgtggccgacgccggcgacgtgtggcgaagtcccatgcatgccgacccgtcgcaacgctggcatgcggttcccacctgctacatcgcgcagatccattccgacgacgacggcgagacctggtcaccgccattcctcattgacgcaatggtcaaagaggaatggatgcatttcatgggcgtatgcccgggaaccggcatccagctggacaaggggccatatgccggtcgtctgctcatgccgttctattgcagcgggcagagccgcgcccactattccggcggagcactgatcagcgacgacggaggcgaaacctggcgacgcggacgcatgatcaacgaggggcgcgagatcaacgggaccgtcgtcgatccagccaccatgcgcgacgacgacgcaacgaccagcgaaacgacgttcgtacagcgcgcggacggcgacgtagtggcgtttttccgcaaccagcacgccagcggacgcgtgggcaaggcggtcagccacgatggcggcgatacctgggacgagcttgagttcgatcccgccttgccggagatcttcagccagccgaacgcccttgcggtgccgcagcttggcactgacgcggtgctgttcgccaacgccagccagatgatgccataccggggacggggcatggtgcgactgagcgaggacggcggacggacctggacgggcagcctgtgcgtgcacccccatcatcatgtctatcaatgcatggcaatatgtgaaacgacgcacgacgtagaatgtgaaggttcacaattgggactattgtgggaaatagagacgacgggggtttacattacgcatatcccccttgcatggttttcacatggccacgataagggcgtcgcggccaaccatacggacgacaaggagtcatcatgaacggcacagcagaccgagccacggcgggctcacgcgcaacggatacggaacccgacgcgccgcaaggccaatacagtacgcaggagctggccgcgctggcgcgcctgtccctgggcaactggtcgaccacgcaggtctcttcccgcagccgatgcgacgagacgatggacgcgatcaagtcgtacatactgcgcgaacgtctgcaaccgggcgacgtgctgcccaccgaaacgcagctgtgcgacaccatcggggcgtcccggtcgtcggtgcgcgaggccgtgcgcaagctcgaggcgctgaacatcgtcaaggtggagcacggcaagggcaccttcgtcggttccctgtcgctggaccctatggtggaaacgctcgccttccggtcgatggcgtcggtcggcaagaatttcaccgatctgcaggacgtggtcgaactgcggcgcttcctcgacctgggatgcgccgaggaggtctgcgcgtccctggcgggaaccgagcagccgcgcctgacggaacttgccgagcgcatgagcgccgaagccaaggaaggcaagacgttcaccgggctcgacatcgaatttcacaggggaattctcgattcgctcaacaacaccgtggccaagcagatggtccgctccctgtggctcgtgcacatggccgtgctcccccagctcggactggcggtttccagcgaacttgaccgtaccgccgacgcccatcaccgcatgctcaacgcggcgctggccggcaatgtggacgactaccgcgaggccgtgttcgaccattacgagccgatcgaatcgattctcaagcgtcgcatcgtccaggagcagtaaacccgaaaccgcgggccgattggcgcgggcaatccagtcggcccgaccgacatgcgacacgccccttcaaaaagtaacccgttacacgatccgacggcccgcgcaccacaccgcggtcacggtgagcgtgccgggattggtgagcagcaggtcggcggcgtagccgggggccaccaggcccagcggcgcgccggttacggggttcggccgatcaaggccgagcgcatgcgccggggtgagcgtggcggcttcgagcgcgtcggtcaggcccatgccgagctcgcgcacggcgcgctgcaccgccacttcgaggatcagcgtcgagccggcgatcgcgccgttcgacaccagccgggcgtggccgcccaccacgttgacgtccagcgcgcccagtttgtaggcgccgtccgcacaaccggtggcggccatcgcgtcggtgacgaacgcaatgcgatgcggcgcgaaacccagtgccaggcgaagcgcgggattggccacgtggaagccgtcgttgatcagctcgatcgtgacgcgcggatcctcgaccgcggccggaatcgggccgggctcgcggtggtggatgccgttcatcgcgttgaacatgtgcgtcatgatgcccgcgccggcgtcgatcgcccggcgtgcgacgtcatagtcggcgtcacagtgtcccacggcggggaccacgccggccgcggcgaagcgccggatcgcgtccatgccgcattcgcgctcgggggcgatggtgatctgccttagcgtgccgtcggcggcctcaagcagacgctccacgcgctccggggtcggatcgcacaggcagttcgggtcatgcgcccccttgcgggccaacgccaggaacggcccctccagatgcgagccgagcacgtcgggccgcgttgccatcacggacctgacgcattcgaggttccgcgccatcacatccagcggattggtgatcagtgagagcacctggcgggtggtgccgtgcagcatgtggtacgcgcgcgccacggcgatgccctcggcaccgtcgtcgaacgaacgctcccaggcgccatgcgcatggatgtccacgtagccgggcgtcacgagcatgccgccggcatcgacctcggcgacctggtccccgccgctgagatgggcgatgcgggtttcaaggtcagcgtcgctcgtgcccacggcgtcgattacgccgtccgtcacgctcacccatgcgttgagctgcacgccacgcgcatcggccttgactgcattgcgaatgacgaaggttcccgccctggcggcgagcgcatccgcgaccatcgtcgcctgatagcgtttttgcatctgcgtttcctcagatcttctgccaggcgggcttgtgctcgtaggaataccggtagtagtccttgccgcgcagtttcgaggcggccgcctcgtccacgatgatcgtagcgtgcgggtgcagctgcagggcggatgccgggcagtacgagctcacgccgccctccacggtctccgcgaccgcctcggccttgcccgcgccgaacgcgagcagcacgaggtggcgggccttcatgatcgtgccgatgccctgcgtgatgcagtgcgtgggcacctggttgatgtcgttgtcgaagaagcgcgcgttgtcgatgcgggtccgctcggtcagcgtcttgacgcgagtgcccgaggcaagcgacgatccgggctcgttgaagcccacgtgcccgtcggtaccgatgcccagaatctgtacgtcgatgccgcccgcggcctcgatcgccgcgtcatatgccgcaccggcgccggcgaccttgtcgccgtcctccagcgcggtgccgttcagcgcgtcgcccggcacgtgcaccttggccgggtccagtcccagcggctcgaccaccgtgcggtggatggtcgcatggtacgactcggggtgcgtcagcggcaggccaatgtactcgtcgagcgcgaaaccgcgcaccctggatacgtcgattccctcgtccctgacgattgtcgcgagcgcccggtacgccgccagcgggctcgagcccgtggccagtcccagcaccgcgtccggcttggccttgatcagatcggccacgcaacggccatacagttcgccggcctcctgctcggatttgacgatgatcacttcagccatggcaattcctttcgtatgagcctattggcgttgcgccgcacgaacgccgccacgcgcttgcatgcgggcgggcattcgcgcaacgcatatggttgtgcggcaatcaggcctcagtggaggcggaaacctcttcgggggtgcgttccagcttcatgccgcactcctcgagcacggtggcgatgcgtttcacattctcgcccttgagcggcagcaccggatcaggcatctggttggtgtcgaacacgcccagcagcgccattgcggtcttgaaggcgcccactccggatccgaagcccgccacgccctgcggcacggtgacgatgcgcatcagcgcggccagccagtcctgctccttcctgaccgtggtccagtcgccggcttcggcggccttccacatgcgtacgtagccggtggcctccacgttggccaggcccggcacggagccgtcggcgccggccatgtaggcaccgtcgaccacaacctcctggcccgtcagcagcgtgagcggatggccggccttggcgttgtcgtccacgaggaagcggaaggccacgtcgtcgttcgaggagtccttgacgcctgcgagcacgccgtccctgcccagcttgaccagcaggtcgcccggcagcttggtatgcacgcacaccgggatgtcgtaggcgaacagcggcaggtccggcacggcggcgtgaatcaggcggaagtggcgctccacctcggccatgccgcccagggcatagaacgggcacgtggccacgatggcggacgcgccgagctccttggcctccttcgcatgctcgatcacgcggttggtttcggtgtcgatgcagccgacgaacaccggcacgcggccgtccacgacctgaatcacggtctggatgatctcgcggcgacgcgcatcggtgctgaacgccacctcgccggacgagccgagcgtgaacaggccgtcgacgccggcgtcgatcatgcggttgatcgagcgggcgaagctggccttgtccacttcaccggaagcggtgagcggggtgacgacggggggaatgaccccgcggaattgggttgccatgatgatgtgtcccttctttgaggattgtctttgaggattaaaaatggactgctgaaattattcggcgttggaatcgggcgaacgcgatttcaacgcgaggaaggcctcacgcgcattcggccgcggtgggatgcagcagcgagggcgccgcgtccatgaggatcctggtgtacccgtcctgcgggttgcgcatcacgtccatcgtcttgccgcgttccacgacggtgccgtggttcatgaccatcacctcgtcggagatgtagcggacggtttggatgtcgtggctgatgaacaccatcgacaggccgagcgtcctcttgaggtccgagagcaggttgaggatctgtgcgcgcaccgagacgtccagcgcggaggtgggctcgtcggcgatgatcgcgtccggcttgagcgacagggcgcgggcgatggcgacacgctggcgctgcccgccggacagctgcccgggcagggcgcccagcaccgaggtgggcaggccgaccatgcggatcagctcgtgggcgcgcctgtcgcgctcctccttggaaccgagcttgtggaccaccagcgggtcgagcagctggtcgatgacgctcatgcgggcgttcagcgcagtcgccgggtcctggaagaccacggagaccacgcggccgatgtccatgcgctccttggcggtgcggtgggtgacgtcctggcccttgaacagcaccttgccgctggtggcctgctgcaggccgcacatcacgttggccgtggtggacttgccgcagccggactcgccgacgatgccgatggtctggccgggcatgagcttcaggttcaccttgttgaccgcggtgatcctgttcttgtggaacagccccgatccggcgcgggtggtgaacaccacctcgacgtccctgagctcgatgatcggaacgttgggatccttcctgggggtttcggcggcgtggctcatcgggcacctccttcctgggtggaaactgtcgccgcggcgggcgtgacgtcggcatcggccggcagggcggcgtaatagtgatgcgtgccgggcacccgttcgaagatcgggcgcgtgttgaggccaacgtccgggtggctggagcggggagcgaagcgatcgcccttggggaagtcggccggggacggcacggttccgggcacctggtgcaggcgcttggcccctgcctcgatcgaggtgaccgagccgagcaggccgcgggtgtactcgtggcggggatcggtgaggatctccttggtgaagccctgctcgaccacctggccggcgtacatcacggtgatggaatgcgccaccttggccacgagggcgagatcgtgcgagacgaagatcatcgcgaagccgagcttttcgcgcagttcgttgagcaggtcgatgacctgcttctgcaccgtgacgtcgagcgcggtggtcggttcgtcggcgatgatgagcttggggtcgcgggtcagggccatggcgatgagcacgcgctggcgctggccgccggagagctcgtgcgggtaggattccagcgtgcgcttgggatcgaggcccacgagctcgagcagttcctcggcggagcgggtgccgccgcgggaggtgagctgcttcatctgcgacttgatcagcatcgaggggttgagcgaggagagggcgtcctggtagaccatggcgatctcgtggccgcgcagggcgttgtgctccttgggatccatgccgacgaggttcttgccgtcgaacaagatctcgccgctgatctcggccttcgggtccagcaggcccatgatggccagcgaggtgatcgacttgccgcagccggactcgcccacgaggcccatggtctcgccgggacgcacagagaagctcacgtggtccaccacgttcacgtcgccgtggcgcgggaacttgatgcacaaatccttgacctcgatgaccggggcggccgtgctcgtcggctcgaaccggtcggtgcgcttaagttcggcctccttgagtgcggcgagggaatcggccagggattcggcctgctccctgtaggcggcgactgggtcggtcaggaggcgatcctccctgcgctcggcctcggcgtcggcggcggacttggtcaccggggccgtcggggcggccaccatggcgtcggtgatgccctcggacaggatgttgaggcacagcacggtgatcatgatcgccagacccgggaacatggcctgccaccagtagccgaagatcacgccggccttggcggaggacaggatgttgccccaggtcggggtgggctcgggaatgcccgcgttgatgaaggacagcgacgcctcgaacacgatcgcgtcggcgacggacagggtggtgaacaccatgaccggggcggcgatgttgcgggtgacgtgcttgaagaggatccacggggcgcgggcgccggagacaatgaccgcgcgcacgtagtccttgccgtactcgctgatgatgttcgccctgacgatgcgggcgatctgcggcacgtagagcacgccgatcgagatgatgatgccgaccatcgactggccgaggatcgagacgaacacggcggcgagcgcgatgccgggcacggacatgaacacgtcgatgacgcgcatgatgagctcggagatccacgtgcgggtcacggcggcaagcgcgccgatcagtgagccgacgatgagcgcgaagacgatcgagctcaggccgatgaccagcgagtagcgggcaccgtagagcacgcgggagagcacgtcgcgaccgagattgtcggtgccgaaccagtgttcgccggtgggcgcctggtagctcatcgtgatctcgagcggatcgtgcggggaaaggacgggtgcgaagacggcgcagacgatgagcagcgcgatcaccacgaaggagatcttgcttcccacggtcatcttgctgaagcgattgaatttgacgccgggcctgcttgcggcctcggccgccttgttcttgccgaatagcatcgtcacaccgtcctgattcgcgggttgatcagcacatagagcagatcaacgatgatgttgatgatgatgaacgcgagggccacgacgagcaccacgccctggacgagcatcggctggttgccgttgatgccgtcgaacatcgcggtgcccatgccgggcagggcgaagatgacctcgatgacgatcgcgccgcccatcaggtagccgatcttcatgccgagggtggtgactggggtgatcagcgcgttgcggaacacgttgcgcgagacgaccacgctcttgggcacgcccgcgccgatggcggtgcgcacgtagtccttgtcgagctcctcgaccatcgaggtgcggatgatgcgggtcagctggccggccacgggcaggccgagggcgaaggacggcatggccatgcgggccaggtacgcgccggggtcctgcgtgaacgggacgaggtcgccggagccggggagccacgccatcttgatctgcagcacgtagatcagcagcacaccgagccagaaggacggggtggcgatggcgatgatcgaaaccacgcggatgatctggtcgacccaggtgtcgcggtacagggcggcgagcacgccgaacacgatggcgaacacgatggcgatgatcaggccgatgaaggtcagctgcagtgtgacggggaacgcctgggccacgcgggccgcgacggaatccttgttgacgccgtacacgcccatgtcgccgtggaacaagccgacgatgtagttgaagaactgctgccaccacggcaggtcataccccatctcgtggcggaaggcggccagcgcctcgggggtggagttctcgccaagcgccgcgacggcgggatcgtactgggagaaggacatcaggaagaacaccaaaaaggtgaccccgagtgccatgaacggcaaggcgatcagacgcctgcccaacagtcgtaacagattgctcactgtaaaagctcctatgcgtgcgccatcggcggttcagatgcgccgcgggcggggccggggcatccgcacgttcgcaggacgccccggttgccttgccgtccgttcggttcagccggtgatggcatatgtggattgcgtcagttcagcttggccttgaccaggttgatgccggtggagccaatggcctcccaagaggagaacgcgcccttcctgacggccgtggttgtcttgcgatggaacagcgggtagagcggcagctcttcggagagcaggtcgaagcactggttccagtactcctgtcgttcggaatcggaagaagcggcagtggccttgtccatcagctcatgtagctggttgtagccgtcagagcccttccagaaggagcgctgcttggtccaggcgttgtcgccgtaccaccagttcatcagcaggtcggggtcgttgccgaacacagagggatcgccgggggcgaggaccatcgagtagtcagcgtcgtccttgtccgtgatggacgggtacagcgcggaggacttcatcgactggatgtcgacgttcatgccgatctcggccaaatcgttcttgatctgcggtgcgagctgggtgatccaggaatggtcggtggtgtacagcgtgaagctgatcggcgtggtgaccccggcttcggcgagcagttccttggccttggccgtgtccttggtgtagacgttcttcgcctggtggtagtactgcgaatccttgggcaggaagctcgtggccgcttcggcctggccgctcatctggttggagatcagcttgtccacgtcgatcgcgtagaacacggcctggcgcacgcgcttgtcgtcgaacggcttcttcttggtgttgaacatcaggaacggcaggttgaagccctgcgcggtcttcagctcggagccggacgactggagggtctggagcgcctgggccgggaccatttccatgatgtcggtcttgccgccctgcatggcggtgacgcgggcggtgtcgtccacggtcacgttccacaccatgttcttggcctgggccgggtaggagccgttgtacaggtcgttcctctcgaatttgacctgctggtcggtgatctcggcgtacttccacgggccggagccgatgggcttgttcttcaggtcggcatcgctcatggacgacgggactatctggatcaacgccagtcgctgcttgaagagcgggaacgccttcttgagcttgaacgtcacttgggtgtcggacttcgcctcgacggaatcgatgaagtcaagcatcgaaatgtacagcgagccggtggcggtggtgcgctggtaggagctgaccacgtcattggcggtgacggcggtaccgtcggagaacttggcgccgtcgcgcagggtgaccacgtactcggtgtcggagaccttctccggatcgcccttggcaagagcggcatagggcttgtaggtgctgtagtccagcgcgtacagcggttcggtgacgtgccagttcgcggccatcggcagggcgccggaggtggtggacgggctgaagtcgcggctcgcataggcaacctgggcggtaatggtgtccgccacggcagttccggtcttcgcggcggtctgggtgccgccaccgcatccggacagcagcatcaggctggcgacggccgcggccacggcggccttgaactttccgtttctcttgatcatgcgatctcctcatcattgagtgaatttcgaatcaccgtccgacagacgacgcgatcctttcctaattgcttcattgaccgttccccggcctgcgtccgcttcggcctttccgcgttacggcggaccattgcggtttgtgcgggactcctgcggggaaccaccaacatcgttgtcgaacctccttaatggtaagacgtctgatgtctgatttcaaatcggcgtgttgaggaattcactcgtcaaggcccctccgcgctgatctgcctatacttcaccagccttgaatatcggcaatatttcgggcttcgccgaccgttatcgttccgaaaatgtttgtttaccattctgcaataagacatctgacgtctgttaacataacggcaactttcgccgccgacgaacgcggcaaacacgggatatggcgccaaacgacaagaccgccgtggtccgttcgccggcatagtcgaacggaccacggcggcccatgccacgggatgccaccgcaccggcattccggctgcggcaccgggcatgcagcgtcacggccgcatgccgcgaggcatcacagcttcgcggcgaaccagcgcgtgatcgtcgtcggatgcgtgatcgcggtgcccaccacggcggcccacgcgccgcattccatcacgcggtgcagctggtcgggcgtgtggatgcgcccctcgcacagcaccggcatgtccgggaacgccttgaccatccgctcgagcagttcgaagtccgggccgtcggtcttgagacgctcaccggtgtagccggacagcgtggtggagatgatgtcggtgccggcctcgaccgcacgctcggcgtcggcgaaactgccgcagtcggccatcgtgatcacgccctcgtcgtgcagtgcgtgcacggtgtcggcgtagctcagaccgtccgggcgaggcctgccggtggcgtcgatcgccacgatgtcggcgcccgcggccgcgcagcaacgggcgtggcgcagcgtcggggtgatatagacgccctcgtcgccctccttccagatgccgatcaccggcaccttcacctgtcccttgatggcagcgatgtcggcaagtccctgacagcggatgcccaccgcgccaccctccaccgcggccatggccatttgggccatcgtctcggggtggcgcagcggctcgcccggatacgcctggcagctgacgacaagcccgcccctgatcttttcgattacctgatgcatgatgcgcttcctttcctcatgccttgacattgcttcatatgggtgttgacgattgcgcgacgaattgccggagagcgccggctcggggtcctcccgaggggagtcccagcccggcggcggatcacgggcggccctgcgcgacatgcctgcgcacggccaccgcggcgccgatcagcggagcggcgccgcccagttcgccctccaccagcggcgcggacctgaccagctgcaatgcggaatcctcgaatcccgcgcgcagggcgttccaccacagggggccggccttgaccaccgacccggaaacgacgatgacgtccgggtcgatgagattgcccatgccgccgatgcactcgcccagcgcacgggcgctgtcctcgatcacgccgacggccaggggctccccagcggccgcgcgcgccgcaacctgggagccgtccgccaccggttcgccctcttcggcatcgcaacgggcgttgtagaggtccttcagccccgtgccggacgcgaccggctcgatgtgcccctcgagggtgccgcacgagcataggaatccgcggcccagcgcgctcggcacgtgccccgcgtggccggccacgccgtgcgcgccggtgaacagggcgccatccaccacgatcgcgccgccgatgccggtgcccacgccgatcgagagcaccacgcccctgccgcgtccggcgccgtacgtcgcctcgcccagaccgtgtgcgcccacgtcgccgatcatgtgcaccggcaggtcggtcacggccgcgaacgcgtcgtagatgcgctggccgcgccagccgggcaggatgtccgtggcggagacgatctcgccggtttcactgtccggcacgccggccgccgcaatgccgacgccggcgatcgccacgccctcggcctcggcgcgctcaagctggcggacggcgaaggcgacgatgcggttcttcaggtcctcgccgccgcgcgcggcctcggtcgggatttcgcagcgggccgtcacctcgggcctgccgtccgcgcccgcgtttgcgtttgcgcttgcgggcaacgtcacgaatcccgaggcgaccttggtaccgccgatgtcgaaggcgaggtaggtgggcgccgcccccgcgctcatgcgacgaccgcctcgtggatgcgcgcgagatagtcgaggcgctcctcgaccgtcgcggccttgggcacgcacaccttggcgcccagatagtcgagcgggcgctcctgcgtcccggcggcgcgcacggcggccttgatggcggcggcgtccatgagcgaggtcggctcgtccgggttcatgggcaggtggccgtcgatccagccgtagccgtactgggtctcctccgggccggcgccggagaacatgaggccgctcagtacgccggccttcgcggcggcctccacgtgcgccacggcggtttcgggtgtgcgcccctccaccaccgagcgtccccagttgacggtgagcccgatgccggccgacccgcacagcgcgatctcgtcctcaatcggcaggaagcccttttccggcttctgcccctcgacgtacttgtcgcagtgctcgatgaccagcttggcgccggaccagtccagctgcgcgagggcctgcaacgaggcggtcatcgcgtcgcggctggcaatgcgcgtgggcgccgtgtggatttcgacgaacttgacgtcctggctgccccgccactgtgcaaagtcggcgagcgcgtcgcgcagctgcttgaagaacgccagagcgaaccggcgtccgtcctcgtccgggctggccagtccgaagttcgggtccttccatacgtgctgcatggtgcccggaatggcagtgaccgtattgttcttccaatgcctgggcagttggccggcaagccagatgcggtcggcggtttcggcaaggtcccccgggaaggggatctcggtgccgtcgatccagggctgaccgcccagcagatcgtaataggcttcctgggcttcgcgcccctgcggcaatgacgcgtacgcgccgacgacgaatgatggcatcgctttcctccttgaaatgcccgatgcgggttcgctgagcattcctatcgtactatcatcagacatctgatatctaatctgttaaaggcagattacttcggcgtgtcttctctcggcctgccgaccttagcatcatgcattcgcttactatgcttgcccccctggaggggaaccagaaattatcaacaaatagtgacatgggatgctaaccgcggccagccggtgaaatggcatgcgcttatacggtttcaccggctggcgcccgctacggcggagttttcgtatggccctgtacgatttcaccggctgacgggcacccagccggagtttccatatacggtcatacgatttcaccgtcttagccgcagccagccggtgaaatcgtatgtggactccgtgcggcaacaagtcagcgggcaagcggcacggccccgacaagccgcgcaatccgctcactaacggaacagcgagacgcccctgcgggccatgcagaatgcgttgccaagccacgtgtgcttggaattcggccacaccgcaccgagcctcggggcgttctggctcagccagatgctgggcacgcggccgtcggcgctgcgcgagcccagcaggttgaacccgtttttctcctgaagccagcccggatgctgcgtggcgatggccagtccctcctcgagcgtgagcggaatgcgctcgtcggagtcaatgagcttgcgggccacgtcgggctcgcggtttgtgtgtacttggtaccggtgcgcggttccacgacgatgtagaacggtccctcgggcggctcgaagccgtcctgcggcaaaaagctcgcgatgtcgcgcggcggcatcgtggcgaaaccggccatgcggttgatcgacgtacgggaaatcagcgattcgggcgacaccagctcgcgcgtgggcgccagcaggatgcgctcgtcaaaatcggtatgctccagcgcctcgatcagcggacgggccagggagcggaacgccgcggcgctcacatccgccacgtccgggtaccccaatgccacgatgcggtccaactggcgctgcgcttctaccgacgccttcgacatgactcccagtgcagagcatcgcggcggggcggcgccgtgacgttccagccggttccggcgtcccgtcgcaccggcgatccggcccagcatacgggcacccggttcttcttgttccgcccgattcgtaagattgatggatacgtgtggccatttcgctacggctgcccgaacgtgaaatcaatccgtcaaacccagaaggttgttatgtccgaaaagttgaaagtcggcattctcggcgccaccggtatggtcggtcagcgttttatcacgctgcttgagaatcacccgtggttcgaggtggtcacccttgccgcttccgcgcacagcgccggcaagacgtatgccgaggcggtcggagaccgttggaagatggaaaccccgatgcccgaatacgtcaagaacatggtggtcgtcgatggcgacgatgccgagtccgtggcctctggcgttgatttcatgttctctgcggtaaacatgccgaaggaccagattcgcgccattgaagagcgttatgccaagaccgagaccccggtggtctccaacaacagcgctcaccgttggaccccggacgtgccgatggtggtgccggagatcaacccggagcacttcgaggtgatcgagcaccagcgcaagcgcctgggcaccactcgtggtttcatcgccgtcaagccgaactgctcgattcaggcctacacgccggcactggccgcatggaaggaattcgagccgcgtgaggtggttgtgagcacctatcaggcgatttccggcgcaggcaagaccttcaaggattggcctgagatggtgggcaacatcatcccgttcatctctggtgaagaagcgaagtccgagaaggaaccgctcaaggtgttcggccatgtggacgccgaaaagggcgagatcgtgccgttcgacggcgacctcaagatcacttcgcaatgcatccgcgtgcccgtgctcaacggtcacaccgccaccgtgttcctgaacttcggcaagaaggccaccaaggaagagcttatcgaccgtctggtgaactacacgtccaaggcttccgagctggagctgccgcacgcgccgaagcacttcatccagtacctcaccgaggatgaccgcccgcaggtcaagctcgacgtggactacgagggtggcatgggcgtttccatcggccgtctgcgtgaggattccatcttcgattggaagttcgtgggtctggcccacaacaccctgcgtggtgcagccggcggcgccctcgaatgcgccgaaatgctcaaggctctaggctacatcactaagaagtagttgaatctcgttaaaatcgcaaaagccctccgcaaggagggctttcatcgtattaggcgcggaattcgcggctcagcggccagtaccgccgtacaccacggcttcgatctgatcggcatcgagaccgtatgcagtgtgcagcgccttgacggcgtcgttcagctggtcgagcggcacaagcgcggcgatacgaatctcggaagtggaaatcatcagcacgttgatgccctcatcgctcagggcctggaagaacttggcagccagaccggcgtgggtcttcatgccaacacccaccacggctaccttgccgacgttggtgttcacatcaaaggagtggtaacccagcacttcctgcttgtcgagcagcgtgttctgcacctgcttgacggccgattcgggcacggtgaaggagatgtctgcagtgccaacggatgcgccggcctgcacgatcatgtccacgttcacgtcggcggtggccagctcggtgaacaccttggctgccatacccggctcgttcggcacgccacgcacggtggccagcgcctcggaacgatcgtgggcaatgccggaaatcaccggtgcctcggggcccaggtcagggaacaggtcgcccatggatttcgcttcttcttcagtcatgtcttgccttgtcttggttgaaattacttacgattattgttcgctgtagccgcgctcagtcgaggttcggcagcgtgcgcgggtcaatgccgtcaggcacaaccagcgtgccggggcgacgggagaacgaagagcgcacatgcagcggcatgttgaaacgctgagcgtactctacgcagcgcagtgccagcaccttggagccgcaggaggccatttccagaatggcttcgtagccgatggaaggaatacggcgggcggaaggcacgatgcgcggatcggcggtaaagatgccgtccacgtcggtgtaaatctcgcagatgtcggcaccaagggccacagcgagtgccacggcggacgtgtccgaaccaccgcggccgagcgtggtggcgtcacccttggcgttgatgccctggaagccggcaacgatggcgatgtctcccaatgagagcgcgttcttcacgcggtccggtctcacggccttgatgtgggccgcgccgtaacgggtgtcggtgaagaagccggcctgctgaccggtgaaggagtgggcgcggctgccttcggcgtgaatggccatggccagcaggctcatggaaattcgctcgcctgcagtcatcagcatatccatctcgcgctcgggcgggttggagtcgatgctcagcgcctgatcgataaggtcatcggtggtatcgcccatggcggagaccaccacggccaccttattgcccttcttctccgtctccacaacgcgcttggccacacgtttgatcgaatcggtatcggcgaccgacgagccgccgtacttctgcacgatgagagccactgctgtcctttgttcttctcttagggatttgtttggtcgatattctacgcaaacgcaacgattataagggctgtcgcgttcaccccgcgaccccgcgccggcatgcggacacgggtatggcctacgttgttcagcaaatattcaagttttcaccggtggttctttgagacagccgcatccatcctttgagattcgagcggttaactatcaattaccggcaaacgaaagcaaaccggcgaggtttccgcagaacccccataactgaataccttcttcttcctctctccttttcaaggcccggttccgcagcccgggccttttccttttgggttgagaacgataggtcaaacgcgcgatacgagctcacggagcaagcgtggccaacggcactaccaataccccatcgtcccggcgataatcggcagccgtagcggtcagcaccatcaagaatgacggacggccttcgtgatcttgatcaattctgtcagccaactttttcaaatgggccgccgcaatatcaacctgcttttctccgagcttgacctcaatgagagcccatcgtccatcatgcaggccaatgaccgcatcagattccaatcccgtcttatcccgataatggaacacatctccgccaagcgcatcagcatacacacgcaggtcgcgaatacacatggactcaaacagcaagccaaaggtttcgaaatcattaaggagtttctccggggtcgcgtgcagtaccgcacaagctatcgacgggtcgctgaagtgtctggttgggctcgttctcactgcagtcttagaacgtaatgatatgaactgatttttatcggggcaatatattccctctttatgcattcaccccccctatttgaaagctctgtcagatattgccggcaccgcggcttatcatgttgccatactttgcaatcctttgcagtcccttgcatctcaacggcttgcccaaagtaagccacatcacttacagccgtagcaacgttgttcatatcgcatttttcggacttcttatgccccctacattgccccctatggccctcgtcggcatgttgcatgaaaggcttggtgcggagtaacgtttcgcagtgtggcacgtgcggcgttgccatttgcggcagcacctatgccaaccacgactaagacggtccggccgtcttgtataagcagatcatgagcagatcaagcgaaggaacaggcgactatggcattgctgcatcgacgttcgacgagtaagcgtgcctcacagaaaatgcgggaaaacaacgcggccatgcctgatgacacatctgcaaatgacaacgtttcccc

SEQ ID NO: 991 - DNA, 24922 bp, Unknown
  R117_24m  MAG No. k141_25259
gtcgacctgagcgccggcgcagtgctcgaacttgcgtggaacatgggtctgctgacttgggccgacagcccgaagcccggctggtacgacaccgacggcaacctcgtgcccgaagaggacatcgccgagcgctaccacgacgaggtcgtggtccgctccggcatccgcccgttcgaggaaggcatgggcaacgactacaaggacggtgctgacgaagaagaagccgaggtcttcctcgaccacgacgtcaccttctctgtgcccacccgcgaagtcgccgccgaatacgtcaagttggacgaggctcacaccaccatcgccccggatgaggaatccggcgaatggaacgtgacccgccacgccggctcgatgatccgcgtgccgcgccgcgccaccatgacccgcacagtcggcggccagttcccgaagggcttcgacccgacccgttggggcatccccgcctcgatggtcggcgatgtcgacaagatcgccctgtggaacatcgtcaccactgtggacgcctatctgggagccggcttcaccccggccgaaatcctcgagtccatccacccctcgctggtggcttcgacccagggcaccggcttcggcggcatgatgtcgatgcgcaagctgtacctcgaccgcttcctcaaccacgagatcccgaccgacatcctgcaggaagccctgccgaacgtggtcgcggctcacgtgatgcagtcctacatcggcggttacggcaacatgatccagcccgtctccgcctgcgccaccgcggccgtctcccttgaagagggcgtcgacaagatcgccctcggcaaggccgacttcgtggtcaccggtgcgatcgacgacatcggcgtggaatccgtgatcggcttcggcaacatgaacgccaccgccaactcggaggaaatgtacggcaagggcatcgacgcgcgcttcttcagccgcgcgaacgatcgtcgccgtggcggcttcctggaatcccagggcggcggcacgatccttgtgacccgcggtgacatcgccgaaaagctcggcctgccggttgcggccgtggttggcttcatccactcctacgcggatggtgcccacacctcgatcccggctccgggcctcggtgccctggctgccggcctcggtggcaaggactccaagctcgtgcacgacctggctaagctcggcgtctcagccgacgacatcgccgtggtctccaagcacgacacgtccaccaacgccaacgacccgaacgaatccgagctgcacaacacgctggcccacgccatcggccgcaccgacggcaacccgctgttcgtgatctcgcagaagacgcttaccggccacgccaagggtggtgcctgcatcttccaggtcaacggtctgacgcagctgttcaagtccggcgtgattccggcgaacgcggcgctcgattgcgtggatccgaagctccagcgcgacgaccacatggtctgggttaggaagcccctgcgcatcggcggtggcgaggacgagttcggtcgcgagaccgctggtcgcccggtcaaggccggtctggccacctcgctcggcttcggacatgtttccggcttcgtggccctggttcatccgggtgccttcgaagcggccgtggccaaggccgatggcgaggccgcgctggaagcctggcgtgagcgtgccaacgcccgcctggccgccggccagcgtcacctcgaggaaggcatgatgggtcgcgccgcgctctacgagccgatcgacaaccgtcgcttccgcgaggatcaccgtggctacgaccaccacgaggtcgaaaaggcgatgctcctcaacccggacgcccgcctcggtgccgacggctactacgaggcctgattcctctggctcccctcagttgaggggagccagtagcgcaccggatctcggctcccctctttgaggggagctcccgcgaagcggatgaggggagtttcccctggagctttctcgctggcacaaactcagtgagagaaatatgcagaacatacgaaagcccctccctcggagtgggctttctgcgtttcaaggggctgatttggcattcgccggaggtctacttccgtttcaaggggctgttacccaagtagacaaggcgtaaaaacggcggaatggcgttggcgttatgctgcggatactcgtggtatggaggatgaccagccccttgaaacggaagtagacctccggaacggtcaaaatccgcccctcgaaacggagatagacctccggggcggggcgcggatgtttttttggacggctaggcagccagcccaagatgtttgcggtattgcgcgaggtcatccagcatagtgaatcttttccccctgaaatggaaatcaggccccaattctgatgaggtgtagagattacgcgcgaagcggtacacaataggaagcatgaatacttgtggtttggggcatgacgtggtggatgtggccgcattcgccgaacagttggcggagccggggtctcgcatgcgtgcgctgttctccgtgcgtgaggtgcggcaggcatccgaccgcgcgcgccagaagaatgacggggaggccgtccatctggccgccaaatgggcgggcaaggaggcgttcctcaaagcctggtgcgattatcttggcgatgccccctatccgttcacgcttgataatttcccgtggcctgaaatcgagatcttgggcgattcccgtggtgtgccgcatgtgtctctgggtaagggggcggcgtcagtcttccaaactgattacgcgaattcggctgccggcgctcgctattcctctgcttattcccctgcttccgataacgggccttatgcagtgatgcaggagcggcggaatgcgcgttcggcgcagcgctcggctctcggtgcggggtcgatgccgcatatccatatttccctgagccacgatggtccgattgcctccgcggtggtgacgatttctgtggaatagcgcccgaggcccccgagtgctacatgctgtacaacgtctccatcatggttaacctgtggagcgcgctcaccggccgcgacgtgcgcctgctcaagaaccggatcgacaagctcgactcgctgcccgaaaactgctggttcgtgattctgaatgcgatgggcgccgacctccaaccatacgagtcccagctcatccatttgtgatttcgacggtttccagctcccctctctgaagggagctgtcgccgtaggcggctgaggggagtcctcggcaaagccacaatccatcaactagattggctggtcctgctgcagccacacgcgtttgccatccccgaagaaatatgtataataactcaagtcgccaaaagcgacgcttaacgcggatgtagctcaatggtagagcctcagtcttccaaactgattacgcgggttcgattcccgtcatccgctccactatttatatgttggtgtatctaattgggaataccggaagggtgagctaccccgagtagtattagtactcatggtgttgagaatcgacgaagctgaactgcgtgccaagctctttgagcacaaagagcagattggtttcgggccgattgccaatggggtcgtcatcatcatcgaaggattgttttacattcctgctgctctcacatctggactcgaccaaatgtttcaaggattgctccttgcattgagcattatcttcatattctatggagtatggagtttgattactgcttgcagaaataagtatgatgccataacactgtatgaggatatcgccaacatggatagaaccgaacgaagaagctcgatcattgcggtgaaagatgctaaccgatatcttctgtatcgtgatttaggttggggatgcgactttttccctaatcatgcaaccgcaagcagtactgatgaggatgttcgtcagctgacgacgtattttgccgatgaattcgaaattcctgctaaagactttactctgtctcacatttgtgtgaaggattctgagaagccatccacggagcatgatggagagattcgttattacgaatacacgctataccgcgctagcgtaacggtaatgcctgacgcctggcgttccactgagttccatgttggtgccaaggactgccgctggatgactcttgatgagatgcttgccgaccccggcatcaacaaaatcaatcatgatgtcgttgcgatggtgcgggataacttgtaattgttgccacttcgggcatatgacgattgagccaaagcatgttctatgtttcgataatcatcaaaagcagagcatagtatgctctacggggatttttctataccctgaaaacaccgaaaatcaggatatagggcagtagcacgaattagccaacagcggcttgtctgcgggcaataatgacgttgctcccgcggattcggataaggagaatcgtagcgaggatcatggtgagggccatggcgagtaatcgatcgtatcggagacttgcccaacacgcacgctaagatgggcatcgcaataatcggcaatgagcaggtaatcggcgaggcggtgcatggagcaggaatccaacgagcaagaacctaacgaggcgacggaaatcgtaggcggcaaagtagagaccgtcgaggtttccaagcaccccgaggcttccatacccgagaccgatttgtctctggcggatatcgagcgccgtcgttcgcatccgttgcgttgggcgctgattattcttgccgtactgtgcgccatcatcgcgccgtactggttcggccgttcgttggcggtaaataatactgactccattgtgaccgtgctcgggggagtgtctccgcaaggcatcgcgctggtcggttgggtgaccgtggtgattgcgtacgtcggattggcgatggcggtggtcgtctcgccgtcctggccgtggttgatcgtgttcgtgatcgggttggccggcgagcagttcatcgcgggactcagtatgctcaatctcaatttctggtattccacgtacgtggtctacggtaagcaggccggcctggcgaatgccgcgaatctgggcattatgggtgcggcgatcggcatcgccgtatatgccctgatgttcgtgggtctgctggtgattatccggaagacctcaccactgaacgtactgaccaaaagctgggcgagcttcattctgtacttcgtgattgaaaccatcgccctgctcgtggtgttgtttggcggattgctcaccactgtgtgagcgcgtgtgccccagtccggcccctgccgtatagttttcatttggcgtaatttcgcccgcggatagagagcgtttcgagcgaacctgcacgaaacaccgcgcaacgacacaataaggaggacgccgtggcactgacggctgacgagaagacccagattatcaacgagtacgcgacgcacgaaggtgacaccggttcccctgaggtccaggtggctctgctgtccaagcgtatcgccgacctgaccgagcacctcaaggagcacaagcacgaccaccactcccgtcgtggtatgcagctgatgatcggtgaccgtcgtcgcctgcttgactacctcaagcgcgtcgacatcgagcgttaccgttccctcatcgagcgtctgggtctgcgtcgataattgaagacttccgcccgagtacctaggatggtgctcgggcgttttacatatcgccagccaacggcaacaacggcaagagggttagaggataggccagcaggtaaggccgacaagagaacccgaatgaaggggttgacacgaggaacggcggccaaggggccagtcgaaacaaggtatgtgacgtccgctgaagaggacagttgcggttcaagcgagtcgccgaaccgcagcacagtatgtaggaataattagaaaattaaagaaggaggaaccctatggagggtcccgaaatcaaggccgttgaggccgtaatcgacaatggatcgtttggcaagcgcacgctgcgcttcgagaccggccgcctcgcccagcaggccgatggcgctgtggccgcctacctcgacgacgattccatgattctgtccaccaccaccgccggttccagcccgaaggagaactacgacttcttcccgctgaccgtcgatgttgaagagaagatgtacgccgccggcaagattccaggctcgttcttccgccgtgaaggccgtccgagctccgaggccatcctcgcctgccgcatcatcgaccgcccgctgcgcccgctgttcccgcacaccctgcgcaacgaagtgcaggtcgtcgagaccgtgctcgccgtgaaccctgatgacgcttacgatgtcatcgccctgaacgccgcttccgcctccaccatgatctccggcctgccgttcgaaggcccggtctccggtgtgcgtctggcgctgatcgacggccagtgggtcgccttcccgcgttggagtgagcgtgagcgcgccgtgttcgagatcgtggtcgccggccgcgtgatcgagaacggtgacgtcgccatcgccatgatcgaggccggtgccggcaagaacgcctggcacctcatctatgacgagggtcagaccaagcccgatgaggaggtcgtggccggtggtcttgaagccgccaagccgttcatcaaggtgatctgcgaggctcaggatgagctcaagaagatcgccgccaaggagaccaaggaattccagctcttcccggagtacaccgacgaactgtacgcccgcatcgacgagatcgcccatcaggatctggacgaggcgctctccatcgccgagaagctgccgcgtcaggatcgcatccatgagatcaaggagcacgtgcgcgaggtgctcgcggacgagttcaccgacatggacgacgccgagaaggacaaggagctcggcaacgccttcaaggagctgcagcgccagatcgtgcgtcgccgcatcctgaccgaggactaccgcatcgacggccgtggcctgcgcgacatccgcaccctgtccgccgaggtggacattgtgcctcgcgtgcacggttccgccctgttccagcgtggcgagacccagattctgggcgtcaccaccctgaacatgctcaagatggagcagcagatcgacgcgctgtccggtccgcagtccaagcgctacatgcacaactacgagatgccgccgtactccactggtgagaccggccgcgtcggctccccgaagcgccgcgaaatcggccacggcgccctcgccgagaaggctctcgtgccggtgctgccgagccgtgaagagttcccctacgccatccgccaggtctccgaggccatcggttccaacggttccacttcgatgggttccgtgtgcgcctccacgctgagccttttggctgccggcgtgccgctgaaggccccggttgccggcatcgccatgggcctcgtgtccggcgacgttgatggcaagcacatcttcaagaccctcaccgatatcctgggtgccgaggatgccttcggcgacatggacttcaaggtggccggtacttccgagttcatcactgccctgcagctcgacaccaagctcgacggcatccccgccgacatcctggccgccgctttgcagcaggccaaggaagcccgcgccacgattctcgaggtcattaacgagtgcatcgacggcccggctgagatgagcgagttcgctccgcgcatcatcaccaccaccgtcccggtcgagaagatcggcgaagtcatcgggccgaagggcaagatgatcaaccagattcaggaagataccggcgctgaaatcgccatcgaggatgacggtaccgtcttcatctcctccgagggtggcgaggccgctaagaaggccaagtccatcatcgattccatcgccaacccgcacgtgcccgaggccggcgaaacctacaacggcaaggtcgtcaagaccacgtcgttcggcgctttcgtgaacctcacccccggcaccgacggcctgctgcacatctcccagatccgcaacctggccaacggcgagcgtattgacgccgtcgaagacgtgctcaaggaaggcgacaccgttgaggtgatcgttcagggtgtcgatgatcgcggcaagatctccctggccatccctggtttcgaggatcaggagaacaacgcccgaccgagccgtggcgatcgcgatgaccgccgtggcggccgtggccgtggtgaccgtgacgatcgccgtggcggccgtggccgtcgctccgatcgcgatgaccgtgacttcgacgatcgtgacgaccgtccgcgtcgccgtcgctccgatgacttcgaggatgattacgacgaccgtccgcgtcgccgtcgctccgatgaccgtgacttcgatcgcgatgatcgcgatgatgatcgtccgcgtcgccgtcgttctgccgaccgtgacttcgacgatcgcgatgaccgtgatgctcgcgactcccgtgatgatgatcgtccgcgtcgccgtcgctcttccgatcgcgatgaccgtggcgatcgtgatgaccgccgtggcggtttccgtggcggccgtggccgtggctcggaccgcaacccgcgctatgccaccgacgacaactacgacgactaccgcgccgaccgcgaagagcgcactgagcgcccgcgtcgccgcgtccgtcgcgactttgatccgttcgaggactaaagccctctcacggatcggtcgcggcatagccgcccccctcgcctacgggaagcccgcagggcttcccgcttaacggttcggcattcgaggactgatcgttctctagcttctctcgggtgagaagagcttaatcgcaaaccaaaaggcttctataccgtttcattcggtatagaagccttttggtttttcggcttcttcgcgctacatatttcgatgttgaatagggcactcgtgctgctgccatgtacattcagttgtcagttgacaactattctcatgcatcaagaatggcggaaaacagccattaagatgattggagccacgctaaaaagcgttgacaactgacaacagtttgtacacggcaccgcatggcacctatcctgttgctcacgaccggatctattctctcgtctgttgttatgcccaacagcaaaatccgcttgccgtgccgcgccatgtccgagtcatggccagccgttgattgaatggcggatgatcatcgaaggtactcatgggcgttgatcactgtggcaacaacaaaggccgggcccttgtgagagcccggcctttatgccgtatggcggcggattaatccttaaaggctaatccgttgtcaatcagcgttacagaatcgccatgcacacgaagtccagaatgaacagcgcggccacaatccagatgatcgggtgaacctccttggccttgcccttgcaggtcttcacgatgcagtacatgatgaagccgccggcgatgccgtaggagatggagtaggagaaggccatgaacacggctgcgaagaacgccgggatggcttcggcgatgtcgtcccacttgacttccttcagggaagcggccatcatgcagccgacgatcaccagcacgccggcggttgcggcggacggcacggcggagacgaccggggccaggaacgcggacagggcgaagcagatcgccacaaccacggaggtcaggccggtgcggccgcctgcggcgatgccggcggaagactcgacgtaggtggtggtgttcgaggtgccgcagatagcgccaatggaggtggcgatggagtcggcgaacagggccttgtccatcttggaggagaagccgtggccgttctccagagccttctcatcctcggcggagaagatgccggtgcgacggccggtgccgatgaaagtgcccagggtgtcgaacgtatcggacatggagaaggcgaagatggtcacgatgaccagaggcagcttggagacgtcggagaacagcgccgggaagccctcagcggagaagatcgcgccgaaggtctgcggcagctgggagaaggtttcgctgatggactgcgagttggaccaggtggtaacgccgaacgggatgccgatcacggtggtgatggcgatggccagcagcatgccgcccttaaccttcatcacggtgaacacaatggccagtacgaggccgatcaggaagacccacagcaccttgtcgttgaagtcggccagactcggggtcgccgccacggcgcctcccttggccgcggctttcgggtcgccgggggtgaacttgatcagtccgacgttcagcatgcccacataggccacgaacaggccgatgccgccgccgatggcgtgttgcagggactccgggatggccatgatgatcatcttgcggatcttggtgacggtgatgatgatgttgattaagccgcacaggaataccatgcacatggtctgctgccagctgaagccgaggccgaagcacacggtgtaggtgaagaacgcgttgaggcccatgccggcggcctgggcgtacggcacattggcgaacaggcccatgaccagggtgccgatgatggccgcgatgatggtggccaggaacacgccgccccacggcatacccgtctgcgacaggatctgcgggttgacgacgatgatgtaggccatcgcgaagaacgtggtcaggccggccagaatctcagtcgagacggtcgtgccgttttccttcaaatggaagaacttctccatttactctctacttccttggttttatgcggggctgcgcaccgcgcgcataatgctgcggctggccccggcgagaattgcgactcgccctgatcggcctgcccaacgcgcgtcaggcgctgcgcatccaatcagaaccgtggccgattatagcttgtggaggtaacgtgaacgggtccgggagtagactgactgccagaataattcggaacaactcagggacacgcagggcacacccgtggaaggaaggcgcgcgatgaaaccggccgtcgaagtcagcatcacctcttggaagaagaatgtcgtcaagcccggtcaggagtacggccgcgtactgctgatgcctggcaccggctacaactgcgaccgtccgctgctctactggtcggcccaggctctggtcgaggccggctggcgaatcgaccgcatgaacgtacgcaacgcttccgacgacctgtccacggtgattccggtcctcaatcaggcgattgacggctggatggccgccgcgcgcgagtccggcgcgggtaaagccggtgattccggggatggcgttgccgccgatgattctgctaccgtgctggccgatggcgcagctggctcgccgaaccgtgattccgacaccccgtccggccctcgcctgttgctgatcggcaagtcgctgacgacgatgacctacccacatgtggcctcacactacggtctgccgttcgtgctgctgaccccggtgctgcatcacgccgacttcgatccatccgcccgggtgattccggtgccggctgtcggcgatgatatcgtcgccgaatccgaggctccgagcgtggccgaagcaagggcgatcatccgcgcagaactgtccgaccagtcgcacgccgccagctcccgatactccggcccggcaccgctgatctgcgccggcaccgccgacccgttctacgatcgagcccgcgccaacgcgctcaccccgcacgtgcacgaatacccggatgccaaccattcgatcgaggtgcccggccactggcgtcgctcgctcgactatctgaaggaagtcaccgcgtccgtagcccagtacgccgccacgttgtaatgccttgcgacacgcccgaattctgcaatgtcgctgaccatccgtaatctaatcatccgtaaaccacagaccgttggttgaagtgcgcgcgagtgcatttccgaagtttggttcgccaagccagcgcaggttgagagatataagcccgtcaagggccggcgaaggtcacttcgcgagattatattgctctgcctgtgcgcagggcttttttgttgcccggccgaaagttccgaactccaagtcaacggccgacttaggaaggaacgccatgaagaggcccgaaaaggaagcggtagtcgctcagcttacggaagaattccgtaacgctgacgccgtctacctgaccgagtaccgcgggcttaccgttccgcagatttccgatctgcgtgaaaagctaggccgcgatacttcctacaccgtggcaaagaacacgctggcacgcatcgccgccaaggaagcgggcatcgagggtctcgacgagattctctccggcccgaccgccatcaccttcgtgaagggcgacttcatcgaggctgcgaaggtcatccgtgacttcgccaaggacaacaaggctcttgtcatcaagggtgccgccgctgacggcactgtctacgatgccgagggcgccaagaagctggcagacctcaagtcccgcccgcagctgcttgccgaattcgccggcgacgtcaaggcatcgatggccaaggccgcgtacctgttcaacgccctgcctaccaaggctgtgcgtacgatcgacgccctgcgcgagaagcaggagaaggctgcctgatttacgccctcacggcatgaatcagtcgcttcgataatttaaacaataaggtttattaggcagcggatctaccacttcgtccgccgccaagattgaaaggaagccataatggctaagtacaccaacgatgagctgctggaagccttcggcgagatgaccctggtcgagctctccgagttcgtgaaggccttcgaggagaagttcgacgtcgaggctgccgctccggttgccgctgttgccgctgttgctggcgctgctgctccggctgaggaagagaaggatgagttcgacgtcatcctctccgccgtcggcgacaagaagatccaggtcatcaaggctgtccgcgccatcacctccctcggcctggccgaggccaaggctctcgtcgacggcgctccgaaggccgtcctcgagaaggccaagaaggaagatgccgagaaggccaaggctcagctggaagaggctggtgcctccgtcgagctcaagtgatttgtgcggcataagccgtaatcacagcttttcgaggaaccccgcacctgtgtttcaggctgcggggtttccgcatactgagtagactagttgacgagggcgaggcggagaacgcgatccggcgtggaatcacaaagctggcaatgagcgaaagttgtcaattctgtgcccagtaatccgccaaaagccggtaaaagatgacacaatggcacgtagtgtggtcaaatagtgtgtccaggaaggcggtcacggtgagcgagtggacggtgaagatcaacggtgtcgaccggatcagcgtcaagccgggggagtgcgtggaaatcggccgtaagccgttacgcccccttgccgatgatggcaacacccgccttgacgtcgccgatcagaccaaatcgatgtccaaacggcacgccatgttcacggtaaaaagcaatggtacggcttcggtccgcgatcttggatcgaccaatggatcgtatgtggtgcgggaaaatggtgatttgttgcgcttgccggccaatgtcgagttcctgttgccgacgtctcccatgcgcatgcagttcggtgatgtgcctgcggacttcattcgtatcgacgatccagtggcaaagccactcgaccttaaggtgcctgatttgtttggctatgcggttcacgaagcaccgcaggagccggatgcggcggatatgtctgtcgacgatattcttgatttgcgggccggcgagccgaccgccatcttcagcgcggataatgttcgacgcaaggtcgacgagcttgaacttggctcgctgaatatcacgcagccagtgacgaaaaacgatgagccggccataccccgtgacctgttcgcggatgcgttggcccagcatgccgagcaggagaccgaacgcaaaaaccagcaggccatggactccgtggtactgccgaagcagcagaccgaacctgagtcgacgactgtaacgcccgcatccaagcacagcaggatctccggtattgtcccggtagatgccatcgcccatgccgttgttaagcacgctcccagcacaagcgagccggcagtggcgtcggcggcggttgttgaatccgatgtggtggctggcgcaagcaagtcagccgaaaacgttcagtccgctccgaataccgacgattctcagccggtggacgctgttgcacagcattctgaaggcactcagtccgaagccgcccagtctgaaaacactcagtctgagaccgcccagccgacaaccacccagcctgaaaccgctcaaccggcaaccgacgcacccgaggatcagcagctggcgaccgaaaccgaaaccgcccagcagtcggtctccgaagcgtatgaagcgtctgatatctactccacgggcgtacacactccggtcttcgagcccggctcggtgttcgagcgtgtggccaagggcgagctgaaagcacaggagccggcagtcgaagtcgatggcctgacctctgacgaggcaaaaaccacgcaagatttcaacgttcagttcgaagtcgcccgtcatcccgaattactggcgttcctcgccatgaatccgtacctgtacgacgacatgtattcttggctcgccgcccgtggcgaggccgatattgacgaagccctgtctcacaacaagggctatcaggaataccgcgaagcggttggaaagtgagtcgagagatgacccagagccagactcagaaccagaatctcacggaaggtctgaatcgcatccgtcgctggcgtgaccaataccgcagcatgcagccgccatcgccgctcgaggatgtgaatcaactggccgcgaagctggagatgacccatgcccatccctccggcatcgcccagctgttcgcttccggccatgttcggttggattcgttgttccgtgacacgggtgtgcttaaggccgccgaacgccatatcgggcgcgtactggatgaccaggccgccaagcgcaggatttccggcgtggcggagttgtcgctcgtggttggtgtggccacgtggaggggcaacgcgctgccggtgctgttgtacccggtgagcgtcacgatcgaggatgatggcttgtcgaccaccattcgattcaccggtcgcgtgaccctgaacgccgcgttcgtcaatgcattgcgtgagcagggggtgttcctggatgaggattccctgtttgacggtgccagctatgacagtggcactcccgaaacttccgcgatgttcgcccgtatttcgtccgaagcatcggagcgtatctccggcttcgccatcgagcgccagattgtgctcggatgcttcatggacccctcgtcgcagatgatcagcgaaagccgacagttcatcgaccagctggagaatggccccaccggcaatgtgctgttggacgcgcttgccggcgacaaatccgcccgcaccgcgctcaaagatgccaatattccgcaatacagtcctttcgacgtagacccgcatgctgagtacgaagtcggcgatgtggacaatacggtgcgatatgccgcgtcacttgctgccaatggccatagcatcgtggtcgacggcaccttcccgaagggcaccgcggagcaggctgtggccatcgcatcgcgctgcctgatgaatggtcgttccgtgctgtacgtgcccggcgtggccgagcagaagcgtctgttcatccagacggcctccgccaatgagatgaaggcgcaggtactggatgtatccgatgaacacgccaacgccgcgcttgataagcagctgattgccgcagtcggattccagcccggagtcgccacccagcgattcgaccagctggccgacgaactcgtgggcgtgcgctcgcgcttgacccgctatctgggcgacctgcacgggagcaacgataagtggaatgtgtccgcatacgagaccattcagaacctggcccgtatctccgtgctcccgacacaccccgccacccacgttcgacttgacgagtcaagtgccctgagcatcgccaacgatattgacacatggatcagcaagatggaacgtgccggcgagctcggcgaatacaccatcggcccggaagacaccgcatggtacaaggcgtccatcaccactgaagaacaagcggtaaccgcttaccagcgcgtggacgatttgctgcgtcgcttcctgcccgccacccgtgagcaggtggcacgcaccgtgcagacctgcggattcccggttcctcccaccactcgcgagtgggagcgtcaggttacggttttgaagaatctgcgacgagtgcttgacgtgttccagccagagattttcgagcgagacatcagctccatgatcgaggccaccaagccgaagagccagcgcaaggccgagggcacgtcgatgggattctgggagcgccgccgccacgtcaaggaagccaaggatctgctgcgcgtcggcgcgcaggtcgaggacttgcacgaagcgttgaaggtagtcgccaagcaaggggagcagtggcatcagttcgtgcctcacggcggttggccggtgctgcccagcaagctcgacgagatcatctccacccaagaggcgctggtcagcaatatgaccgcgctggataccgtgctttccaccacacccgctggtggcaatctggaaaccgccgatttcgagaaggtggaagcacgcctgaaagcactgctggatgatcgcaaggcactggacaccttgccggagcgttgcctgctggagcaggaattcgcttctgccggtctgaacgagttggtcgccgatctcaacgctcgccgggtgggcgtggagcaggtgcgtggcgaagtgcagctggcatggtggaccaccgtgttcgaggacattgtgcgttcttccgccatcatctccaaccaggatggtgccgcgctgcagaccgcatccgaccgcttcgcacaggtcgatgtggagcacgtgcgctccatcggaccgatggtgtcgcaggaatccatgcgccgcctgtgcgacatgctgttctcccgcactcaggaagccaaccagatacacaccgtgctggcagggcgcgccagtgtgtcgctgagcaggattcgccgtgatcatccggagattctggccgcggccaagccgattctggtggcctcgccgggtacgctcgccgcactcaccgagccgggtgtgctggctgatgtggcgattctcgatgcgtgcgcgcacattcccgctatcgagttgctgtccatcatcggccgcgtgcagcaggtggtggtgatcgcccactgcgcgacggtaaccagcgaaagcgtcaagcagctgatcgacacgttgcctcatatcgaggtggatgctgccccgtctcgccgtgcgccgcgcctgtccgcattccttgaatccgagggatatggtcctgttcgctatgatgtggccaccgagccggctgccggtgaggtgcgattccaccgtgtggaagcgagcggtgtgccggttatgtcttctggtctggtggaatccagccagtcggagattgatgaagtggtgcgtctgattacgcaacgtgccgccggttttgctgtggttccttccagctatcgacttgtggtcgtgatgttgaccgacgcattccgcacacgcttgggtgccgaattgaagtcgttggcaggcaaatccaaggcgatgggccgattcctgcgccatgtgcggctggtttccttgcgtgacgtggccggaggtcgtgccactgacgtgattctgacgatgtgctatgcgaaaaccacgcatggacgtctgcttcagcagttcggcccgctcgaaagcacaggcggtcgcggactgttgctggatgccctggcattggcggaccacagcttggatattgtgtcggcctttggttccgaagatttggatgaagaacgactgcaccagtccggtcctcggttcctgaagaccatgttgacgtgggccgaacagcttgacgaccgtccggtgcttccgttgcgtgatgcggcaggcggcaacgtgctgttcgacgatatcgccgacaggttgcgcgcgcgaggactgaacgctgctgttgattatggattcgacaagggcgtgaagattccgctcgtggtgggattgaaggacaagccgtttgccttggccgtgcagaccgatgacgcgaactttatgtccgtgcaatccacgcgcaggcgtcatcgtttgtcggcacaggatctcatttccttgggctggaatgtgatgaccgtctggagtgtcgccgccttcgtgaaccccgataaggaagtcgaccgtatcgtcagccgtatcggcgagatctaccgcgaggttgaataatcatggcggaatactcggctacacggcgcacaccgcgcaagcacaagcgcgtggtgatgaaaggcactgagcagtttgacgctgacggcgtcaaactcgagcccggagacatgcagaccgaccaacaacggcaatccgacgacgacaaacgcatcctcggcgaactgcctccacactgggctgttttcaacgagcgcgagtaggagttggggcgcactctgtgcgctctgatgttgtgttttccgcagccgtacggctgcggaaaacacaacatcggccgaaggccgattccgcttcctaccgcacaacggccataatcgctccggcctgttgcagctccataaccttggccgcggcctccggcggcattgcgaacgacaccagccggtcgttgcttcccaatgcgccagtcgtatccggtttgtcgacattcatcaccgtggcgttctcggccagcgtgcaatcggcaccttcgcaaccgacggcggaaaccagtctcacctgatcgccggccaatacatcgtcgacgctactggccaagcggacttcaatcaccgtagtgccggtcggtgctacgggcgcatctctggccatatgcgtggaaatgggatcggctgcttcgatatcgatttgcgccaccttgcccaccacatcctcaatattgcacgcccaagatgggcctatcgcagataccggcatatcagccaactgaacgtcggcggccagaataatgtcaccccgtcgaatcgagcgagcggccaccaccatcggctcggtctccaccacggccaatacggcttcaagcccaaacaacactgcgagtcccacgcacaacgcagcagtgagtcggcgcaaggcatccgccatgcgccgtcgccgcaatgaaccgcgcgcaggcggcttaataaacgaaaaggtcaccatgcaaccatggtgacctgaagtttttcgtaagcgcaagctgaatcgacctatgtggttctagcttgccaagttatccacaacgcttcaaacccgtgcaacagacagtgcccgtagtgccaatatccgcggcataccgccgtcgacaccgtcgtttacagaggaaaaacggggagccgaccttacttgccggatttgtcggtgcggtagaatccgtgacccttgaactcaatcggcacggcggaatacaccttgcgcacctgctcctgcgagcacttggggcacacggtaatcgggtcgtcattgaacgactgctgttcggtgaagtcatagccgcagttcttgcaacggtaatgataggtaggcaacggattcctccaacaaagtcatatttctcgcgcatggcgtgcaacaccatgccgtgcaaccgttcatatcctagtcgccgccctgacacattggcgttacggtcttactagccagcctgcttttgccactctggttccatcggccagtgtgcgtggctggttggtcagtctggcttgcgccgagtatcttggccggccggtcaactcagccggcccgattcgccaagccgccggtatccccccggcgtcagcactccgtcggccggcacatcatgtggttcggccggcaaatcggtgtccaacacctcccacggccagcacaccgcaatcagggggcacgcgggcttgcgtcgagccaaggcccggtcataccagccggctccacgccccagacgattgccttgcgggtccactgccaaagccggggcgatgaccagatcggccttctccaacgcttcgggcggtagaactgcgccagttggctcatcgggtctgtgatggacggtgctgggagagctgcagctaccggcattgttcgcgccacccactgcatccatcgagcgcaaggattccaatgaatccagcacactccagccaatttccaacccagatcccaatcgtggcaccaacacgtggcagccatgagccaacagccatcgcaacagtggccgggtttcgatttccgaacccatcgacacatatgccgccactgtggaaccatcctgaatcatgtgtgccgggaaccgtcgcaccagcaattcaccggccgctccacgttcttccgctggaatgcgcttgcgccgagacagtatatggtggcgcagcgtcgctttatccatcttttctgttttctccgtgccgctgtggtcgctgccgatattcatgccattgtccgcttcgctcataccgcacaatctagtgtttccaccgtaaaacgaaagtggccgaggcgaaggcgcaagcccttcatatggctacaataaaggccgtgtcagttttccagtcgattaaagaggcgttcaagctggaccaccagatccgtccgccgcgcctcacccatcccggtttcccgataatcctgcgccccctgaccatggacgatgaggacggctggaacgaagtgcgctggcgcaacaacgactggctggcgccttgggaatccggcgacccgatgcatggcggctccatcaccttcaatcaatgggtgcagcgacagcgccgtaatgagcagcatggcgtcggcgtgattttcgccatcgaataccagatgcgtatcgtcggccagatttcgttgggagccatcgcgtatggtgccatgcgcaccggtgtggtcggatattgggttgaccaacggtacgccggccacggatttgcgccgatggcactggccatgcttgccgattgggcactcggagacccattcgggcccgcgttgcatcggctggaaatcgccattcttccggataacgcgcgctctttggctgtagtgcgtaaggtcggagcccatcatgagggactgcgcgagcggtatatgtatgtcaatggccagtggcgcgaccacgtaacatttgcgctgttggctgaagatatggggcaagggttctctgccagactcgccgccaccggttccagataagcgtcgaccggaagaattccgctccgacacgcccggacggaaagccccagttcgtcggtacgtctcctatccttgactctatgggttatgagtcactgagcactgtcgtcgtgctggtgattgtggcgattattatcgttgtatggctgcccgtacgtacggccaacggcatgaaacgtgtggacgagcaccggcaggatcgttattcgccttccctgcatatcgttgatgcagagaacggcagacgattcggagacatcaagccgcataaggcgaaaggggcagcaatgccagcatcaacaccgtcagcgaggctgacacctgagcacatcgcccatgtgcgggaactgcgccgcgcggccatccgccgccggcagattctcgccgtatgcctgcttgccataaccgtgttggtgtttgccgcatcgttccccctgcatttcagcccgctgcttgctcttattccgttcgtgctgttactgctggtgctggtgctgggagccaatgcctcacgccaggcccggcaatgggagcgcaaggtggtccgctacgagcggacccatagcggtacgggctggtccaagaaaccgtctgccgagtccaaggacagcaagcgtgtgaacaaggccgaaccggttgcggccgtaactgcgcctgccaaggagctttccgagcatgttgaggatgctgccaccgaggtcatggaacagcggcagattcgccgcgcgttacgcgatgccgagattgagcaggccaaggccaaggcgttgcgtcagtccgccgccgcatatcaggccgcggcggagcacgccaaacagtctgagaagtctgatactgcacagtccgccgccaataagcctgccgccgaaccgtctgctatggtcgatgaatccgctgaccgtaagtccgctgccgaaaccagtgaatcttccgccgcgcccgatgcctccgctcgcacggataagtcgactaagtcggataagtccgtcgcccctcgagttgaaccatcgcttacggtgcgtgacgagcgtgatgagcgcgacgatgccgctgccgacgctacgtcggaactggccagcgtacgccctgcccgagcactggatgtcttcgatatggccacctcgcaggatctcatctccttcactttgggtggggaacataacgccgacaacgctccggaaagcttggagatcaagtcgacccgtcaggtgtccaaggcggaacctgtcgaacccgcagtggcggaaaagttgattgacgaggcccgagccgtcaaggccgcggacgatgccaaggccgccgatgcgggcaaggctgtcagtgccggaaacgctgtagacactgagtcggagcagcgcgatgatgccgatacgaacgccgctacggacgccgatgacgaggctgcaaacgccgcccagcgagccgcattccacgaatccgaggagcgtgccgacgtcgaagcgccagcggcgaccaccgattcgttgggcgcaggcctggactccattcttgcccgccgcggcaactgagcgttgcgattcgccgattttctctcacagcgttagcactcgagttggcagagtgctaataatcgcgctacgatgtgtcctagcgcaaagggacaacgcaagtgatcgtcagcctcttgaggcgttctggcgcggcattatcgaactacaagtagatacgaggtgacccacagtgtcgattaagctcacaccgttggaagacaagatcatcgtcaagcaggccgaggcccagacccagaccgcttccggtctgtatattccggacaacgccaaggagaagccgcagcagggtgaagtcctggccgttggcccgggccgtcgtgacgacaagggcgagcgcatcccgatggatgtcaaggtcggcgacaaggtgttgtactccaagtacggcggcaccgaagtccactacgagggtgaggactacctcatcgtcggcgcgcgcgacattctcgccatcctcggctgattagtcgcctagcgaacttcaacaaccccgactgttcccacgaacagtcggggttttctcttgtcaggcggaaaggggctcccctcagagaggggagccgaaaaccgctcccgccaaacgcccagccatgcctgctatgcataaaggtgcatgcgcgcagcgtagttgagttcggcgttgcaccgcatctacactgggtaacggattggggtccctatggaagaggctcagtcggcgacttggccgagcggcttaagacattttgcacaagacggcagtaggtcgacggtatgttgttttttttccgtgtcgcaggttcgtggtgtcgtcgctgtgccaatggttgtctctctaccgatgctgagtgccgtggcatgaggccagcgtcggcagtgggccacgaaatggcgatgtgccgatgctgagccgcgttggcgtcgttatagggccagtttttggaccattgccgacggcaaatcggcgttttgtgtcggcgacggtccaaaaactggcggtctgccgacgataagtgccgtcatcgtcggcagaccgccaggtattgtccctgtgccgacgtaaaaagccctgccatcgtcgtcaccgagccatcttgtgactcactgacggcggcagcagggcggaagaggccgaaatcatgcgcgcggtgcggtctcacacctcgaatccggcctccaccagcgcgtgatcgatgtcgcgaatcaaatcgtccgtatcctccagacccacggccagacggaagaagccgcggtggaactcaggcgggtacaggtactggcgctcgtcatcctcaccgaggaacacgatcagcgattagtcatggccgagcgagacggcagacgtaatcacattgagcttggaaacgaatcggttgtgcccgtcgtggtcggtgtcgaggccgaacgacagcacgccgccgaacccggagtccgggcgggccagctggctggccgccacctcgtggtgcaggtgcgattccagaccggggtacgccacgaaacgcaccacatccagcgattcgagatgcttggcaatcgccaaggccgaggcgtcgtaggacagcgcgtaggtgttcgccagcgtgatggggcgacggatcgcgccggtttcggcgtcgaccccgttgccgaggtgaatggccagcgtgccgaatccgagcggctggtcgtcgaatgattgtccgtgatgtacaagatcagaagccatgcgcccagcatgccggcatgcgctgtgccgccgcaagcaggcgacgccactcgaaaaccgcgccattgcaaggttctggaacaccatataagaaaaatgattggtagaagtgcggggtgcagccttggtcggggctgtttgcagggccgaagcggaccctgaaaccacgctgtgagacacgccgataaaaccgcagaattccgcggtaaaacaaggttcgcgtagaggtcgatttgcgtacttggaaaatatgtggttatatagccaagttgcctgttgaggtcaaacaccgcggcgggaaacagactggcggatttcccaagcggtcaaagggagctgactgtaaatcagccgcttcgtgcttcagtggttcgaatccactatccgccacgccccgatagctcagtggtagagcacttccttggtaaggaagaggtcgtgagtccaa

SEQ ID NO: 992 - DNA, 11038 bp, Unknown
  R117_24m  MAG No. k141_25973
cggcgccctgatcatgggcgtgctcaaccagggcctgtccatcatgggcgtggacgccgcctgggtcaagaccatcaagggcctcgtcgtcatcgccgccgtcgcctacgacctgctctccaagaaaaagaaaggctgagctaaacctggcctccgggcccgcccggtggccacggggatggacctgagttccattcctcctccgaaagggacgctgttgcacgcagcgtcccttttccgtttgtcgcgatggatggatcccggtgtacgttcttcgcgaaatcagccctgactcggggtgtatttcgacaatatgattcggcgatgtgcctcagcggatatgtacggccaatgaaaaacgggataccgatgtcgatatcccgctttcagcgaataggtaaggccagagcttacttcttcttggctttcttgacgcgcttgggggcgggagccgctttcttgggctcgaagaacggccacttgtgcaaagcccaggcgtgcagcgcgggaatcttggcaacggcgaagccgatgaccagaccgattaccatggcccaggtctccagatcatggcctgcgaccagcaagccgatgaacactatggcaacgatgaagctcaccatctgcgaggcctttgactgcttggcggtcaccagatcggccttcatgggaacgagccccagaaacaggccgcaaggcgcgcatatgacgcccagcaccacgctgatcacggttgacacggttgttacttccataatgttcctttgctgaagtgggatgattcgcttgattcgggcgaacgataacgatggttactggcgattagtggttggtgatgcatcggcatccgtggttgcgacgtcggtttcgacatcgtcatcggtgtcgtcctcggatccctcggcatctgcggtgtcggtatcggtaccgtcaggcgtatccgcggcgtcatcgttctccgcatcctccttgctgggttgacgccaccacaatatcaatgcgttggcggcgcagtagacggcggcaacgccgatgcataccaaaaagatgatgtttgaggtgctgatcatcgtgccatcggccattgcttctttggcggattgccatatccaaatcacgcatgcgacggcggtcagggcgtacagcatcatacgggagcggtcgttcatagaagaatctccagacttgttcaaacgacttgattatagccgtatttgtggattgcgaggggaaatgaaaaagccgccatgtgtgcttcggcgaggagcgcggcatggaaagcggctcttcgcgatgcacgccatggcggcattggtcgggaatcgttattcagttgttatctcatggattgtgctggcagcgtatcagccgcgcgccttggcgtatgcctcgtacacggcttcggtgggctcgccggtctccacgccctcgatggtgagttgccaggtcagcggttcggcctcgccggacagcacccaggcggcctgacgggcggcgccgatggccacatattcgtcggtggccggacgggtcacgtccatgccgaggattgagggggccagcgtgcggatggccacggacttcgcgccaccgccaatgagcaggatgcggttgatctcggcacccagcgaacgaatcagctcgaggcagtcgcgctgggaacacagcaggccttcgacgaacgcacgagccagattctccttggtggtgttgtgcagggtcaggccagtcagcgaggcggtggcgtccggacggttcggcgtacgctcgccgtcgaagtacggcatcagggtgatgccgccggcacccggctcggccttaaaggccagttcggccagctcgtcgtagtccacgccaagggcggcgcgaccggcgtccagaatgcgcgaaccgttgatggtgcaggcaagcggcagataatgaccggtgcagtcggcaaagccagaaatcgctccggtcaggtcgtacaccgggttttcagcgatggccgcggccacgccggaggtgccgagcgatacggacacatcgcccacggccatgccgaggcccagcgaggccatggcattgtctccgccgccggggccgatgatgcagccgccttcaacgtccttgccggcaatggcggggtcggccttgacggcggctgcctcacgcgggcccagcacggtgggcagcacaatggcgtcggcgtgggccttggcggcttcctcgccctcggcgggggtcagcaccatggcgatgagatcgcggcggtactcgtcatgcgcggcatcgtagtaaatggtgccggaagcgtcggaacggtcggtgaacagggcttcgagatgagcgtcctcgccctcggccaccgggccatagccggcgatacgccagctcagccaatcgtgcggcagacagacggcggcaatcttcttggcgttctcaggctcgttctcggccacccacgccaccttggtcagcgtgtaggaagcgacgggggaggatccgacggccttgacccagcgctgcttgccgcgggcggtcacgtcgtccggttcgtcgccctcggccggagttgcaccgagcttgtcgatcagggcggcggcctgcggggcggaactggtgtcattccagagcatcgcatcgcgaatcacgttgccctgcttgtcgagaatgaccatgccatgctgctggccgccaaccgcgagggccgcgacatcgtcaagcccgccggcctgctcggcggccttggtgaaggcctcccaccagaattccgggttgaccgaggtgccatccgggtgcttggcctgcccgaaccgaacctgttcgccggtggcggcgttcgtaatgcggacctttgttgattgagttgacgtatctacgccggcaaccagtactttcgtcatgcattcctcctcgatgagggtcgcgcttgcaagtttcggcgcgccacaaccaataagttagacgattaaactatactgtattgcagtgtatgattgcaaacggaaacacgcgagggtgcgtatctggttcaatcgtttgacgcacaatatcattgtgcgatagacggatgtgagcgcctgtgcggcgttcgagactaggggtgcaaggaggtaggagcctatggcaagtctacgcaggatcaatcaggaggatctgcgcaaccataatttgtcggtggttctcgacactttgttgcgcgcggagaaacccatgagcagggccgacttggccaaggaaacgggtctgaccaaggccacgctttcgctgttggcctcgatgctgatcgatagtggcgtggtgcaggaaggcgagccggtcgtctccaccacatatgggcggcccagcacgccgctggagattcatggcgggtccatcgccggcatcggcctgcagatcaacaccgatggctacggttgcctggcactcgatctgaacggcgacactctcggtcaggagtgggtgagtgaggatatgaccggcactgacccgtacgagatcttcgccaagctcgatgcgatgacctttccgttggaaagccgactcaaacgacgtggctgcaaagtggtgggagccgggcttgcgctgccgggcatcgtcaccgacgacatgtggctgttggtggcccgcaatctgggttgggaaaacgtcaacctcacccggttcaacgtggtacgccggctggatgtggtggccggtaacgaagcgaagatggccgccatcgctcagattccggggtatgccaccgaacgtgcgtccttcctgaatgtggtggatcgcacggattcctttatttacctgtctaccgatatcggcatcggcggcgcggtggtgcgtgacggcgaagtggtgatgggctcgcacggattcgccggcgagatcggccatctgtccgtggcgacggatgggccgttgtgcagctgcgggcgccacgggtgccttgaggcgtttgcgggccgtcgcgccttggtcgaggctgccggcattgccgaagatggggatgccaccagcagcgaggccatcgatacattcctccagcgttggcgtgcgggggatccagacgtggccaaagtggtcgatcaggccgctgatgcgctggtttccgccatcgcttccgccgtgaatctggtggatgtcgatacggtgctgttgggcggactgtggacgcacttcggcgacgagctggccaccgtgcttgaaggccggctgcgttcggaaattctgggatacccgaatgtgaagatccgcgtgttcgtgccgccggtggcgctgcatccctcgctatatggcgcggccgaaatgggcttgcgacggttcatcgagaacccgttggggtacatgggggagaagtagcgccgggagatgctgcttgttgtgctggcgggtgcatggcatgggcgcatggtgcgtgtgccggcgttggtgggttcatgctacactttgcaagttggctgttttacgcagcgaacgtggggccgtagctcagtcggttagagcatgcgactcataatcgcccggtccagggttcaagcccctgcggccccactcttttgcgtcgcctcctgcggcggcacagcgcgtcttcacgtccagataggcgcgtacaatcccttaggttccggttcacgtcctgccataggggcatgacgacccgggtcccccgaatccataggagacgtaaaatgcagcagggtatccatcctgattaccaccccgttgaggtgacgtgctcgtgcggcaacaccttcgtgacccgcaccgctggcaaggaagatcacatgttcgttgacgtgtgctctcagtgccacccgttctacaccggcaagcagaagattcttgacaccggtggccgcgttgctcgcttcgagaagcgctacggcaagaagagcaagtagcatacttcacgccagtccgattcgattcggcatgctccggcatacccgatcgaggactggcgtttttgtattctttgacatttttttgacctgcacaaccgaatagacaccaccgtacgaaagaaagcgtgttatggcagacgaacagttcccggcggcggcaaccgcgcttgaggagtaccagtccatcgaagaacagatggcgagccccgaagtcgtgtccaacccggacaagctgcgcaagctgggccgtcgtcacgccgaactgggtgccatcgtgggcgcctacaaaacctggttgcaggtgaaggacgatctggcagccgctcaggagatggccggcgaggacgccgacttcgccgaggaagccaagcgtcttgaagccgaactgcccgacgccgaggagaagttgcgtaccgcgctgatcccgcgtgacccggatgatgcacgcgacaccatcatggaaatcaaggctggcaccggcggcgaagaagccgcactgttcgccggcgacctgctgcgcatgtacacccgttacgccgagaagcgtggctggagcgtgaacgtacagtccgagaacaccaccgagctcggcggcgtcaaggacgtgcagattgccatccgcgccaagggcacgcccgctcccgaagacggcgtgtgggcttcgatgaagtacgagggcggcgtacaccgtgtgcagcgcatccccgtcaccgaatcgcagggccgtatccagacttccgccgccggcgtcattgtgttccccgaagccgacgaggatgacgacgagatcgagatcgatccgaaagacctgaaaatcgacatcttcatgagctccggccccggcggccagtccgtgaacaccacgtattccgccgtgcgcatgacccacctgcccaccggcatcacagtgaacatgcaggatgagaagtcgcagatccagaaccgcgccgccgcgctgcgtgtgctgaagtctcgcctgctggccatgaaacatgagcaagaggccgccgaagccgccgacatgcgtcactcgcaggtgcgttcgcttgaccgctccgaacgtattcgcacgtacaacttcccggaaaaccgtatcgtcgatcatcgcacgaattacaaggcctacaaccttgacgccgtgctcgatggcgacctgcaggccgtcatcgattccgacatccaagccgacgaagccgaccgtctggccaaccagcagtgatagccgacctgattcgtcaagccgccgcgcagttgcgcgaagccggcatcgagacgcccgaacatgatgccaaactgttgctggccgaggccgtggacgccgagctacgcgatatcgacaaggccatgctgatgggggagggcctcgattcgctggcccccgccggcgggggctgtcgcgcagcgactgggggtggtcaggccgaccccgtcaccaatatccttgccgccttccacgccatgctttcccgacgcgccaaacgcgagccgctccaatacatcaccggccacacgcctttccgctacctcgacctgcaggtgggccccggcgtctttatcccgcgcccggaaaccgaaaccgtagtccaggccggtcttgactggctgacccggcacagcatgatccacccgcgcatggtcgacctgtgcgccggttccggtgccatcggcctgtcgatagtcagcgaagtgcccggcagccaagtatgggccgtcgaattatccccgcgtaccgccgaatggacccggcgcaatctggcggtaaccgcgaaacgatacccctccatcgcctccaattaccaactggaagtcgccgacgccacgtcactggccacgctggcgcaactcgacggcaccatcgacatcgtcatcaccaacccgccctacgtgccacaaaccgacatccccgaacaaccagaagtacgcgactgggacccggaactggcgctatacggcggttcggcagacggcacgctcatccctgaacgcattattgagcgcgcctggcgcctgctcaagcccggcggcgtattggttatggagcatgatctcacccaaggcgagcgattagtggcctatgccaaggccacaggtttcgccaccgcctccaccggcaaagattggaccggccgagaccgctatctcttcgccgagaagtagccacaggcgcggggccgccgctgctactgcgcgtaatactgcagggcggaggcgtccgcgtccgtgatttcgcgaatcggacgggccggattgcccacggccacggtgtgcggcggaatatcgcgcgtcaccaccgagccggcaccgatcacgcaaccctcgccaatcgtcaccgggcaacaatccagcacagtgaagttgaagttggcgaacacgcgctcgctggcgcgcggcatacgcagttcgacgggaggcatggtggtggattcagcattgattccgctcattgaacactcctgtaatttcgcgaaagagcatggatgaactcattgtatctacggtctgtgcgtatggggcgaatcggaaaacagcagtacggcaaacgagcgatgatgaactatgcaagtcggggcgcaatggtgcaatggtagattgtgaatacacaggcgaacggaggtgtcgtgagcgtggagggcggaacaacgctgaaagtcacggatgaatcgctggcacaagcggcgcgtgtcatccgggatggtggattggtcgtcattccaacggatacggtatatggagtggcgtgcgatccgtgtaataaggccgccatcgaccgtatctaccggctcaagcgtcgcccgcgctataaggcgttgcaggtactgctcgcatccaccgaccagcttgatgaactcggtctcgacctgccgtctccactgaatcgtttgtcggcggcgttcctgcccggcgcgttctcgccgattgccgtagcccggcccgactgcacgttggagactttggccgacaccgccgatggtcgccccggcacgcagggcatccgcatccccaattcggcgctgtgcctcgcgattctcaaggccactggtccgctggccgcgtccagcgccaaccgttccggcgacgaaagcgcacagactgtccaggaggcggttgacgcgttcggcaacgaagtcgacctgtatctggacggcggtcccacccaaggccatgtctccagcaccgtcgtcaaagccgatccgtatgcgcgcgacggcatcgagatcctgcgtgaaggcgtcatcgcccaaaacgtgattcgcaaggccctccacctcaacggcgggggactcggcgcatgagaatctacctactgattgccgccatcgccggtggcgtcacctggctggtgactccgctgattcgccacgtcgccatcgaaatcggtgcggttggcgaggtgcgtgcccgagacgtgcacaccattcccacgccgcgcatgggcggccttggcatgcttatcggttttgccgtggctaccgtattcgccagtcggctgccttttctctcgggattgttcaacggcaattaccagatgtgggtgattcttgccggcggcatcatgatcagtctgctgggcatggccgatgacctgtgggatctcgattggatgctgaaactcgccggccagctgctgatttccgtattcgtggcttgggacggattgcagatcatctcactgcctttgggcggttcgctgattaccgcctcgccgagtctgtccatggcgatcaccgcattcctgatcgtcgcctcgatcaacgcggtcaatttcgttgatggcctcgatggtctggcggccggtatcgtggcgattggtggcatagcgttcgccgcctattcgtatatcatcgcccggtcttccccgagttatgcttcgttggccacgctgatcgacgtgatgatggtgggtatctgcgtgggcttcctgctgcataattggcatcccgccaaactgttcatgggtgattccggttcgatgctgcttggctatctcatcacctgcgcttcgattgtgatgaccggacgtcttgacccggcctcgattcatgccagcatctatctgccggtgttcatgccgattctgctgccggttctggtgttgttcctgcctgtgctcgacatgtgtctggcgattgtgcggcgtttggccaaaggccagtcgcccatgcatccggaccgtatgcacctgcaccatcgcatgctgaagatcgggcattcggtgcgtggcgccgtgctgatcctgtggggatgggccgcgttgatcgcattcggttcgctaacgattctgttcttcaaagcgcagcacgtggccgtgggcatggccatcgctgtggtggtgctgaccatagccacgatgtacccctatctgcggcatcgtattcccgagatccaagccgagaacctgacgttcgaatccgcacgtaaaaacgcgcagcatacagtgcctaaatcgcagtctgcagtaggggagagccgggattcgattggctctcaggcagcggattcgatgactgattcgcctgcaaattcgcgggactcgcaggtgggtgaggtgcaggacccggcagcggataagtgagcgctcacaagcgtgtgtcgtgaaggtcagcgcattttcatatagtgtttacatggctacaaaccttgatgaattaaacgcccagtcggcgtatgctccccttcccccgattttcgccaagctcggccttgcctatgacgatgtgttgctgttgccgaacgagacggatgtcattccctccgaagtggacaccagcactcatctgactcgcaagatcgtgatgaaggccccggtcctctccgctgccatggataccgtgaccgagtccgagatggccatcgccatggctcgtaacggtggcatcggtgtgttgcaccgcaatctgtccatcgacgaccaggccgctcaggtcgatgtggtcaagcgttccgagtccggtatgatcaccgacccgctgaccgtcaaccccgaggtcacgctggccgacctcgacaagctgtgcggcaagttccacatctccggtctgccggttgtggacaaggacaacaagctcgtcggcatcatcaccaaccgtgatatgcgcttcatcgcctccgaggattacgacaccctgaaggttaaggatgtcatgaccaaggagaacctggtcactggcccgtccaacatctccaaggacgacgctcaccgtctactcgctcagcacaaggttgagaagctgccgctcgttgacgaggaaggccacctgaccggcctgatcaccgtcaaggacttcgtcaagaccgagcagtacccggacgccaccaaggatgagcagggtcgtctgcgcgtggccgccggcgtcggcttcctcggcgacgcctggcagcgtgcctccgctctgatggaggctggcgtggacgtgctcgtggtcgacaccgccaacggtgaggctcgtctggcactcgacatgatttcccgcctgaagcacgactccgccttcgacggcgtgcagatcatcggcggcaacgtcggcacccgctccggtgctcaggccatgattgaggctggcgcggacgccgtcaaggtcggtattggccccggctccatctgcaccacccgtatcgttgccggtgtcggtgtcccgcagctcaccgccgtgtacgaggccgcccaggcctgccgtgccgctggcgtgccctgcatcgccgacggtggcatccactactccggtgacatcgccaaggccctcgtggccggcgcctcctccgtgatgctcggcggcacgctcgccggctgtgaggaagccccgggcgagaaggtgctcctgcacggcaagcagtacaagctgtaccgtggcatgggctccctcggcgccatggccccgcgcggcaagaagtcctactccaaggaccgctacttccaggccgacgtgacctccagcgacaaggtcgtgccggaaggcgtggaaggcgaagtgccgtaccgcggcccgctgaacgccgtgctctaccagatgctcggtggcctgcaccagtccatgttctacatcggcgcccacaacatcgccgagatgccggagcgtggcaagttcatccgcatcaccgatgccggtctgcgcgaatcgcacccgcacgatatcgtgatgaccgccgaagccccgaactac

SEQ ID NO: 993 - DNA, 13897 bp, Unknown
  R117_24m  MAG No. k141_26053
acgcatcacatccacgaactcgtattcgtccagccatttgtccacgtaggcacgttcttcgggcaggaatccggcgtgcttctcattggccttggcgttcttgatatcgagcggcgtgtgtgcgatgttgaaatcgccgcagagcacggcctgtttgccgccatgcgcagcctcgtcccgcaacgcgcccatgcgcttcagcatcgtgtccagaaaacgatacttctgttccattttggtcggatcatcggtgttgccggcatgtatgtacacggatgccacggtgatcgtatagccctcaggcgttttgacatcggtttcgatccaacgccccgaatccacatcctcgctcagacctggcagaccatatcgcttgtcaagcacttccaagtcggtgagcagcccgactcccgcgcggcctttcacccggcagacctcgttcatggcatggaggtcggccggcgcgtcgattttgccggcggtggcgtattcgaaaccaaattcatcgaaaatagaatcgacatcgttctgaggcgcgcgaacctcctgtatgcaccagacatccggcgcatgcttgccggcccaatcctcgatgcccttgcgcttggccgcacgaatgccgttgacgttagacgtggtaatggtgatggtcatgcggccatactattgtggcctccctacgaatcgaaccggacaccggcggccgcgatgctcagctttctctaagcctgagtgctagtgttagcaaggttgcaaccgttacatgaaacgaggaattatgggactgttcggattcggcaagaagaagagcaagaaggaagccgagccggccgttgagcctgtcgatgaggacaaggtggccgccgcagaagcgaacgctgccgcaaaggccgagagcgcggagaccgtgctcgccgagccggccagcgaataccagggccgcggcgaagagcgaggcccgtgggatgtcaacgatgaggacgtgcccgattatgacgattatctggatctcggcgcctattacctgcccttcctccagggcatccagctgcgcatcaaggccaaccgcgccacccagcaagtgcttggttccaccatcaccttcggctcctccagcctggagatcgaagcctttgccgcacccaagaccctgggactgtgggatgacgttcgcggtgacctgcttgaagccaacaaggccgcttctgaagtggacggtgtgttcggcaccgaactgaagctgccggtcaatgtcaagggcggcaaaaccgtgaacacgcgcatcgttggtgtggacggcccgcgctggatgctgcgtggcatcttctccggcaaggctgctatcgatccggacagcccggagaccgaggcgctgaacaagttcttcgccgacatcgtcgtcgagcgtggcgaggagcctttggcgccgcgcgatctgatcccgatgcatccgccggtcgcccccgctgagcgtaaggccgccaaggccgcggccgaagccggcgaggagaacggcaaggaacacttcaaggacattccggacaacaagccgaagggtccgctgagccaggaccagcagaccgaagtgaagaccacgctgtctcgcggcccgatgttctccgaagttcgctgatttataggaagagacttggcagacaacaaacgcaccggcctgtccgctctagccgacgccggcaatgaaggcgaggatttctccgtcatcgacgccatcggtggcccgcgtggcgtcatcgaatccatgctgcctggcgtggtgttcgtcgtactgttcgtggccacgagcaatctgaatctcaccattgcggtttcggccgtgttggcggtattgcaggttattgtgcgactgattcagcgccagtcggtaatgggcgcggtctctggtctggtggcggtaggcatctgcctgatttgggcatggcagactcatgaggcccgcaattactacatcttcggattcattaccaatgctggctatgccgcgttgcttgccgtgtcgctgattgcgcgcgtgcccggactgggtttggtcgtcgaattcatccgtagcctgcccaccgagcatttcaaggcatggttccatgactggatggacgacaaggccctgaaacgcgcctatatgattgtcaccggcctgtgggtcggtctgttcctgctgcggctggtggtgcaggtgccgctgtatctgaccaaccatgtagctgcactcggcgtgacccgcctgctcatgggcattccgttctgggcattggcgatttgggtgagttacctcattattgccacgccgatgcaccggcataaggtcgcggctaggaagatacagactgaagtcgctgttgatgccgaacttgaaccgagcgcaaccggaaaggacgatgatgcaagctgaagttcgtatcgaacgatacgccgaccaaggccgctgcgtggcccatatcgacggtcgtgtggtgttcgtccgcttcgccttgcccgacgaactcgtgcgagtcgaacttgacgagccccacgaccgggacgaccggttctggaccggcgaagtcgtcgaggttctcgagccgtccgaagaccgagtcaccccggcatggccacttgccggtcccttggcgatgggcgggggagtgggcggcgcggatctcgtgcacgtctctttgcctggccagctcaagtggaaggccatcaccgtctccgaacagatgagccgactcggccatatcgacgtggccgttcccatcgagcgcatgcccggcgacaaggcagccggcggcctcaattggcgtacccgcatcgaaatgattgccgacgacaacggcatgccatccatgcgccggcgcggcacacacaaccgcgtggccatcgacaccatgccgcttgccacgcgcacgctgctggacgtcgccaagcgcgaacacgtgtgggaaggcggctttgaacccggctcccagattcgtctttccgtgcccgaaccgcgcggcgagatcgtcgataccgcggcagcagacgacaattacgccgtacttgtggacggcgaactgcgcgccggctcccagctgctcaccgaacaggtgaccatcaacggcacgaccttcgactatcaggttgacgccaacggtttctggcaagtgcatcgccaagcgccgatcgccctcggtacgcacgtgatcaacctggtcaacgggcagctgcagtcagcggcggacgccgtaatctgggatttgtattccggttccggcctgttcaccctgccgctggccacaatgaccggtgaacgcacccgcatgctcagcgttgaaggcgcgcgtgtggccgtcaagaacgcccagcgcaatctgcgcgccatgaacctgaacgacgtggacgcccgcgcgggtgacgtctcgcgcacgctggaccatgtgccggcgcatctggccaagccgaatgtcgtagtgcttgatccgccgcgtgccggtgctcgtgccaaggtctgccgccagattgccgcggccggcgcatccagcgtggtctacatcgcctgtgatcccaccagcctcgcacgcgacaccgcgacactcatcggcgaaggctacgagctcaaagacatccgtgccttcgatatctacccgatgacccaccatgttgagacggtggccctgtttacccgctgacaggtgagcatatgacacgacgaattctcggattgctggcctgcatggcggctgtgttgtccctggccgcctgcacgccggccggtagggcggtcggcgatacccaagacagcatgccggaagtcgcccacgattccacacatcccacggatgtcacagtcggctttgtggggtcgactgacaccgccgcagacgagttcgtcatcaatgcgctgtctgatgacaaactcaatgtctactatgcctcgctcgaaacatccgcaagctcggcaaacgcaactgatggtgtatccggtgaaaccgaatcttctgacgccggcactaccagcgaaaacggtgccgatagtatggatgctcatactggcgtcgacaagaatgcggccaccgcacagcagggtgttgccgatttcgtagctcgcgcggtcaaaatcgtggttatcagcggcatcgacgttaccgacgccaaccgggagagctggaaccagacgttgaccaatgcgcgtgaagccggtattccagtcgctctcattgatccaaagcatgcgcccaaagatgaactgctgtacgccgtcatccttcacctcaacaccaacagtgccgattctggcgacactgccgataccaagccaatgactattactgacgccgtgctcaccatcacgcgcgacgaaccccacgaacgcgagatcaaagtcaccgtttcctgagccgaatcaggcccttgaagctgagaaagcaccctgaatcatccctgagccttagcggattgcggaacaagacacggtaggctggagaatatgagtgcaacaacagccgtggaaatgcctgaaatcggagcaaccggtcttacccccaaagaagtggtgcagcgtatcgaaagtggccaatcgaatgcggtgaaaacatccacctcgcgttcggttcaagatatcgtgcgagccaacgtattcacgctgttcaacggcatcatcttcgccgcgatggtactggtgctgatcaccggttcctggagggacgcggtgttcggtttcgtcatcatcatcaacacgggcatcggcatcgtcaccgaactcagggccaagcgcacgttggataagctttccatccttgtggcctccgaattcctcgtgcatcgtgacggcagggacgtggaggtgccccacaacgagatcgtgctcgacgacctgctgtggatccgtgccggcgaacaggtgccggccgacgggcagatcatccagacctggggactggaactcgacgaatccatgctcaccggcgaatctcgtaccgtgcgccacaaggtgggggagcaggtgtattccggtgccaccgcggtctccggcatggcattggtcaaggtcaatgcggtcggcagccattcctacgccgccacgctcaccgcgcaggccaaggtatacaagaaaaccgtgtccgacctgaacaagggcatcaacacgattctgaaattcatgaccttcctcgtggtaccgctgtgcattctgctgattctttcgcagattcatacggtcggcggttggggcacggcactctccaccggcgaatggcggcaagccgtggtttccgcggtcgccggcgtagtaggcatgattcccgaaggcttggtgctgctgacttcgctgaacttcgcggtggccgccatgcgtctcgcccgtcacaatacgctggtgcaggagcttgaatccgtggagacactggctcgcgtggacgcgctgaacctcgataaaaccggcacgatcaccgatggcggtatcgccttcaaccggctcgtgatgctcgattccgccaatgcggctgcggaacaggcagccacgcaggccctctacgactgctgcaacgaagagcagcccaacggcaccggccaagccgtactcgccgggctcaaggcccaaggatatggggcaggtgcggttgagtctcgtgtcccgttctcttcggcgcgcaaatggagtgcggtgcgtaaatccggcgagacctggtacatgggagcgccggaggtgattatttctgcgcttgagggtgactattcgtcggtgttgcagcaggttaacgagtatgccaatgacggcaaccgtgtgttgctggttgcgcggtctacagctcccctcagtccgcgaagcggactgagggacgcagttgagggagccaatgtctcggacgacccgcaactggatgtgcaggctgagccggtggcgttggtgttgtgctctgagaagattcgcgaggacgccgagcggacgctcgcttggttccgtgagcagggtgtgcgctgtcgtgtgatttccggtgacaatccagtgaccgtgggtgccatcgcccgcagggtcaaactcaccggcgaccatgagccggtggcgatggacgcgcgcgaactgcccgaggacgtgaacgaactggcccgcgtgctcgaaaacgtcgatgtgctcggccgcgtgctgcctgaccagaagaaggccatcgtgcaggcgttgcacacgcagaaccacgtggtggccatgaccggcgatggcgtcaacgacgcgctcgccatcaaggaggcggacctcggcatcgccatgggcaacgcggcacccgccaccaaagccgtggcccaagtggtgctggtggattccaagttctcgcacctgccggacgtcgtggcacggggccgtcaggtcatggccaatatggagcgcgtggccagcctgttcctcgtcaaaaccgtgtactccgcgctgatctcgctcggtgtagtgctgacgcaaatcccatacccatacctgccgcgccatatcacgtatatcggcgctctcaccatcggcatgcccgcgttcatcctggcgctcgcgccgaacacgcgccgctatattccgggattcctcaagcgcgtggtcacgttcgcgctgccgggcggcatcgccactgcgctgtcggtgctgctggccgcttgggtgctgccgccggtcatgggctggaacgtgaccggcgatgccgcggacctgtccgccctgcgcgccaccagcgccatcatcctgttcgcgatgggcgtgttcgtgctggcccgcgtggccagaccactcaacggttggcgtggcgtgctggtggcggtgttcgcggcggcgggcgtgatcggcgcgttcgtcccgttcgtggcgaacttcttcgccctgattctgccgaccggcgccacgatggtggccacgctgatcgcgttggccggttccgcgctgatcttcgcgctgtgcctgtggctggcgccgttcgtgcgcggactgacgggcaagctctcgcgtcggcattgagacggcggcgcgattgtctcatacttcaagccgacacgccagagcctcggtaacgtgcccgtaccatgtgtagcggataatcagcggcatcataagccgattcatgatttcggaggaagcatgtccttacgcgacgaccagctggctaccctcaaggcagccggcaaggacttcgattactacaacatcgccaatctcgacggcatcgatcatctgccgtactcgctgaaggtgctggtcgagaatctggtgcgcaacatcgacggtgccaacatcaccgacgagcacgtcaagaccctgctcgactgggatccgaacgccgaacccagccacgaaatccagttcacgccgtcccgcgtgatcatgcaggacttcaccggcgtgccctgcatcgtggacctcgccaccatgcgtgacgcggtcaaggacctcggcggcgacccggaggtcatcaacccgcaggtccagtccgatatggtcatcgaccattccgtgcagatcgacaagtacggcatcgccgacgcggtccagcaaaacatggacatcgaataccagcgcaacggtgaacgctaccagttcctgcgctggggtcagcaggcattcaagaacttccgcgtggtgccgccgggaaccggcattatccaccaggtcaacatcgaatacttggccaaggtggtcatgagcaaggccgaggccaacggcaacgcgctcgcctacctcgactcctgcgtgggcaccgactcgcacaccaccaccgaaaatggtctgggcgtgctcggctggggcgtcggcggcattgaagccgaggccgccatgctcggccagccgatctccatgctcgtgccgcgcgtggtcggcttcaagctcaccggctccatcccggagggcgttaccgccaccgatgtggtcctgaccatcaccgacatgctccgcaagcacggcgtggtcggtaagttcgtggaattctacggcgaaggcatcgcctccgtgccgctggccaaccgcgccaccatcggcaacatgggccccgagttcggctccacctgcggcatcttcccgattgacaatgtcacgctcgactacctgcgcctgaccggccgctccgaagagcaggtcgcgttggtcgaagcctacgccaaggccaacaagctgtggggcgacgcttccgacccggattacgtggaaccgcagtactccgaatacgaggaactcgacctcggtaccgtggtgccgtccatcgctggcccgaagcgcccgcaggaccgcattctgctgtccgaagccaagagcatgttcgagaagaccgccccctcctacgagaccgagaagaccgtcaaggatccggtggccgtgtccaccgacttccgtggcgatttcgacatcgaaaacggcgacgtggccatcgcctcgatcacctcatgcaccaacacctccaacccgtccgtgatgatcgccgccggcctgatcgcccgcaacgcacatgccaggggccttaagcccaagccctgggtcaagacctcgctggctcccggctcgcaggtcgtggccgactacctcaaggccgcggggctgcaggacgacctcgatgcactcggctaccagctcgtcggcttcggctgcgccacctgcatcggcaactccggcccgctgctgcccgagatttccgaggcgatcaacgccaacgacctgaccgtcaccgccgtgctttccggcaaccgcaacttcgaaggccgcatcagcccggacgtcaagatgaactacctggcctccccgccgctggtcatcgcctacgcgctcgccggcacgatggacttcgacttcgagacccagccgctcggcaccgacgcggacggcaacgacgtgtacttgaaggacatctggcccaccaactccgaagtcgccgccgtggtcgacgacagcgtgagccgcgagatgttcctcaaggactacgcctccgtgttcgacggcgaccaccgctggaagggcctcgacgtgccggaaggcgagctgttcgcgtggaacgacaagtccacctatgtgcgcaagcagaccttcttcgacggcatgaaggccacgccggacccggtcgccgatatccacggcgcccgtgtgctggccctcctgggcgactcggtcaccaccgaccacatctccccggcaggcgcgttcaaggcctccagcccggccggcaagtacctgaccgagcgcggcgtggagccgaagaacttcaactcttacggttctcgccgaggcaaccacgagatcatggtgcgcggcacgttcggcaacatccgtctgcgcaaccagctgctcgcctccgtgggcgaggaggtgacgcctggcggcttcacctacgacttcctcgccaagaagccgaccacgatcttcgaagcctcccgcgactacatcgacaacaaggtgccgctcgtggtgctcgccggcaaggaatacggcaccggctcctcgcgtgactgggccgccaagggcacggtgatgctcggcgtcaaggccgtgatcaccgaaagcttcgagcgcatccaccgctccaacctgatcggcatgggcgtgctgccgctgcagttcccggcaggcgaatcctatgagtccctgggcctcaacggcaccgagacctacgatatcgccggcgtcgagaagctcaacgagggcgtgacccccaagacggtccacgtcaccgccacccacgaggacggctccaagaccgagttcgacgcggtggtccgcatcgacacgcccggtgaggccgactactaccgtaatggcggcatcctccagtacgtgctgcgcaacctcatgaagtaaccaccttcttggctcccctctcttgaggagagctgtcagcgaagctgactgaggggagcaaggccggtatccgccaacggataccggccttttccacgcatgccaaaatgctatactgtatagcatctttggaatggaggttgccatgaccatggtccaaatgaacgttcgcattgatgcgaaactgaagaacgaggtcgaagaagtcctcaagggcaaaggcgtatcggtgagtgacgtaatccggtcgctgtggttgtacatcgccgaccgcaaggaagtgccggcattggaaacgaccgccgaagagcaagcccgcgaggaggaaaagcagcgcaagctgaaactgattcgagaaggtgccggatacgtacacaaggaactggtcaaggccggactgatctcagaagacaccgacctcatggaaggccttacctacaagcagttccgcgacaaaatgtacgacgagcaacttgatgcgtattacaacatgaagagggccgattgatgaccgacgtttccatgcagcgtattttgctcgataccaacgtactgttggactatttgctccatcgtgatgatcacgccaagatggcggaagcggttatggaacttggcgcgaagaacaacgttacgttgttgtgcgcgtcattgtcgctgaaggatatcgcatacctatcatcatcggcgattcgtagggaattcaaaccgaatgaatcggaagtggagaatttcactcgcggctttctgtcgtcacgggtgccatggcgttgtatcgagcaggtgaaggagatgtgtgacatcgtcgctgtcgatgagtcgacatgtgataaggctttttccctgcaaaaacggcatcgggattttgaagatgatctgatcatcgttgccgcgcaacaatccggtgccaactgtgtggtcacatcggatgccgaattaatcagtcattttcccgaatattgcaaaacaccggctgaaatcgtggcggcactggaataaatgagcgtgtggctcccctcacggaggggagccaacaatgatgtgccggcttactgtagactactgcgcctgtaagcggaactgcttccagatgtcgctgagcttctgaccgttgcgcgtgcgcttccacacgtccagaccaccgccgcgacgtcctccggcggcggcacgggccgcggcggtcggagtcggatattcggagccgtcatccagacggagacgaccgttttcggtgaccgtggcgaaccagcgctcacccttgcgcggccgctcccacaccagacgctcgcccggcaccagcagaccagcgtcaatcacctgccggatcgtgacgcgccgcgaactatgagacggccgtggagaggtcttcgacaactcatcgacattctgcttggtcagatcacgggcgtccttgtcataccggatgccccagtattccacgatgagtcggaccgactcttcctgccgcgcctccagcagggcaggtgtgcagtcagcgaaatccttcaactgattggtcagcgggaaacgacgtgaatccgcgcgcaacagcatgcggtcgcgacgtgccggatattcactcaacctgtccaactgatcctcagggccctgcaccagcgccatattgccgagtcggtacatccagaaatcatgctgatcctgcggccagtccgcaaacgatttcgaccgttcgatatccaacggcataatcggcagcgcactgaaccggcgtggtcgatccaactgcatgccggccttctgctcgttggcgcgaatcagcagcagacggaccaaatcgccgtcaccctgcatctcgccatgcaaacggaccaatgcgccttcacggtcgccgtccgagacatgcaacccgttcacgcgctggaccaaatagcccttgtcaagatcacggatggcggcgttcgcataaccgcgccgctccaacgctccagtgcgattcagcgtgcggatgccggtcacctgttccaatgcggtcagaatttccagcagccgacgctcgtcatgggcgcccaacgattccaacgtggccgtggttctggcgatacgcgaggcacgaaccacgaacggcgacaaatcggcgtcgcccagcccgcgatacgaattgaccaacgcccacatggccacgggcttccactcgtggctgcggtaatcgtccaatccctcaagccggctacgcacctcggcgggcaatatggtgtcgctggggcgcgcgatgatccgccacgccatcgcatagggcgccagcacctggttgatgaacgtgggcaccgtgcctttgtcgatgtacggttgcagcacgtcggccaggaaatcctcgatgagcttgtcggtggccggcttgtgcgtgagcacgagatgcagataggcgaagaattcctcacagtcatgcggatcgtcgccaagcgggtcaatgatgtcatcccagcgggcggcgtacacgtcaagttcggcggtcgacaggctggccgtggcgcgcgccttgaacacgtcggacggggtgagcggcaggccgcgcatgttcatcacgtcgaagatgcgatgcgcgccgtcgagatcgtcggtggtcacgatgacgagagtcacctcgttgaccagatactgcgcgaattgctggcgttcggatgccgaccaattggagatctcgtcgtacgtcttgcggatgttggcgacgatgttgcgttgcgcagcggtcgccagatcgtcgtcgttcatgtcgaacacggattcgaggttgtcctcctgcacgtgttcgcggaagaacgccgcgtcgcgctcgcgcaacgtgaggcgaggctcggtgacgatgccgcgcagcttgtcgccgggctccaccagcagcgcgtcgagttggcgcatgaggtccgggtctcgctccagatcgcgcagcacggcgatgatgatcgacagggataccagccgctgctgcccgtcgatcacgtcataacggttgtcgccctcgcgcaccagaatcagcgagccgaggaagtacggggtaccgggtgacttgcaggcgtcgtccaagtcgcttaccagttgcaggatgttctcggccttccatatgtaggcccgctggaatgaggggattgtgaaccggaaatccggggtgaacactttcccgagtggtagttccttcgcgctgattgccatgtcaatcccttcgtcgccggcctttggacggtatgccgacgtgccgactgtgctcaagcctaccagtgttcgcccggcggcgggtgcatcacgccggctcgggcaccgacccctcgtacaagtagaacgaagatgggttttctcccggcacggatgcgggcagtgactgctcgcacacctgcgtcaggccgcgatgtacatagaatccgacatcgcacgtggtatccgtgaataggaagtattgacgtatgccggctgcgtggaatgcgctcatcatcgtctcgaacatgcgccggcccagaccgtgaccgcgcgccgccggatcaagtacgaacagcaccacttcagccgaatactcatggccaatgttcgccgcctgcttacgcagttgcctatcgacatgaagagtcccgagaatctcgctcgcagctgccatgccgtcgtgggcaaacgccagttgcaatagcttgcgcaacgaatgacgccggtgcatgttcagcgggctgcgatggtcgagctcgtcgatacgccccacaatcaatgcgacgggtttatcttccagctccgcgacaaaggccgtggtcacacgtgccagacagttctcccaatcggcctcggctgccagcaagccggtccgctcatcatattcggcgtaccaagtgcggcgcaccagatcgatcagcgccggataatcgtctttacgtaacgttcgaataatcgcttcactcatgttctccattatgactgatatggctcgataacccgacgtgttacagtcgcgccggcaaatcggcccgctccaccagcctcgccatctgtacgcggcccatattgagcttgtccgccgcggaggagagatgcgccttggccgtacgctccgagataaacatacgggaggcgatttcggcgttgggctatgtgctgcaagacgattcgccgattacggtg

SEQ ID NO: 994 - DNA, 6025 bp, Unknown
  R117_24m  MAG No. k141_27814
gacgccgcctggtcccccaccgtggccgccaccaaggccaagggcaacgatgtggccggacacgtcaacgtgttcgtcttcccggacctgtgcgccggcaacatcggctacaaagccgtgcagcgctcctccggcgccttggccatcggcccggtgctgcagggtctcaacaggccggtaaacgacctgtcccgtggtgcgatggtgcaggacatcatcaacaccatcgccctcaccgccatcgaagcgcagtgagcccggcttagctcccgccagcgggagccactgtaatgcttattttgtagcaagcaacgagtaatctaatcaacggtaacccgtgtctcacgggaacattcaatcacaatggaggatgcccacaatggcgaaaaccgtccttgtcatcaattccggctccagctcgatcaagtaccagctggttgatctcgaatccggcgaaggcctcgcttccggcctcgtcgagaagatcggtgagccggtcgacggccactacaagcacgagtacaacggcgaaaagcacgagcttgaagagccgattcacgaccacgagcagggtctgaagcgcgtgctcggcttcttcgaggagtacggcccgaacctgtctgaggctggcattgtcgccgtcggccaccgtgtggtgcagggcggctccatcttcccgaagccggccctcgtgaccaacaagaccatcaaccaggtcaaggatctggctgtgctcgccccgctgcacaacggcccggaggccaagggtgccgaagtcatgcgctccctgctgccggacgttccgcagatcttcgtcttcgattcctccttcttcttccagctgccgaaggccgccagcacctacgcgctgaacaaggaaatcgccgatcagtaccacatccgccgctacggcgcccacggcacctcccacgagtacatctcctccgtggtgccggacgtcatcggcaagccggctgaaggcctgaagcagatcgttctgcacatcggcaacggcgcttccgcttccgctgaagtctccggcaagccggttgagacctccatgggtctgaccccgcttgagggcctgatgatgggtggccgtaccggtgacatcgacccggctgtggtcttccacctgatccgcaacgcccacatgaacgtggacgagctcgatgccctgttcaacaagcgttccggcatgatgggcatgaccggctacggcgatctgcgtgaggttcaccgtctggtgtccgaaggcaacgaggacgccaagctggctctggatgtctacgtgcaccgcatcgtcagctacatcggcaactacacctaccagatgggtggctgcgacgtgatcaccttcaccgctggtgtgggcgagaacgacgacgtggtccgcaagatggtgtgcgacaagctcgctccgttcggtgtcaagctggacgaggagaagaacgccacccgctccaaggaaccgcgcatcatctccactccggactcctccgtgatcatcgccgtgatcccgacgaacgaagaactggccatcgcccgcaagtccgccgcaatcgccgaggctggcaccgatacctacggcaacaccttcgccaagtaagtaaccgccgttaggcatctcactaatctctagttgcaacactatgggggctgattccgattggaatcagcccccattcgtatatggtcaagagaccactacccctgcgtcatactcccctcagtcgcctccggcggacagatcccctcagagaggggatccaggccctataacttggctcccttctctgaggggagctgtccgcgtagcggactgaggggagttccaccagaacacaggaccccttactgcctcagcatgccactccacataccgacgaaatcaggcaaggtcttgcgcgtggtggccacgttgatgacctcgatatcgggaatacgcagccccagcatcgcggcgaacgtggccatacggtgatcagcataggtttccatcacggcaccgtgcaacgtctccgccggcaccggttcgatacgcaatccatcaggcaattcctcagccgctcccccaacacgacgaatctcgttgaccaatgcctccagacgattcgtttcgtggccgcgcaggtgaccaataccaaccatgtctgtcgacttatcagcaaacaccagaatcgccgccaacgagggcgcaatctccccggccgccgtcaaatcgaacgtacccagcccacgcacggtgccgtcaccggtcacctcgcaatagcgcacgccgccgatggtcgggaacgatacttcggcacccatctgctccagatatccgggcaacaggccgcccggctgggtggtggtttcaggccaatgaggcacccggaccgtgccgccggcgatcaatgccgcgccgaggaatggcgccgcgttcgacagatcgggctcaacggtcaccttgctcggcagttgcattgcgcgcggttcaaccgtccatatgcgggcggattcgtcggcctcaaccgcaccgccggcaccggtcacatcggccacggtcatgcgaatgtgcggcaggctcggggtcttctcccccgtgtgcgcgaggtgcagaccgccaggcagtttggaactaatcagcaacaggccggagatgaactgggaagaaccggacgaatcgatgctgacctgcgcctgggcagccggcaaggttgcaggcggcgtaatagtgaacggcagacggccaacctcgccgtggtaatcaaccgttgcacccagctgttccaaaccatcaagcaccggcttcatcggacgtgcataagcctgttcgtcgccatcaaaattcactgggccatctgcaaacagggcaaggccgggcacgaaacgcatcaccgtgccggccagtccgcagaacacattgacgttgccatggaatcggccggatacaggaggagtaaccgttacggtggtgtcggttgcggaatccacgtcgcagcggacaccgagggcttcgagtgcgcccatcataaggtccgtgtcgcgcgaacgcagcaggccaatcagagtaacgggcttgctgccgagggcggcgagaatcaggtagcggttggatagggacttgctgcccggcaccgttaccgtagcgttcaacggctgtggggcgagcggggcaggccagagattcgtgagtcgttcagtcataaggccaaatctatcaaacaaatttttcaccggtcggcagcgatgcgggattcgatctgctgatcaggtgcggaagacggctgctcaaaaccgccttcgatggcctgcgcgtgcaacaactgagcggccgcgcgatcggcctcgatggcggcgatctggcgcgagaacacgatgaaccagccgaggaacgccagaccagccaacgcctccacattggtgagggtgttgtgacccatcatcatattgacccagaatgcagcgcatacgagcgcggtcaggtcggaggccaccatcactgctttggacaggcgtggcgcaagccacggcaggagcacgaacagcagcagcatgacgaacggcaggcctttggcgcatatattgtgcaagagattgtgtggcgtgtaccgaaacacgccgatgccgatgaatgccaggccggccaccatcagcaggaaggacagaatggagatgcgcagcatgaaatgtgggatttcgtagccgcgattcggatctctgttggtgcggtcgtgccagaggcgctgtagccgttcggtggtcaccagttcggagatggcgaagtagctgacgatgatgatgcatgtgccggcaagaatcagcgtggagttgaacatacgggccgcaaacgtggttctgtcgccgagctgcgaaaagttgttgtgataccagtatgggtcgtcggtggtcatgccggcggtgaccacgccggagatgacgaagaacggcaacagactggcaatagttttggcgttcatcatctccgcctgtacaaaggtcatgtaccccaccacgccggcgaaggcggcgcagacgctggagatatagccggagaagatggcattgcccatcatgtcgttggccgcaccgatgagtgcaaaagacgacaggaaaatggtcgaggcatacaccaccgcaagggcgacgatttcgaaaatgcgacgaatcggtgcaaaccaaccatgtttgaggttcaatgaacgtgatttgcgcgcatagccaataatgaaggaaatgacgccgcatgccgccacgatgcccgaacataccatgaatcggcgttgcgtcagctgccagatggccggcgcgtattccatgtacaggttcatcgataccgcgccaacgacggcgcaaatcaagaaggagatgagtccggaggtttctgcacgctgatgacgtcccatgccgggcctcccctatctattcgatgccgcgttatctttcaacaacaaacaaaactccccccgaggacaacgctttactagcaagccagcgggatttggctgtcgccattctactgaaaatctgaaacactacaaaaaaaaacgattatgtacgggcttcttagcctttgcgactatcgttaccgccttgccgagtaccgttgttcatgcagaaagaaagcagtattggacacaatcgaatgagcgtgtcggtatcgttgaaaaagtaatgaatgacggttctatcggttcaacctttaagggacgaaccagccgcggcaccatggcgctgatgcatgactatgccgagctcatcaatgaattacgtccgacagcagagcaattcaccgagatcgagcaataccgggtcaaacgaattcaggcgttcttcaccagcaaaccattcaagctggagtccgacaactcgctttccgttgatgcggccgtggaacatctgctgcggcaggcagcgcagcggcgaagggagaatccgggcaccatgtacgtcggcaccgtcctgcagcatctcgtcgcggcaaagctcaccatcgttgctccggaagtggaaatcaacggcgcgtccgttgctgatgatccgagtccgcggcttccaacggtgaggccgcggaccgtctcacaaaaccgtccgcggctccgccctcctgtttcgtcgcaactgactacaccgacgggttcgggcgcttcgtcacgaaaacgccattacgatgcaccgtatacgcgccgccgtcactgccccgttccgcccggaacaggacgatcggctcccctgcgatgtcgcgcagttcgacatccgatctgccacgtgtcagatagaagtcgaatatggcgtcgtcggattgacgcacggtgtgcagaacgtcagaggtcacgccgctggcgggcgaccgcaggttggcttccggctgccggccatcctgcggctgcgcggcaagccagcctcccacgaatcgcgtcagatcgctcacgcccagatcgcagccgaggaaatacgcctccccttcgccgtacgtgttgcgggtgatcgcggccatgccgtcaagctcccactcatccgcttcttcgccggcatacgaggcaagcacctgcacatgcggtccggcgacggtcacgtcaccgagcttgtcgatgacgcgatcgagccagtcgagatcccaatggtcttcgatgggctggaggcgatctcagctgaagatggcaagggccacggtgttgacgccggcctggcccatcaggcggatgtcgtcatcccagatttcctccggccattggtcgggactatagtcgccaccgaaagcgatgccgcgtccgtccgcggtcagcagttttggccatgcgaagtcacgtcatgcacgcacggttatctcctttggcaggcggcgcagggccacggcccatatcggataccagctgatagacactcctggccgatagtcgacacgccgccggttccggccccactgccggaaccgacatgggtatgttcatgaccgccgaccgcaggaacgaacaggcccgtccgccacggaccgcatcttgcggttcaggcggacgggccttatgggagggatgggaac

SEQ ID NO: 995 - DNA, 25612 bp, Unknown
  R117_24m  MAG No. k141_27865
agatttgcggcggccatggcccaggagagacgcccggtcccattccgaacccggaagctaaggcctggcacggcgatggtactgcacccgacagggtgtgggagagtagcacgccgccgcaccacacgtacaggaagcccctcggagcacacgctccaaggggctttccctatatccgaaaccaacaagacataggctctcgcacctagggtgtggccgaatcgaaagcatatagaagagggaaccctccaatgacggagagttccctctttgcgtatctggaccgataaaggtctagaaattgaaattgtcaggatcagcaccgttgcgcttgccggtgttgatggcggagatggcggtcatatcatcgactgataggttgaagtcgaagacctcgaagttctgcttgatacgctcggcatgagtggatttcggcagcacgacgataccgcgctggatgtgccagcgaatcaccacttgggcaggtgacttgccgtacttggcactgatctcggccaatactgggttgctcagcaggttgccgccggtaccgccgagcggactccaagcctcggttgcgatgcccttggcacgcagctggccaatgagctcttgattggtgaattgtggggaagactcaatctggtctacggcaggtaccatatcgctgtgggtcagcagctcatcaatatgatgcttttggaagttactgacgccaatggccttggcacggccagaggcataaatctcctgcaagtcatcccaggcctgctgccagccgtctgccggccagtgaatcagatacagatccacataatccacgcccaagcggtcgaggctttcttggaatgcatccttgccgtggcgtgcgcgaacatcgtcattccacagcttggtggtcaagaagaaatcgctgcgcggcacaccagcacggcgaataccttcacctactgaggcttcgttgcggtaaatcattgcggtatcgatatggcggtagccattctccagagccgtctgcaccgcgttcactgtagtatcaccatccggtgtctggaatacgcccaagcccacctgcgggatgacagtgccgttgttcagcataattgtcgattgaattgccataatgcctcactattcgtagtgttcattcaatttcctattttagaaacaagacgatgcaatgagccgcgtttcgcgggcaaagaattgcgtaatgatggcgtgattctcgttcattaggtcattattgcattcattaggtcaatgggcccagggtcttcggcatcagaacccagtcattacgccattcctgaagagccgtcttacggcataccgacctaatgaacgtgaaatcgacctaatgaatgcaacgagtaagcggctacgataataaccagtagaatcacaacccagattgaaggggagagcacgtggcagaggaatatgtggctgcattcgatgcagggaccacggcgttgaagggtgccttggttgataggcaaggccgtatcgtagccagtgcgagtagtgagcttaaccttattatcaacggcgactatcgggaacagagccccgatcaatggtggcaagctttctgcgcggcctccaggcacatgattgagcagacgcggcaatccgagtcagaattcaatgtgactcgcattcgtggcatcattttcagcggtcagatgcaggatgttattgctttgaacggcgagctcaatcccgtccgcaatgccattctgtattcggatggccgagccgaggaacaggccaagcaactcgccaagacatatcagggtggagtagaacgtttcctgaacaccgttggcaaccggctcgaaggctgcttgccgttgcccaagttgatgtggctgcgtgaacacgagccggaaacgtacgcgcgcattcgtcatgtattgatcagttccaaggactacttgatcgcccaattgaccggcgaatgcgtgggcgatgtggcggcttgttccacagccggtgccatgaatatccgtaatggccaatgggatgccgaattgtgcgaggccgcaggaatcgacatggccatgttgccacacctgcacaatccgcaagacaacattggcacagtgacggaatccgctgcacaacgcaccggtttctccgccggaactgcggtatacgcgggcattggcgatgcgggtgccaccacgctggccagcggtgtcagccgccctggtcaatacaacatcaatatcggcacctcaggttggatcgccaccgtttcgcccgaaccgttcaccgacaagccaggtgctgcgaatctggcatctggtgtggaagaagtcttcgtgaatgccgtgccattcctcaacgccggtgacgtgcataaatgggttaccggcgtattcgctgatggcgattacgcggaagcacatcagcttatcgaaacatccaaacccggctccaacggtgtgatgtgcctgccatatctggtgggggagcggttccccgtaatgaacccgaatattcgcggggcctatgtaggcctcgatccagacaccaccaaggcagacatgatgcgtgccgcgcttgagggcgtggccttctccattcgtcaaggtatggaaagttttgacgccaaacccagcgagatttccctgattggcggcggagccagagaaaatgcgtggtgccagattctggccgatgtgttggagcatcccatcgaagtgttcgccaatgccgatattctgccagcagtggcaatggcctcgttggtattcaatgtaccagacctgctgcaatcagtatgcgaatgcactgtataccagccgaatcctgacaccgcacgcacatatgccgacgcataccggcgattcctgagcctctacccgatgctgcgaacgatggattaggaactgagcatcatgaggcaatcagcgaatttggtccgcaaacatatagcggtcaccggactggtgcaaggcgtgggattccgttattttacggtgactcaggcacgtcgacttggtgtacagggctgggtgcgcaattgccgcgatggctcggttgagctggaagcacaaggcagtagcgacgcagtgcaagccttggttgagcaattagccattggtccgcgatggtccgaagtgagtcacgtcgccgtacatgacatgccgattatcgatgagaccgctcgggcatttggcgtgcgtcaataacctgcatcacgaatccacatcacgcacgataatctcacgatacgggtgaacatgggcgttcctcgccgcttaggccccgcacgttggtacgatggggcgttatgagtgagaacatcatgcgaatcattgacctgcgtggtcagaacctgtcccgtgccgaactgctcgccgcgatgccgcgtgctgcaatgggcacttccgaagccaccgatctggtgcgtccgattctggacgatgtcaaggaacgcggtgccgcggccctgcgcgacttcgaggagaagttcgaccacgttcgtccgaagaacctgcgcgtgccggccgaagcgatccagaatgccctgaccacgctcgaccccgaagtgcgcgccgccatcgaggaatccgtgcgccgcgcccgcgccgtggcggccaaccaggtgccgaaggacttctacaccgatctggccgaaggcgctcgcgtcgccgaacgttggattccgatccagcgcgtcggcctgtatgtgcccggaggcaaggccgtctacccgagctccgtcatcatgaacgctgtgccggcccaggccgccggcgtcgaatcgttggccatcgccaccccgcccgcccgcgacaatgaggaaggcctgccgaacaagaccatcctcgccacctgcgccatcctcggtgttgacgaggtatacgcggtcggcggcgcccaggccatcgccatgttcgcatacggcgccaagggcagcgagccgcaggacggcgacatcctgtgcgatccggttgacaagatcaccggcccgggcaacatcttcgtggccaccgccaagtcactggtctccgcattcgtgggcatcgacgcggtcgccggccccactgaaatcggcatcatcgccgatgaaaccgccaacccgagcctgttggccgccgacctcatcggccaggccgagcatgatgagctcgccggttccgtgctgttcaccgactccaccggcatcgcggacaaggtacaggagaacctcaactatcgcgtgccgaagaccgagcacgccgaacgcgtccacacatccctgtccggcacccagtccgccattgtgctgaccgacggccttgaccagtcgatcgacgcggccaacgcctacgcggccgaacacctcgagatccagaccgaggatgcggatgcggtcgtcaagcgcatcaagaacgccggtgccatcttccgcggcccgtactccccggtgccgctgggcgactacatgtccggttccaaccacgtgctgcccaccggcggcaccgcccgcttcgccgcaggcctcggcgtgcacacgttcatgaagccggtcgaagtcatcgaatacgacgaggaaggcctcaaggctctcgccgcccgcatcaacgccttcgcggtgtccgaggacctgcccgcccacggcgagtgcgtgctctcccgcttcgtcaaggatccgtatgacaaggccaccctgcgcgagcaggagaagggagccggtctgcgatgagctcgattcccgaaaacctgccgctgcgcaacgacctgatcggtgaggagccgtacggcgctccccagctggacgtgccggtgtgcctgaacgtcaacgagaacccgtatgcgccggacccggccgtatgcgacaccatcgccaagcgtgtgcgtgaaatcgcccccacactcaaccgatacccggaccgtgagcacattgaattgcgtcaggcattctccgattacctggcccgtgaatccggtacccgtctggacgtggacgagctgtggggcgcgaacggctccaacgagatcatgctccagctgttccaggctttcggcggcccgggccgcaccgcactcggtgccgacccgacgtactccatgtacccggagtacgctcgcgacaccttcaccggttggaagctcgcccaccgcaacgccgacttcacgttgaacgtcgacaaggtgcttgaggccatcgccgaggtcaagccctcgatggtgctgctcaccagtccgaacaacccgaccggcaccccgttgccgatggaggatatcgagcgtattctcgccgcctgcgaaaccgccgaagtggccggcgcgggtgagggcgtgcacccgattctcgtcatcgatgaagcgtacgtggaattccgcaagcccggcaccccgagcgccgtgagcctgatcaaggaccacccgaacctggccgtaagccgcaccatgagcaaggcctttgccttcgccggcgcgcgagtcggctacctagccgcatccaagggcatcatcgactgcgtgcgcatcgtacgtatgccgtaccacctgtccgccgtgacccaggccgccgcactggccgccttcgaacacaccgatgaacagctgagccgtgtcgagcatctgcgcgaaacccgcgaggccaccgccgcatggctcaaggaacagacctacaaggaccagccgcttgaagtggccgaatccggctcgaacttcctgctgttcggcgggcacttcgacaagcgcgaagccatcttcgacgagctcctgaagcgcggcgtactcatccgcgtggtcggaccggacggttggctgcgcgtgtgcatgggtaccgacgaggagatggaaaccttccgtaacgcccttgttgaagcgcttcgtatagtggaagcagcataagggacgtttctttccgattgcggcgagacccgaagcgattcgagtcccgccgcaatccaatatgacgaatcacacaggagacatgatggcaagaaccgcgcacatcgtccgcgaaaccagcgaatcacacatcgacctcgaactgaacctcgacggcaccggcaaaaccgatatcgatacatccgtgccgttctacaaccatatgatgaccgcgctcggcaagcattcgctgatcgacctgaccatccacgcccacggcgacaccgacatcgacgtgcaccacaccgtggaagatacggccatcgtgttcggcgaagctctgaagcgggccctcggcgacaagaaaggcatccgccgcttcgccgacgccaccgtgccgctcgacgaggcgctggccaaggccgtggtcgacatttccggccgcccgtactgcgtgtgcagcggcgagcccgaaggctacgaattctgcatgatcggcggacacttcaccggctctctggtccgccacgtcatggaatccatcgccttccacgccggcatctgcctgcacatgcaggtgctcgccggccgtgatccgcatcacatcgccgaagccgaattcaaggcgctggcccgtgcgctgcgcttcgccgtggaaatcgacccgcgtgtagacggcgtgcccagcaccaagggagccctgtgatggccgacgacaagttcgatccggatgaatcgcacttctccgacgaggagcttgaggccgcgctcgccggattcgagaaagaattcgcggacgattcggcatccggcgatgccagtgataccagtgatgccgataaaacggcggacgctgcttcagcgaagtccgattccgacgcgaatgatgatacggctgataaggctgccgctgattccggccagcctatgaccgacgacgtcaccgggtcggtcgctgatgcggtgaatgaggccatggccgacgtggtcgacccctcgctcggcttcgacaacgaactcgctggactgttgggtaacaaggcgaaggtggcgctgatcgtcacccgtcttgcctccgccgaactgttggccgcgttctgccagctgtcggacatctccgccgcatgcgtcggtgccaatcagggggccgtcgcggtgctgaagaatctggacggcgacggcccggaagccgcagccaaggacctgaccaccgtggtatccggcatggccgtgattcttgcagtcaatcgtgccgacaagctcgaagtggccatgtacgtgcagggagaggccggacagagtttcgcgccgcccgtgctgttcacctccacaccgcgcttcgtcgaggacctgatgctcggcatcgtaaccctgaaccaactcaagacccaagggttcgaagtggtggattccgctggactcgaccatgaccaggcgatgcagattctcgccaaccataccaagcgtgggcgtggcggacgcggctcccgcatcgaatagacgccaaccaaccagtaggggataggagagaatatgaccacagcggttgttttcgattacggtttcggcaatgtacgttccatggtgcgtgcgctcgccaatcttggcgtcgacaccaccctcacctccgactaccggcagtcgttggaggccgacggtctggtcgtgccgggcgtgggcgcgttcgccgcatgcatggaaggactgaagaaggtcgacggcgaccgtgtgatctatgatcgcatccgcgccggccgcccggtgcttggcgtgtgcgtgggcgagcagatcatgttcgaacacggtctggagcacggggcccatgccgcgggcatcgggctgatcggcggaacggtgaacctgctggacgccgacgtggtgcctcacatgggatgggacacgatcgaggccgcccccgattcggtgctgctcaacggcgtggagaatgaacggttttacttcgtgcactcctacgccgcgatggaagtgaagccggcggatacgtcccgcttcgacattgatctgagcggtgcgcccgaacgcgtgagctggtgctcgtacggccggtcgcgtttcgtggccgcctacgaacacggcccgctgtccgccacgcaattccacccggaaaagtccggggacgctggctcccagctcctcaagaactggatcgccacgctgtaaaaagcatgaagctcccctctgacgagagagctcaaattatgtataagtaactgaagaaaggctcttcttatgtcgttgactctgctgcccgccgtcgatgtacgcgatggcaaggccgtgcgcctgcgccaaggcgaatccggttccgaaaccgattacggttcgccgtttgaggccgcccgtacctgggttgaggccggtgccgaatggattcacctggtcgaccttgatgccgctttcggtacgggcaacaatcgcgatcagctgcgtgagatcgttcatgagcttggcgaccgcgtgaacatcgaactgtccggcggcgtgcgcgatgacgcttcgttggacgcggcccttgaggccggtgccgcccgagtgaacatcggcaccgccgctttggagaacccggattggaccgcttcggtcatcaagaagtacggcgaccgtgtggctgttggtctggatgtgcgcggtcacacactggcggcgcgcggctggacgcgcgaaggcggcgacctgtttgagaccatgaagttccttgactccgtgggctgctcgcgttacgtggtcaccgacgtggccaaggacggcatgatgtccggcccgaacatacaactgctgcgtgaagtcgccgaacgcaccgacgccaaggtcacggcctccggtggtatctccaagctggacgatttgcgcgccatcaaggaactggccgagatcggcgtcgattccgccatcctcggcaagtcgttatacgcacgtgcgttcacgctccaggaagcgctcgcagtcgcgaagtaggcaaaggactcgccttagcgtaagctatctttgctcagctatcgcttcactcaggcctcgcctacggacagcccactgggctgtccgcttaacggctcagcaaggaaggtcgccggatttgaggagctttttgaagacggtgtagtcttcgtcattctgttcggcgtagctgacggcgaacgaggcaatggcctgatcgaattcgtcggtgccacccatgtaattggcgatcgcgatcgaatcgccggtgcgggcgtgggcatgcgccaacgaccatgcgcacatgcgcgacagatcgctcaatcccgaagcattgagattgtcgatatcaatcgaacccttgccattccacaactggcgcacgtaatagtcgcgcggtcggccatcctcggccataaagctcgaccaacccaacagcacatcggccgtattctgaatcagcttctgcccctgaaccacgcgctcaccgtgcgtggcgtacggcgacgcgccgcagtaatgctcgagcacggaatacgtggcctccttcatctgaatcatcatcggatcgtcgatatcacgcgcgatccacaccgacgtccacgcgcgctggcccaccgagcccacgcccaccaccttgcgggccgcgtcctgatagcgcaaatgatcgaacacccaacggcgatcgtcgtacagggaatgccggtagctctcgaacagcgtgtctatacgtgcctgcaacgcatccaagtcggcgtaatcatccagctgatatcggcaccagctcaggcggattggcggatggggtgagatgatcttcgctcatagtcactaccatagtgccgtgccggcatgggcccgaaccatgcctgacatgcggaccggggcatgttgatgaaatctcgcgactcgcaggtgacaaacagtgagatgttaacgcccctcgtaacacggttatggaacgataggcgactatggataaacagcaggagtttgcgctgcgcacggtcgaagaacgcgacgtgcgctttattcgtctgtggttcacggacgtgttgggaacactgaagtccgtggcgattgctccggccgaactggaagccgcgtttgaggagggtctcggcttcgacggttccgccatcgagggcatgacccgcgtgtccgaagacgacatgatcgttcaacccgatcccgcgacgttccagatcctgccgtggcgcggtggcccgcaaggtaccgcccgcatgttctgcgacattctgaccccagacggcgagccttcgctcggcgatccacgtcacgtgttgaagcgtacgctcgccaaggccaaggacaagggcttcacgttctacgtgcatccggaaatcgagttctacctgttcgaaagccaggacgactggtccaaggccccgaccccgatcgacgagggcggctacttcgaccatgtgccgcgcagcccaggcatggacttccgccgcgccaccgtgaacatgctcgagcaaatgggcatctcggtggaatactcgcaccatgaggcggggccaggccagaacgagatcgatctgcgatacgcggacgcgctcaccatggccgacaacatcatgacattccgtacggtggtcaaggagatttccttggagcgtggcattcgcgccagcttcatgcccaagcccctggccgacgcgcctggttccggcatgcacacgcacctgagcctgttcgaaggcgattccaacgccttctacgaggccggtcaggagttcaacatgtccctgaccgcccgccagttcgccgccggcatcctgtaccatgcggccgaaatctgcgcggtcaccgaccagtacgtcaactcgtacaagcgcctgtggggcggcaatgaggcaccaagctacatctgctggggccacaacaaccgttccgcgctgctgcgcatcccgcagtacaagccgggcaagggcaactccgcgcgcatggagttccgtgcgctcgacccggtggccaacccataccttgcctactcggtgctgctggccgccggtctcgatggcatcgataagcagatgcagctgggcgaacccaccagtgatgacgtgtgggagctcaccgacggcgaacgtcaggctatgggcattcagccgctgccgcgctcgctggacgaagcgctgaagatcatggagaaatccgacttcgtggccgacgtgctcggcgaacacgccttcggctacttcctggacaacaagcaccaggaatgggaggagtacaaccagcaggtcacgccttacgagctgaagaagtatctgccgaagctgtaatcgcaagcgttgcacatgtgccgaaccccgtcgatgattggtcatcggcggggttttctatagcgtgtcgtggtggtgggtagcgggcagaggtgggaatagtgttgtcgctgagttgatacgaaaaacgattgacgtaaccgacgaatcagcttgtagtacgagcgagagcactcaagagagcacccatgacgaacacacctgcgaacaccgcgcgcaccgaccgcttcttcaatctgccggtcaccatcctgatcttcgccagcttcatgctgggcatgagcgaattcgtggtagtgggcatcctgccggacatcgcatccggacttaaggtctccgaagtgaccgtgggtaatctggtggccatcttcgcattcgtgtacgcgccctgcacgccgctcggatccgcattatccgcccgattcccgcgctttctcacctatctgacgttgatgggcgtgttcctcgtcggcaatatcctgtgcgccttcgcgccgaactatccggtgctgctcatcgcccgactgctcatcgcctcggtgtccggcacgctggtggccatctccatgaccttcgcgcccgacgtgaccaccgacaaataccgcaccaagttcattgcctgggtattctcgggtttctccatcgcctctgtggtcggcgtaccggccggcacttgggtggccaatactttcggctggcgtgtcacctttgccttggtttcggtgctcaccgccgtgctgatggcatcgatggcagtgtctctgccacgcaactcacatccggcgaagatcggtttcctgaggcaattccgtctgttcttcgaccgccgcatccagctcggcgtggcggatgtggtctttggcgcagccgcctcctacgtcttctacacgtatctctcgccgatcatgcgcgacgaaatcggtgtgcccgaacgctatatcagcgtcggcttggtggtctacggctgtgcctgcctgtggagcaacctgtacggaggcaagctggccgatcggggcaggggggtcgagccgctgacccacattcgaccgatctactgcgtgcaggccgtctgcctgtgcctgctggctttcgcctcgctggtgccggccggcggcgcactgctgctggtggcgcttggcatgctcatgtatctgcagaattccgcttcccaggtgctgtatatggatgtggcctaccaatcccatcccggttcggtgaatctggccgcctccctgaattccatgtcgttcaacatcggcatcgccatcggctccgcggtcggcggcctggtcaacgacctccttggcctgacctggctcggcccggtcggcgcgattttcgcgctgctcgcggtcggcaccacgaccctgctgcgtccgtacgtcagcccggtcggggaatgacgggtggcgtgacgcgcgggaacgaagggtttttcccgcatgtccccgcggcatgccttatccgccgattgccgtccattgataacctgctatccaaataaccgataaggccacagcatgtcatcctgctgcgaaaccttaatgttaggacaccggctgcagggggacccggctcacgggcgcccacctgcgcggattgatgattatcggtatgttcagcgtgaaaatggggatgacaatatgacggatgcgacggcgaaagccgcgccgaaggcggaaagacggcggcgcgttctccgttccggcgctcgctcatcgatagtggtcggcggcgccatcgtgctgttcttcgtgctgctggcgccgctggccgggccgttgtcggccatcaccggcaacgacccgtacgccgagcatcccgaggccttgggtgccgggtcggtgccggccggattcggcggcggcatcagtgcccggcactggttcggcgtcaccccgctgcgcggcgtcgacctgttctccatcgtggcgtacggctcacggatctcgctgggcatcggcgtcgtctcgtcggtcatctcgctggtcatcggcgtggcgctcgggctgctggccggctatttccccgggttggtcgatgcgctgatctcgcgcacgatggacgtcttcttcggcttcccgttcctgatcttcgcgatcgcgctgtcggcggtggtgccgcagggcttcccgaggccggtgctgctgacgctagtgctcggattcttcggatggcccggcatcgcgcgtcttgtccgggggcagacgctgacgctgagcaagcgcaatttcgccgtcgcgtccaaggtgatgggcgcctcgcctgcccatgtgctgtggcatcagatcctgccgaacctcatgccgctgctcatcgtcaacatcacgctgtcgattcccgggcgcatcggcgccgaggcgggcctgtcgttcctcggcgtcggcatgaacccgccgacgccctcatggggccggtccatctccgacgccgtgcagtgggccctggtcgacccgatgtatctgatcttcccgggcgccgccctgttcctgctgaccttcggcttcaacctgcttggcgatggcctgagcgacgccatcgacccgcgcaagggggtgcgtgcatgagaatcctgcaatacatcggcaagcgcgtggcgagctcgatcgtcgtcatcctgctcatcacgctggcgctgttcctgatcttcttcctgctgccgaccaatccggcgcagctgtcgtgcggcaagccgtgcacgcccgagcagctgcagcgggtctccgccttcatgggcaccgataagccgtggtacgagcagatgggcaattacgtggcgggcatcttcgtcgggcgcaccttcggcagcggcggcggtgccgtggtctgctcggcaccatgcctcgggtattcgttccgtctcaacgaatcggtgagccagctgatcctcgaccgcttcccgatcaccgcgtcgatcgcggtcggcgcggccgtgctgtggctggtcatcggcgtggcgaccggcgtgtgggcggccctcaagcgcgatacgctgatcgaccgcacgctgctcgggctgtcgatcgtgggcgtttcggcaccgtcatacctgatcggcctgctgacggtgatcgccttttcgctggtgctgcagatattccccagcggcgggtacgtgaacttccacgacgaccctgtcggctggttcacgcatctgctgctgccgtggctggtgctggccgtgctcagcgccgccggctacaccagggtcacccgcacacagatgattggcgagctgagccaggactacatccgcaccgcccgctccaagggcgtgcccgaatcggtgatcatcttcaagcacgcgctgcgcaacgcgctgctgcccgtgatgaccatgttcggcctcgatctgggcgggctgctcggcggcgcggtgctcaccgagaaggtgttctcgatgcaggggctcggctcgctgctgctcgattccgtgtcgaacctcgacctgcaggtgctggtcggcgcgacgatgttcgccgccgtgctggtcatcgtcgccaacctgatcgtggacatctgctacagcctgctcgaccccagggtcgcgctcggcacgaagtagtgcggctgcggccgcaacacgcgatacttgccggtctgctccacggaccggcaccgatagagaggaaaaccatcatgaagaacaacgcatggcgcgtattcgcggcgggggcttgtgccgcggtactggcgctgtccggctgcggcgcgtccaacgacaacgccgccaccggctcggcgagcggcaccaccgtcaagggcggcacgctgaacgtgctgctgtccagcacggagatggatctggacccggccaagagccagggtctgccgaccaccacgaacggcaacatcttccgccgcctgaccgcgtggaagatcaccgacaagggcgagacgaaggtcgtgcccgatctggccaccgacaccggcaagtcgagcgacgacggcaagacgtggacgtacacgctcaagaacgggctcaagttctccgacggcacgcccatcacctccaaggacgtcaagtacgggctggagcgttccttcgccgactcgctgaccggcggcctgagctaccacaagacgctgctcgagggcgcgcaggactactacggcccgttcgacggccaggagctcagctccatcgagacgccgaacgacaagaccatcatcttccacctcaacgcgccgttcggcgactggccgtgggtcgtctcgctcgccgcgttcacccccgtgcccgacggcaagggcccggcgtccggctacggcaagctgccggtggcctccggcccgtacaaggtcgagtcgaacgaggccggcaagcaggccgtcttcgtgcgcaacacctactgggacaagaagaccgatccggtgcgcaccgcgggccccgacaagatcgtgttcaagatgggacaggacacctcggtggccgcccagtcgatcatgcagggcaccggtgaaggcaagaactcgttcctgtccggattcgtgccggccgcgcagctcgcgcaggcgcaggccaacccgaactacaagaagctgctgaccaccagcggcgacggcgcgctggaatacctcgccatcaacacccaacacgtgaagaacgcgaagattcgccaagcgctgcagtacgcggtcgacaagaaggcctaccagacggcttccggcggcgagatcgccggcaacttcgccaccacgctcattacgcccggcatcgagggccgcgaggactacgacctgtacaaggccgatccgaccggcgacgtggacaaggccaaacagctgatcaaggagtcgggcgagcaggccccgaccctcaagctcatcgccacctccgctcaggccgaaaccgcctcctcgatccagacgagcctcaagcgggccggcgtcaaggtggacatccagacactcaacgacgatgtgtattccgatacgctgaccaacgacaagggcgactacgatctggccatcagctcgtggcagcccgacttcccgtcgccctacgccaacatctccccgctgttcgactcctcgcagatcggccacggcaactacaacctggcccgttacgcgaacccgaaggtcgacgagctgatcaagaaggccaccgagaccatcgatcagaccgaggccggcaagatctgggccgaggccgacaagacgatcatggccgacgcgccggtcgtgccgctgatctattcgaagaacacgttcatccacggatcgaacgtgaccaacttcgtcatcggcaacttcccggcgtacccggactacacgcaggtctcgctcgccagcgcgaactgagccggcatccgcatccggcgcgcgccggcggcatggtccgctggcgcgcgcgccggacgcattccaacgcttgtgcatccaaggagcttccaatgagtgaaccacgcgcgatcgtgaccgtggacggtctggccgtcagcttcgacgagcgggaggtgacccacggcgtcagcctcaggctgttcccggggcgcatcaccgctctggtcggcgaatccggctccggcaagtcggtgacggcgatggcgctgccccgtctcgatccgtcggtggccagcgtgaagggccacgcgtacctcgacgacgcccttgtggatgacgggccggactccggtccgggcggcgacggcaaggacgccgccggccgcggcatcgatctgctggccgccgacgcgccgctgcaacgcatccgcggcgaatacatcggcacggtgttccaggaaccgtccaccgcgttcaatccggtgttcacgctcggcgtacaggtcgcggaatcgctcaaataccaccagaagcagctcagcgccgccgagcgcaaggccaaggtgctcgaacagctgcgcgaggtcgggctcgacgacgccgaacgcgtgtggtcgtcgtacccgcatgagctgtcgggcggccagctgcagcgcgtgatgatcgccatggcgatcatcaaccgacccaaggtactcatcgccgacgagccgaccaccgcgctcgacgtgaccacgcagaaggcgattctcgccctgatctcctcgctggcggtcgacctcgatctggccgtgctgctcatcacccacgacatgggcgtggtgtggcaggccgcgcaggacgtgtacgtgatgcacaacggcgtgatcgtcgagcaggggagcgtcgcgcaggtcttccgccacccgtccgacgactacacgcggatgctgctcgacgccgtgccgcgcctgcgcatcgacgagcatgcggcagacggcgaacatgcggccggcggcgaacgcatcacggaaagtgacgcgcccggcggcggcaggcgcatcacgcaggtgaacgacgtggccgtgtcgtacaaggccggcagcttcgccgtcaaggacatctcgttcgatctggtggccggcaggacccgcgcgctggtgggcgaatcgggagccggcaagaccacgatcgccaaggtgatctccggccagctcgcgccaacctcgggcacggtgctcatcgagggggaggatctcgccaaggcgcatggcaggcgcaagcgcgagatcctgaagcatatgggctatgtgttccaggacagcggatcggcgctcaacccgcgcaagtccgtggcatggagcatcggcgagccgatgctcgtgcagggcgggctcagcgagacagaccggcgcaagcgcgtccttgaattgcttgatcaggtggagctgcccgccgatgtggccggccggttcccgcaccagctgtcgggcggccaacgccagcgcgtcggcatcgcgcgcgccttggcgctcaacccgtcgctgctcatcgccgacgagccgacgtcgtcgctggacgtgaccgtgcagcgcaaggtgctcgacctgctgcgccggctgcagcgcgagcacggtttcgcatgcctgttcatcacccatgacctgggcatcgtgcaggagatgtccgacgtgatcacagtgctgcgccacgggcgcgtcgtggagagcggggagaccggccgcgtgctcaaccatcccaaggccgagtacacgcgtaccctgctcgacgcctccccgaagatcgacctgtgagccgtgccgctcgtcatccggccggttctccggccgtgcggcggggcggcgacggcgcggatgacacctagccttaccgtggtttcggttttttgccgtcccgcccctatcggcgcgcggcaccgaaccagttggtgtatatgagggcgaagttgcggttgccgtagctggagcatgagtcgccctcgccgaacccggccgccagcgaggcgtcgttcggctggtagggcgtgtagatgtagagcagcgcggtcgccttgttctcgatgtacacgttggtgccgccgcacccggcatccgggtggtactggatgtagttcagcgcgttggcgtgatagccgtaggcgctttcatgcgccacatagtattggtagcggtgcgccgccccgtacacctgtctgaagaagccggcataggccggatcgcagttcgcgttgtccgggcagctcagccccatggcggccttgtactggaagtccgtcggatcgacggccgtgaccaggtgctgctccttctgcatcacggtgagcagcaccttctggctgatgccgcacgcgcgcgccgacttgtcgatgatcgcggccgcggtctcctttctcgcgcccttgtacgccgcgcaatactcgttcgccgcctggtcctcggtgtcgaaggtcatggttttcaggcaccgggaaccgctgcacgccgcgccctgcttgtcgaggaacgcctggacctcggcctcgctcatcgcattggcgttgaagaactggccgtccgagatgatgtcgccgggattgaagtcgtattgctgcgtcagctgcagctggcgggcctcggcctcctgcacgtcgcgacgccactggacgacccgcacagtgcccacgaccagcgcgaccacgcatgcggccgccaccacggtgaccagcacagccgcgacgcgctgcgccagcccggcccgcttccaccagcgcgccgggctgagcggatacctgcgattgcgcgggcgtttgcccgggcgacgtttgcgattgccgcctgacacgccccgccccgcgacaatcacgttcgccctgccgcgcggattggccggcttgcgccgttgcgtcgtcgccatcgctacgccagtgccttcttgatgcgctgcaggctcaccggcttggcggtgccgagttcctgcgcccacagggacacgtagaattcctcgagcatccagcgggcggcggtcgcctgcttcatcagcgtctcgtggcgggggccggccggctccgccttggccttggccatcgccttgtcgaccagcgtgcgggcctcgttggcctcccacgcccatcgcacgtcgcggttcttgtcggtcttcgccttggccaggcgcatgagatcggcctgcaggtatcgggagatgttcgccagcgcgtccgggggagcggcgccgacgaatccggggaacaccagcgtggcgatgtgctcgcgcaccgactgcagcaccgacagcatcggcaagtcggccttgccgccagtggccttgtcgacttcggcataagccttgagcacggcgatcacgtcatgcgccacctgatagacggtgtcctcgtacacttcgcgcacatcgagcaccgcattggccaacgcctcatcgtccgagagcctgtcgacattcggcatcagccgtttgaccgtggccagctgcaggtcttcgaccagatccttggtggacttgtacggagcagaagccagcatcaacgcctcggtacccagccagcgcgacgaaatgcgttcggccggcaaccgcagcgcatccaatgcgccacgccagagcatcgtggcccgggactcggtggtggcacccgccttatgcaacaggttcgcctgactgaccagcttgccctgttctccagcctgatcggcctgcttcttgaccatttgacgggccgacgcctccgcctgcgcggcgaacttgcgttgcagcgccttcagatccttggacacacccagcaccttgacggggccgcgcgcatgccggcgtccacgagggtgcttgccggccggcagttgctgctccaccgagaacgtgaccctgagatacggggaaagacgctcgaccagttccggccccaacacttcgggatgaatctgcgcacccttggtggcgatggccgccttggtgaacacatgtgccagatcaggccagccaacggtcgtgccatcctcatccaccggcggcagattcggcttctgctgcgagcccgagcccggcagatccgggtaatgctcgtcgatccagtcacgaatcgcacgcgcggcatccggggccggcacgaactggacgcgcagctgcttgggcagcgccttgatcatcgacagaatcagctcatccaacaggcccggcacattccatgtgaactggtcgggcgtgatacgcgagagcgccttcaacggcacatgcacggtgacgccgtcggccgggtcggccggatcgtatacgtagctcaaacgcaggtcgatgggttggccgtccgatccggtcgtatgccaatggtcggggtaatcgtccagactcaccgaatcgctggatgccagacgctccaccttggccgggtcgaaatcaagcagattcggctgacggtcatgctcggacttccaccatttcgccagatcggccacgctggtcacatcgttgggaatgaccgcgttgtagaagtcgaacagatcctcgtcggacacggtgtccgccagctggcgggtgcggctcgcgtcatcggcggcatcctcgagaatgtcacggtttttgcccacaaagtcgtcgtaactgaagcgctgctgaatatcgccctcgaccagaccctggcgaatcaggaagtcgcgcgcctcaagcggattgatgcgtccccactgcacggcacggtcctgtacgatcggcagaccatacagcagcacgcgcgcggtggccacagccgagccacgcgaacccgaccagtgcggctccgcatacgtggtgcgggtcaattggccggccaacggttcggcccacgccgggtcgatggccgccgaatagcgggcccacaggcgagaggtctccaccagttcggtgctcatcacccatgacggggtcttcttggccacggcggaggcggggaacagggcgaaacgggtgccgcgcgcgccctgataatcgttcttcgactgcttctgggcgcgtttcatcgcacgggcgcgcgccgcaccggtcagccccgcgaaatcggaggccttgggctcacgcaccacctgcatgcccatcatcgacagcaatccggcgagcatcgacttgtggatgccatccgcatcccacgagcagcacagcgaatgcgcggcctgctgattcaacggcagctggcgaatctccaagcctgggcgggaggcgggcaacgggtcgccgaccttgaacttcagctccttgcacatctggcgtagctgggagacgagatctttccactggcgtatcctcagccagctgagatactcggttttgcagatacggcgcagcgcgttgttgctcgggtcgccgtccgcttggaacacgcgatcccagatgttcagggccgtcaggaaatcggaagtctcatccgcatatcggttgtggatacggtcggcatcctcacgcttgtcgtccgggcgttcacgtgggtcctgcaagctcaggaacgccacgaccacgagcacctgggccagaagattcggcgaaccggttttcgcggcctcgataaccatacgtcccagacgcacgtcgatggggatgcgcgccagctgacggccggtatgggtgagcgtcacctcgccgcgctttcggccgatggccttgagctcggtgagctcattgaaaccgtccgacacggccttcatatccggcggatcgatgaacccgaagttcgtgacgtcctcggccgtgcgggccacgcccaccgacagcatgtgaagcaccacggcacccagcgaggtacgcaggatttccggctcggtgaagcgcggtcgggtctcgtaatcctcacgcgaatacaggcggatcgcgatgccgtcggccacgcggccgcatcggccggacctctggtcggcactggcctggctgatcggctcgatcggcagacgctggacctttgcggtcttcgaataccgggagatacgggcggaaccggggtccaccacgtagcggataccgggcacggtcagcgaggtctcagccacattggtggcgatgacgatgcgctgatgcaaatgcgattcgaacaccttgtgctggtcggcggcggacaatcgcgcgaacagcggcatgatctcgatggcgtccggtcggcgcatgtcgtcggcgcgcggaccgtaatgatgccgcagtgcggcctcgaactcgtggatgtcgcgctcgccggaagcgaagaccagaatatcgcggggaccgcgctcatgggaggagtggatcaccagttcggcgcaggctcgagccacggccgtgggcatatcggtgatgccgtcatcggcataggagtcgccggaccggccgcggggccggtcggaatcggattccgcgatggcgctggccagctcgtcgtaatcggcgtcgccggggcgggcgcccaccgcgaatcccggcacttcgcgcatcaacgcgggcgcggtgccaagcggctcatagaccacctgcacggggaaggtgcggccggaaacctcgattaccggcaccttctcatgcaaggcgtgctcgaaatgctcctggaacttgaccgaatcgatggtcgcggaggtgatgatgagcttcagatcgcggcgctgaggcagcagtgccgtcagatagccgagcagaaagtcgatgttaagactgcgctcatgcgcctcgtcgatgatgatcgtatcgtattgggtgagtttcggatcgcgctggatctgggcgagcagaataccgtcggtcacgactctcaatcgcgtgctgggcgagctttcgtcggtgaaacgcacctgatagccgacctcgtcaccgagcttcacgcccatctccgaggcgatacgttcggccaccgtgcgcgcggcgatacggcgaggctgggtgtgcacgatctgcttgccgtgcgtgccacggccaagctcaagcaggatcttcggcagctgtgtggttttgcccgaaccggtctggccggacacaataacgacttgggaacgtttgaccgcgctggctatctcatcacgcgcggcagatacgggaagttctgcaggatactcatatttcatgacggacttcaatgatacggaagcccttggagctcgcgtatttgctcgcagtgaacccctcgccgagcgcatcgtccagccaggggatcagcgaatcggagccgagattcttctgcactacgagataggcggcgccgcccaccttgagcttcggcagccaagccataagcaatgtatgcagcgcttccttgccgacacggatcggtggattcgaccaaatcgcatcaaacgtgaggtcgcccggcaccgtctcgcagaacgccggctggttctcggcgggcaggggagtgctggactcgtccacctgagccgcatgaatgttcgtgcggccgttcgcctgtgcgttggcatgggtcaggtccagcgcgcgctcgttgacatccaccgcccacacgttcgcttcgggcgactcaaacgccaatgtcagggcgatagggccccagccgcagcccaaatccaggaaatcgccggtaagtggcggctcgggcgcatgcttcagcaataccgatgtaccgaggtccacgcgcgagccggagaacacgccgttcgacacctgagcggtcgcctcatggccgcgcaacgttacgttcaatgtgcggcgcacatctttcgacgcgggttccgcagagaaatactgttctgccatggtcgctccatttctgcgggattcgccgctctcgtatgccgacctgtatcagccggcctatgccggtacgtgccgatctatgccagcatgtcacctcatgtgatgataataaaggaccatagaagaatcgtgaaccattccaaccaaacgaggcgcacttgaccgacaacacccagtacaccgacatcgaccgcggcaacaacgacgttacccctgaaggtgtgctggccgggcagtccgaagtgctgctcgacgacagccagcgcgcgaccggctggcacgaggacgccaaccaggaatggggggagcgcgaggcccgcaacgagctcaagcatgtcgccggtctcggcgagctgcaggacgtcaccgaagtcgaataccgcaaggtgcgactggaacgtgtggtgctcgtcggcgtctggtcgtccgccgtcaccacgcaagccaaggccgaggaatcgttgagggagttggcggcgctcgccgaaaccgccggtgcggtggtatgcgatggtttgctgcagcatcgctccaagccggatgcagccacgtacgttggttccggcaaagccaaggagattgccgacatcgtggcgcgtgaggaagccgatacgattatcgtggacgacgacctgccgccgtcacagcgccgtgcattggaggacgcagccaaagtcaaggtggtggatcgcaccgcggtgattctggacatcttcgcccagcacgccacctcgcgtgaaggtaaggcgcaggttgagttggcgcagctcgaatacatgctgccccgactgcgtggttggggtggttcgctgtcccgtcaggccggcggtcgcgcggcaggcgcggatgcgggcatcggatcgcgaggcccgggcgagaccaaaatcgaaatggaccgtcgtgtaattcgcacgcgtatcgccagactgcgccgtcagattcgtgagatggctccggcacgtgaggtcaagcgcggttcacgccgtcgcttcggcctgcccacagtggccgtggtcggctacacgaacgccggcaaatcctcgttgaccaaccgtctgaccggttcggccgaactggtggaaaacgcgctgttcgccacattggacacggccgtgcgccgcgccaaaacccgcgacggacgcgcttacgcctacgtggacacggtcggcttcgtgcgccgcctgcccacccagctgatcgaggcgttcaaatccaccctggaagaggtggccgaggccgacgtgatcctgcacgtggtcgatggctcccaccctgacccgttctctcaggtcgacgcggtcaatgacgtgttggcggacatcgaaggcacggcctcgattccgcgtattctcgtattcaacaaggccgatcaggcggacgaggcgacacgtgaacgactcgccgcactgcagccggatgcgttcatcgtctccgcctataccggtgagggattggacgagctgcgtaccgcggtcgaaagtctgctgccggtcccgcatgtgcatgtcaacgctctgctgccgtataccgctggctccctg

SEQ ID NO: 996 - DNA, 22492 bp, Unknown
  R117_24m  MAG No. k141_27944
cgtacaagatctccggcctgccgcctacgccgatcagcaatcccggcgatagcgccattcaagcggcactgcaccccgaaagcggcaattggctgtacttctgcacggtcaatctggacaccggcgaaaccaagttcgccgtaaccgccgatgaacatgaccagaatgtggccgaactacgcaagtggcaagccgaaaaccagtagtcgcctcattggctcccctcgccgaggggagctgtccgcaaagcggactgaggggagtaatacgggattaagccccaacaaccaccgccacaatcgcgcccgccaatatcaccggcacatacggcaccttgcccgcatgtgccggtgatgtgcgttgtgggtcgaatcgcgtccacagggcaatccatgtgatgccggcaacgcccatcgccagccaccagaccaccacaggcaacaggccaaacagtccgacagacaatcccataggtatcaaggcggtcacatcgccgaatcccaatgaccgcggcaccagcaacgccaacgcgaactggatcaggcaacatagcacggtgaacaacagcgcctgcaacagcacgaacaggtcgttcgccaccactccatgcgcgaaatcggcggccaactggattaacgcgcccacggccacccatgcgatcggtacccgccgatgacgaacatcctcaatggacagtgcaagcccacatagcagaccgggtagcgtgaacaggtatggcatggcttaacattaacccctagttagacgtacacatagacgtacacacatgaaacgagggaagttatgctgcgttggcagacggcaggggagtctcacggagaagcattggtggccatgattgaagggttgccggccggcgtgcgcattagcacggacgatatcgtttccgcactggcacgccgtcgacttggatatggccgtggtgcccgcatgaagttcgagcaagacaaggtccgtctgctgaccggtgtacgccacggtctgaccctcggctcgccggtggccatcgaaatcgccaacaccgaatggccgaagtggaccgaggtcatgagcgccgatgcactcgaccatgacctgccgcgcgaaggccgcaatgcgccgctgagccgcccgcgcccgggccacgccgatctgaccggcatgcgcaagtatggttttgacgacgcccgcccggtactggagcgctccagcgcccgtgagaccgcctcccgtgtggccttgggcgaggtggccaagcagttcctggatcaggcgttcggcattcgcaccgtagcccacgtggtggcgctcggtggcgtgcagaccaaccctgatttgccgttgcccacgcctgacgatctggaagcgttggatgcctctcccgtgcgtacgttggataaagaggccgaggcccgcatcatcgaacgcatcaacgaggccaagaaggccgccgacacgttgggcggcgtgattgaagtgctggcttacggcgtgcctgccggcatcggcacctacgtggaatccgaccgtcgtctggacgcggctctggcctccgcgattatgggcattcaggcgttcaagggtgtggagatcggcgacggcttcctggaagcctcccgccccggttcgcaggcgcacgatgagatcgtggtcaacgccgacggccgcatcgaccgtctgtccaaccgtgcaggcggcattgaaggcggtatgtccaatggccaggtgattcgcgtacgcggtgccatgaagccgattccgtccatccccaaggccctgcgtacggtcgacgtgctgaccggcgaatccgcacaagccatcaaccagcgttccgacagcaccgccgtgcctgcggcatccgtggtggccgaggccatggtgcgtctgactttggcgaagtacgcgctggataagttcggtggagacagtgttgccgaaacacggcgcaaccttgagtcgtatctcgcctcgtggccggagcacatgcgctgaacgaagtggagtatggttccgagacgactgccgcggaaccatcagcaactgtacccaccaatcgtcgagaggattcgtagattatgaccgcacgcccccgcgccgtcatcatcggcatgatgggagccggcaaaacacgtgtcggtaaggaagtggcgcatatgttgcgtctgccgttcgccgatgccgatgtggagatcgaacgtgaagtgggcatgaagattcccgcctacttcgatgaatacggtgagccggcattccgcgaggttgaggccgatctcatcgccgatatgcttgaggatttcgacggtatcttttcgctgggcggtggcgctcccatgacgccatccacccagcatgccctcgcctcatacatcgaccatggcggtcgtgtggtctaccttgacgccgatccggcggaggccatggaacgcgcgaaccgcgggggaggccggcccatgctcaatggcaatgccaactcccgttggaagaaactgttcaagcagcgtgacccggtattccgcgaggtcgccaacgttcatgtccatacccgggggcttacgcctcagggcgcagcgaagaaagtgattgatatggtatctgagcgagcagtgcatgttaccggatcggcaattgagccgtatgatgtggtcattggcgaaggtgccatgaatcatctggtcgacgtgctgggacccaagcccgccaaaatcgcgcttatccatacccagccggtgcagcgacactccgatcgtgcccgcgccctgttgcgtcagggcggctatgaggtttccgacatcgtgattccggatgccgaacccggcaagaccattaccgtggccaacggcatttgggaacgccttggcaacgaaggtttcacccgatccgatgccgtggtggggcttggcggcggtgccgcaaccgatttggccggtttcgtggctgccacgtggatgcgcggcgtgcgctatgtaaactgcccgacctcgctgctggccatggtcgatgcctccaccggtggcaaaaccggcatcaacaccccgcagggcaagaacctcgtcggctcgttctacacgcctgccggtgtgctggccgacaccaagacgctggctacgctgcccaatgacatcttcatcgagggtctcggtgaagtcgccaaatccggtttcatccgcgaccccgaaatcctgcatatcctcgaagaccacgcagctgaactgcgcgctttcgacggctctacattcctcggctcgccgctcgaagacgtggttgccgagctcattgagcgcacggtaaaggtcaaggcctaccacgtctcctccgatttgaaggagaagggtctgcgtgaattcctcaactacgggcacacgatgggccatgccatcgaaaagctcgagcacttccgctggaggcatggcaatgcggtggccgtcggtatggtgtatgccgccgaggtggcccatctgatcggttacatcgatcaggatctggttgactatcaccgttcgttgctcgcttcgctgggtctgccgacgtcgtggaatggcagctcgttcgacgacgtgctcgcattgatgcatcgcgacaagaaagcccgtggcaacgaactgcgtttcgtggtcctcgacgagattggtcacgtcgtacacctcgacaacccgcccgccgaagccgtagaagaagcattccgtcgtatccagcagtaattgaacggccgtaggccgtgccattcgccatcccctcagaaaaagtacttggctcccctctaacggaggtgccccggagtcggatttaccttctacctccctctgatgagggaggtgccccgaaggggcggagggagagaagcacaaacaaaaggagtcccaatgaccaaagtcattgttgtcaatggccctaacctcggacgtctcggcgtccgccagcccgacgtctacggtcgtcaagacctcgacaccctgcgcaagctctgcgccgaatggggcaaggacctcggcctcgaagtcgaggtgcgccagaccgacgacgaagccgaaatggtgcactggatgcaccaagccgccgacgagaaaaccccggtggtcatgaatcccgccgccttcacgcactattcgtatgctctcgccgacgccgcgcacatggtcattgatgagaacctgccgcttatggaagtccatatttccaacccgtccgcccgcgacgggttccgcaagcgttccgtaatcagccctgtggccaccggcaccatcaccggcatgggtttctacggctacaagctcgcgctcgatgctgtggcgcacttgctgagcgaatagaaccaagccctccagccaatcccgggtatcagtcgacgttgcgcccgggattcctgttccgacgaatcggacccgaatcctcgtccgggcgcgccttatggacccgaagtacgccgtgtattcgaccatatgctggccaaggcagaacgagatgggctgcctacgcacgactacaccggccacgtcatgaacacgccgggtcatacacggatgatagagtgaaattccatggttagaagaacacatggtaattctcaagaacacgtcaccaagcatattttcgtcactggcggcgttgtctcctctctcggcaagggcctgaccgcatcttcgctcggtcgtttgctgcgcagccgcggtatccatgttctgcagcaaaagctcgatccgtacatcaacgtcgacccgggcaccatgaacccgttccagcatggtgaggtctacgtgaccgaagacggtgccgaaaccgatctcgacatcggccactacgagcgtttcctcgacgtcttcctgagccagaaggccaacgtcaccaccggtcagatctatcaggaagtgctgcgcaaggagcgcgccggcgaatacctcggccagtgcgtgcaggtcatcccgcacatcaccaacgaaatcaagtctcgtatgcgcgcccaggcttccgatgacgtggatgtgatcatcaccgaaatcggtggtaccgtcggcgacatcgagtcccagcccttccttgaggccgcccgcgaagtgcgtcgcgatctcggcccggacaactgcatgttcgtgcacgtttccctggtgccgtacatttccgccgcccacgagctcaagaccaagcccacccagcactccgtgatgatgctgcgtcaactcggcatctccccggacgccctcgtgttgcgttccgaccgcccgctcaaccagtccatcaaagacaagatctccctgatgtgcgacgtcgatgccgaaggtgtggtcaactgcgtggatgcgccgagcatctacgatgtaccgaagatcctgttcgaagagggccttgatgcttacgtggtgcgtgagctcggcctgccgttccacgatgtcgattgggatgaatgggcagacctgcttgagcgcgtccaccaccccaagcacgaggtcaacatcgccatcgtcggcaagtacatcgatctgccggacgcctacctgtctgtcaccgaggccatcaaggccggcggctttgccaactgggccaaggtcaacgtcaaatgggttgctgccgaccgttgcgaaaccactgaaggcgcggccgccgctctcgacaacgtcgacggcatcgtgatccccggcggctttggcattcgcggcatcgacggcaagatcggcgccctgaagttcgcccgtgaaaccaagctgcccgcccttggcctgtgccttggtctgcagtccatggtcatcgaatactcccgccacgtgctgggcattgaagacgcgaactcttccgagttcgagcccgattgcgccaacccggtgatcgccaccatggaagagcagaaggacatcgtggccggcaagggcgacatgggccacaccatgcgtcttggctcctacccggccgagctggaggaaggctcgctggtcgccgaactgtacggcaccacgcatgtcaccgagcgccaccgccaccgttacgaagtcaacgtggcctacaaggatcgtctgcgtgaaggcggcctgcgcatctccggccagagcccggacggcgagctcaccgagttcgtggaactgccgcaggacgtgcacccgttctatgtggccacccaggctcacccggagttcaagtctcgcccgaccaagccgcacccgctgttcgccggtctggtcaaggcggcgctcggccatcaggcggcccgctgaccgtggatcccgcgcggtcggtccgcgcacgatgaaggcgtgacggcacggcatctcaggatgcttcgccgccacgccttcgccgtttggcgccatccgtgatgccgcatggcccgatggcgcccgcatgtaatcaagcccacagccaatatgcgtcaggacagctagtgtttgcacttgggttctgctaggttttcataggattaagtgtgatacaaggaaggcaggatggtgaccgaaaacacagcaccaaacgccgccgctgacgtggagatgagccagtatgtggctgatcgtacccgcgtcaacgaggacaagatcaagaaggatgacgagatcatcagccagttcggcgactacaactatggttggcatgattctgatgccgccggcgaagccgcaaaacgaggcattgatgagaacgtcgtacgcgcgatcagcgccgacaaaggcgagccgcagtggatgctcgacatgcgtctgcgtggattcaaggcgttcctcgaaaagcccatgcccgattggggtgtggatctctccggcttcaacgccgacgacttcaagtactacgtcaagccgatcgagaagcaggcgaagtcgtgggaggagctgccggacgacatccgcaacacctacgatcgccttggcatcccggaggcggagaagaaccgcctcgtctccggcgtggctgcccagtacgagtccgaggtgatctacaactccattcgtgaggacctgaagaagcagggtgtgatcttcgtcgacacggacaccgctgtgcgcgaataccctgaactcgtcaagaagtacttcggcaccgtcgtgcccccggaggacaacaagttcggcgccctcaacaccgcggcatggtccggcggctcgttcgtatacgtgccgaagggcgtgcacgtggacatcccgttgcaggcatacttccgcatcaacaccccggccatgggtcagttcgaacgtacgctgatcatcgcggacgaaggctcctacgtgcactacgtggaaggctgcaccgccccgatctggtccgaggactcgctgcacgccgccatcgtcgagatcatcgtcgaaaagcacgcccgcgtgcgctacaccaccgtgcagaactggtcgaacaacgtctacaacctcgtcacccagcgtgcctacgtgcgtgagggtggcacgatggaatgggtcgacggcaacatcggttccaaggccaccatgaagtacccggcctgcatcctcgccgaaccgtacgccaaggcatccaccatgtccctcggcttcgccggcaagggccagtaccaggacacgggcgcgaagatgattcacctcgccccgcacaccagctccaccatcgtcgccaagtccatctcgcgcggcggcggccgctccgcctaccgcggtctggtcaaaatcgtcaagggcgcgtacggttcgtccaactcgaccgtgtgtgatgccctgctggtcgacgacttctcccgctccgatacctacccgcacgtcgatgttcgcgaagacgacgtttcgatggcccacgaagccaccgtttccaagatctccgaagaccagctcttctacctgatgagccgaggactcacggaggaagaggcgcgaggcatgatcgtgcgcggcttcgtcgaaccgatcagccgcgagctgccgatggaatacgcgcttgaactcaacagacttgtggaacttcagatggaaggatcggtgggctgattccgatgaccgacaacacaacacccgtcaaggaaatcaagattccggtcgccgaccccaacgacccgtacgcgattccggccgccatgccgtcctccgtggaccatgccgtgcgttcgttcaacgcaggcgactacccggagcccagccgcaagcaggacgaatggcgctacacgcctatcgagcgcatcaacgagttcttcaccgtgttcaagccttccggcgaaacgcagatcgaagtctccatgattgacggctcgccgttggccgaaggcgtgaagctcagccagatcaagctcggtgaaggcctgtccggcactgtgtccaagcccaacgaccgcgtctccgcagtcgaatgggaatccggccacaccgcaaccattctggaactgtccggtgagatcgcccagcccgtgctcgtcaaggtgcacggcgcgggggaggacctcgacgccttccatctggtgatcgccgccgccgacaaggctcatgcggacgtcgtcgtggaacacgacggtgacgcacgactggccgaaggcgtggaaatcaccaccggcaaggactcgcacgtctccaccacgttcgttcaggaatgggccaaaaccgccaagcatgtggccaaccaccgcatccacgtcggcgaaggcgcatccctgcgccactccgtcgtgaccttgggcggcgacatcgtccgcatccgcatggatcaggacttcggcggcgaacaaggcgacctcaacatgctcggcatctacttcgtggaccccggcgagcacatcgaacaccgcacgatggtggtacacaaccaccccgactgcaagtcccgcgtggtctacaagggcgcgcttgacggcaagggcgcgcactccacttgggtgggcaacgcgctcatccagcccaccgcccccggcaccgactcctacgagctcaaccgcaacctggtcctgaccccgggtgccatcgccgattccgagccgaacctcgaaatcgaaaacggcaacatcatcggtgccggtcacgcctcttcggtgggccgcttcgacgacgaggaactgttctacctcgaatcccgcggcatccccgaaaccgacgcccgcaagctcgttgtgcgcggcttcttcggcgaactcgtcgaggagatcggcattcccgccatctccgaacatctgatgaccgtgattgaccgccgactggcccgtggcgaaaacgacgccatggcacaggtcctcgaagacaagtaagaacagcatttttaggagcacaacaatgtcaacactcgaaatcaaggacctgcacgtccacgtcgaaaccaaggaaggcatcaagccgatcctgaagggtgccaccctgaccgtccactccggcgaaacccatgccatcatgggccccaacggttccggcaagtccactctcgcctacacgttggccggccaccccaagtacgtggtcgactccggcgaggccctcctcgacggcaaggacatcctcaagatgactccggacgagcgcgccaaggccggcctgttcctggccatgcaatacccggtcgaagtgccgggcgtgtccatgaccaacttcttgcgcaccgccaagaccgaaatcgacggcgaggctcccggtattcgccagtgggccaaggacctgtccgcagccatgaagcgcctcaagatggacccgaagttcgcctcccgttccgtgaacgaaggcttctccggcggtgaaaagaagcgcgccgaagtgctgcagctcgaactgctgaagccgaagttcgccatccttgacgaaaccgactccggcttggacgtggacgccctgcgcatcgtgtccgaaggcgtgaaccgtgccaaggaagccaaccagttcggcatcctcatggtcacgcactacacccgtatcttgaagtacatcaagccggacatcgtgcacgtgttcgccgacggccacttcgtcaagaccggcggccctgagctggccgacgaactcgaagagaacggctacgaccagtacctgcccgagggtgctgattccgagtccgcgctggcctgagtccgtgaccgtgggagtctgacatgccctattctcgacacgctccgggccactcaggccaagtctttacggtcgcgaacaggccatgtcagactcccactcgtttcgtacaattgttacgtaagtaggggaacataatggttgattttaaggagattcggggcgagttcccgattctgaatcaggagattcacgggcacccgctcgtgtacctggattctgcggccacctcgcagaagccgaatgcggtgatcgacgccgaggcgaacttctaccgtacgatcaacgccggcgtgcaccgcggtgcccacgagctggcggcccgtagtaccatggctttcgaagaggcccgtgccaaggtcgccaagctcgttggcgcgaatacggccgaaggtgaagaggaggtcgtcgtcaccggtggtgccacggccggactgaacctgctcgccaccgcgttcggcaatgcgtcgctgggccgtgggggagaagccgccaagcgttttgccctgaagccgggcgatgagatcgtcgtctcgcgcgcggaacatcattcggtgctgctgccgttccaggagctggcctaccgtaccggtgccaccttcaagtggatcgacctgaccgaggacggccgtgtgcgtacggacaacctcgacgaagtcatcaccgagcgtaccaaggtcgtggccgtcacccacgtgggcaacaccacgggtgccatcaccaacatcgcccctatcatcaagcgtgcgcatgaagtaggttcgatcttcatcttggacgcttgccagtccgtaccgcacctcaaagtcgatttccatgcgcttgatgtggacttcgctgcctggagcgcgcacaagatgtacggtcctaccggcgtcggtttcctgtacggtaagcgcgaactgctcgaagccctgccgccggccaacttcggcggctccatggtcgaactcgcctacatggaccacgaggcccaatacatggcccctccggcccgcttcgaggccggcacccagccggtcgcccaagtggtggccgcaggcgtcgccgccgaatggatgatgaacatcgggctcgagaacatcgaggcccatgagaagaccatcgccgccgaactgctgaagctcggcgacatcgatggcattcgcatcctcggaccgcgcgaaaacgtggaccgcatcggtaccgtggcgttcgacgtggccggcgtgcacccgcacgatgtgggccagttcatcgacgcccagggcatcgcgattcgcgtggggcaccactgcgcccagccggtgcaccgccacttcggcctatactcatccaaccgtgcctcctccggtgtctacaattcggtcgaagatgcccaagcattggtcgaagcggccaagggcatccgtaagttctttggagtggagtaaaacagaacaccatgaacgaattcggtatgagcggggatgacctcgaacagatgtaccaagaggtcatcctcgaggcgtcgaaacatccgcatggcaaggaatcctttgcgcccaacgcggcggtcgaacagtccgcggacgcggcggccaatgtcaccgtgcaagccagccacgaatactgcacgcccggtgaatcgcaccagttcaacccgacctgcggcgacgaggcgaccatccatgtcgaagtctccgatgacgaaccgcacaccatcaagcgattggtgtgggacggccacggctgctccatttcgcaggccagcctgtcggtgatggtcgatctggtggacggcaaaaccgtggacgaggccatggatctggaacagacattccacaagctgatggaatcgcgcggtgccggtctggacgacgagaacctggaagaaaagctcggcgacgccgtggtattccaaggcgtgtcgaaataccctatgcgcatcaaatgcgctctgctaggctgggaagggctgaaggattccatcgccaaagccctcgctgcaaagaactgaggaaatatgtccaacgataatttggttcccgaaccacagccgtccgttttcgatgccgtcaacggcgtcctgcaggacgaggaggccgctcgccgcgtgatggccaacccggccttggccaagggcttcccgaacggacgcccgatcgagcactctgctgcgtccggcgatgacacctgtgcgtgtggcggtcaccatggcaaatgcggttgccgggatgacgaacagtccgatggcagcgagattccgatcaaggcgattgacgatatcggccgcgccactgccgaagacgtgcgcgaggcactgcatcaggtgattgatccggagcttggcatcgacgtgatcgatttgggtctggtctacggcattgagatcgatgagctaggccgcgccattattacgatgacgctgaccacgccggcctgcccgctgaccgaccttatcgaggacgaatgcgcatccacgctggccggtctggtcgaggagttccgcatcgactggacgtgggacccgcgctggaccatggagcgcatcacgcccgaaggccgcgaccagctcgccgcccttggcttcaacttcgacaacatgccaaagtactgatagcgcttagtaagctccctctgatgagggagctctatacgagaaaagccccgcatgatgcggggcttttccaagtctggactggtcaatcagtcatcgacgatggtgttcttcgggacaaccgtaatgccgtccggcgtgacggtgaagccacgggccagatcgtgctcggtatcgatgccgacagtggagttttcggtcaggaccacgttcttgtcgagaatcgccttgtacacgcgggcgcggcggttgatgatcacaccgtcgaacagcacggaatcgacgatctgtgcccacgagtggatacgcacattgggggagagcacggagtggtgcacttcaccgccggagacgatcacaccgggggagacgatcgaatcggtggcgtggcccagacggtcgcggccggcgtgcacgaacttggccggcggcaggttgccggacatcgtgtaaatcggccaatcctggttgtacaggttgaactcgggcacataggcgatcagatccatgtgcgcatcgtagaactgcttaatcgtaccgacgtcgcgccagtaggcgtgatcagtgaccgtggaacccggaatctcgttcgagttgaagtcgtagacgccggcctcgttgcgggaagcgaagtacggggcgatgtcgccgcccatgtcatgcttggtgtcggcagccttctcatcgagagccagagcctcgaacagggccttggtgttggcaacgtagttacccatggaagccagaatctggttcggattgtccggcagaccggtggtggtggccggcttctcctggaagttcctgatcatgttcgggtgatcgggatcgacctcaattacaccgaactggttcgattcctcgatgggctggcggataccggccacggtgaactcggcgccggactcgatgtgctgctgtaccatctgctcgaagtccatgcggtagacgtgatcggcgcccacgatcaccacgatgtccggctggacgtcctcgatgatgttgatggtctggtagatggcgtcggcggagccgaggtaccagtgcttgccgagacgctgctgcgcgggcacaggggagacgtacgagccaagcagcggggagaaacgccagacctgggagatgtggcggtcaagcgagtgagacttgtactgggtgagcaccacgacctgacggtacccggagttcaccagattgctcaacgggaaatcgatcagacgatacacaccaccgaagggaacggcgggcttcgcgcgatcgcgggttaacggcatcaggcgggtcccctcaccacctgcaagcacaatcgacagaatcttgggattcttggccatcgtaactgtcctctctgttactgagcgtctttcgacaccgcactgctgggccggatgcttccttgcattcggtttacatagttaataattgcagaaaaattcgaacatgcaaggctttcgccccccgcgtgccgtgaacttgcgatgaacagtttcgtagatttgtttaaggatccggccttttcggagcgcgtgcgattccttagcgtgtcgcgtagaacgccactgcgctggatgccgccacgttcagactatccacgccgtggctcatcggaatcttcacggtcaaatcggcgcgggcaatcgtatggtgggacaggccgtcgccctcggtgccgaagatcagcgcgagcttgtcgatatgcgtcggatcttcggcaggcgcgtgcagacggcgtgtcagctcgtccaacgaaatcgaacgatcctccaatgccatggccacggtggtgaagcccagcgacttcaactcgtcgatgccctggaacggccagtaatgcttgttttcggtaccgtcgtcgttgaacccggtgatacgggtccacggaatctggaatacggtgcccatcgacacacgagcggctcgtcggtacagcggatcaccgcaggagggtgtggccagcacggcatccacatcgagcgcggccgccgaacgcatcagtgcgcccacattggtgtggtccacgatgttttccattactgccacgcggcgggcgctcctgcagacctcggctacggagggcagcggccagcgtcgcatcgcgcatagggcgccgcgatgcagacgatagccggtcagtcgcttgagctgctcaggtgaggccacgtagacgggaatatccgcgccccagcgcccgtcgatgaagtcgaaggtgtctttcatgccctccagccaaggttcctcgaccagcagtgacagcggttcgcggtcagcggccagcgcgcggtcgataaccttgggggactcggcgatgaacacgcccttggctggttccaagcgattgcgcaactgcatttcggtgaggctcacatacgcttcgacgcgcgggtcgtcaacggtgtccagcgtgatgaactgcattggtggcctttcgtgtgtgcagataacgaaaaaccccttgcaatgcaaggggtttatctgtgcccgagacgggacttgaacccgtacgcccgtataaaataggcactagcacctcaagctagcgcgtctaccattccgccacccgggcaggtgtcgtttggacaacgagtaaatagcttagcatgaaattacagggatgcaattcgcgcgtgtgcccggcgtgtcgcgtgtagccttgaagtcatgactgatgccctttttcttttcgacccgcaggtcgacgatgtcccggtgaacagcgacgaacttcacgccggctggaagctaaccctgcccgcgcacatcaagcgccatgctgtgcaggccatgcgactcaaggcgggggacagcctgcaactttccgacggcaacggcttgagaatccaggcagtgatggccgatcctgaagccggacttgctgaagttgtggaagtggggcgcgaacccgagccgctcacccgtttggcgctgattcaggcattggcgaaaaccggccatgatgagcaggccatcgatatggctacgcagattggcgtcgaccaagtggtgccatggcaggcggaccgatccattgccaagtggaaggtcggccgtacggacaagaagtggaattcggtactggatgccgccaccgagcagtcgcggcgcgcttttaagccgcaactggaggcgtgcgcgtccagcaaggaggtcgtggccatctgccgcagggcctgcgtgcatggcgatgtggtgattgtgctgcatcaggatgctaccgatacgtggtccggcgtggaggagaaggttacgcagttggtggaacgcacgctccaggacggccggccgcggactgtcagtgtggtggtcgggcctgagggcggcatcagtgagcaggaggtagctgatttcgtcaaggccggagcggtgagctgcgtactggggcacaatattctgagagccgcgacggccggtcctgtagcgttgtcgctgttgtctcgggtgttgggacgttacgagtaacgcccacgcgctaagctggtgcgtagcaacatcaaaccaaggagcatgatgagcgaatccgacgattgcctgttctgcaagatcatcgcagggcagattcccagcagcaaggtctacgaggacgagacgacctacgcattcaacgacatcaaccccaaggccaaggtccacgtgctcgtggtgcccaagaagcactacgccaacgtcgccgaacttgccgccgacgacccgaccgagctggcccacatcgtctccatcgcgcagaacatcgccgacaaggaatttcacggcgcctaccgactggtgttcaacaccggtctcgacgccggccagaccgtcttccacgtgcacgcgcacgtgatgaccggcgaaaagctcgacgagtagtaggggaatatccgcttcgtggcaacgactacacgtaccatcaccatcccgccccaacttgaccccgtcgccgtgctcggcccggttgacgaggtcattcgcgaggtggagcgcgcctttccggacctgacgattatcgtgcgcggcaaccgcgtggcgatcgtctcccgctccaagcagaccgaagcccaggccgcacaggccgaggatttggtcaacaccatcatccaagccgcctacaccgcgcctatggacgccgacaccgtgcgtcgcatgctcgaccagaacgtgctcaagaaccacgtgcgcctcgaacatcccggtcacggcccggtgcgtgacaaactggcgcaatcgacctcaaacgaacgcgcccatgcacgttctgccggctcccacgacccgacgtaccgcaagcccacggttcccggcgtcatcacctttgccgccggcgtgccggtccgtgcgaaaaccgccggacaagtggcctacgtgaacgccatcgaatcgcacaccatcaccttcggcattggtcccgcaggcaccggcaagacgtatctggccgtggccaaggctgtgcgtgccttccaggacaagcagattcgccgcatcatccttacgcgcccggccgtggaggccggcgaaagcctcggctttctgcccggcacgctgaacgacaaggttgacccgtatctgcgcccgctgtacgacgcgcttggcgacatgctcggcgccgaccagctcaagcggtacatggacgacggctccatcgaagtggcgccgctcgcctacatgcgcggtcgtacgctgaacgacgcgttcgtgatcctcgacgaggctcagaacaccaccgaacagcagatgaagatgttcctgacccgtctgggcttcaactccacgatggtcatcaccggcgatatctcgcaggtggacctgaccgtgccgcgctcgggactggccaccatcgaacgcatcctgggcggcatcgacgacatcgcattcgtgcatctcaaaaccgaggacgtggtacgtcaccagctggtcggccagatcgtggccgcctacgaccgtcactccgccatcgccggcgaccaccgcgacatcgaacgcaagggccgccgcaaccataccgacttcgatgcccgccagcaaacggattcaaccaaccaaagtgagacagacgatgagcgttgacgtcaccaatgaaacccagtgggtcatcgaccccaaggtcttctccgatttgggtatttgggtactcgaccagatgcgcgtgagcacccagtccgacctgaccatcatgttcgtggatcccgatcccatcgccgaattgcacatgcgttggatgaacctcgaaggcccgaccgacgtgatgagcttcccgatggacgagctgcgcccaggcgacggcaaaaccgtgatggaaggagtgctcggcgacatcgtcatctgcccgtgggtcgctgcccaacaggctgccgcagccgggcacagcaccatgcaggagatgctattgctcaccatccacggcatcctgcacctgctcggctacgaccacgtgacccccgagcaggagcgccagatgttcggcctgcagcgacagctgctgctcaccttcttcgccctgcgccacgatgccaacgtgcaggccacgctgcccgccggcacacccgacgcgctggccctgtacgacgccgcgcacggtgctggccgcgacctcgattccaaataaacttccaaatcaatcacaccaaattcggattattctataccgttcaaggacattcaaggacaccgaaaaaacattatggagtattccagtaccacgctgatcgccgtcaccgtcattctcgtacttgtggcgaccctgttcgtctggctttcgctgaccatggccgccgctgaaggcgccgtggcccgcgtaacgcgagccagcctcaacaatctcatcctcgaggtgcagaccgactccgaagcaagccagttcctcaagatgaagaagatcgacaagattcatcgcgtgcaacggctcatcgccgaccgttacgccaccgccggcagctgtgcgttcttccgcatcgcctgcaatgtgctcgacggcgtactggtgtcttccatcgcatccctgtggggtgcggaactgtgggttgaactgctcgccggattcctgttcgcgattatcgtagccgtggtctccgtactggtccgcccgcgcaccgccggcatgaccaagccggtcgacatcatgatttccaactcgcgcatcgtgtcgttggccaccaagctcacgccgttcgcacgcatcggtggcgacaagtccggttccaaggggtcgggccgtcgctccaaggactccgatctgtccgacgacgaggagcttgagaagattcagctcgagcagggcaaggccgccatcgaccgactggtggagtccaacgacttcgatccggaagtctccgaaatgttgcgcaacgtgctcaccctgtctgatacgttgactcgcgagatcatggtgccgcgcaccgatatgatctgcatggagcgcgactccacactgtcttccgcgctgaaactgttctcccgctccggtttctcccgcgtgccggtgatcggtgaggatgtggatgacctgatcggcgtggcctatttgaaggacgccgtgcgcgccaccgccttcaacccggcggccatggagcgcacggtcgaatccatcgtccggcagccgctgcttgttcccgaatccaagccggtggacgacctgttccatgagatgcagcgttcccgccaacatgtggccgtggtggtcgatgagtatggcggcatcgccggcatggtgactatcgaggatgccatcgaacagatcgtcggcgagctggaagacgagcacgaccgcacccagcgtaccgagccggagaaaatcggcgacaacaagtggaagatgcccgcccgtacgccgattgccgatctggaggagatcttcgagatcgacattgatgaggacgatgtcgataccgtgtacggcctgctgaccaagattctgggccgcgtgccgattgtcggtgcttcggccgtgacgcgcggtctgcgactgaccgccgtggactccgccggacgccgcaagaaggtgtccaccatcgtcgtcgaaccggcgcacgtcgagggcggcgaggaaaatagcaggacccatgaggaaactgacggcgagcccgtcgaaggcgatgataccgccagcaaggagtgatatgaccgaccagaacaacagcacgaacgacgtcgatgacattgacgtcaccgatgcttccgatgttgccggcgttgccgaagtcgacgcgaccggtgaaacggagaatgtgaccaagcaggacgtgccgtatcgctccggattcgtggccgtggtgggccgcccgaacgtcggcaaatccacgttgatcaacgcgttgatcggcaagcagatcgccatcgcatcctctcgcccggaaaccacccgtaaggcgattcgcggcatcctgaccgccgaccacgcgcagctcgtgctcgtggacacgcccggtatccaccgcccgcgtacgttgcttggccagcgtctgaacgacgtggtcgacgaatccttggccgatgtggacgtggtggccttcctgctgcccgccgaccaggaaatcggccccggcgacaagcgtattctttcccgactgcgtaccgacttcgccaccaagcgtgaggacggtacgttcaagtggcgcattccgctgattgccatcgtcaccaagatcgacgagcttggccgtcagcaactcatcaacaagctcatcgaaatcaacgatttcgccgatttctcggacatcgtgccggtgagcgccctgaagcacgacaatctgtctgaagtgaagaacgtgctcattgagcacacgcccgagggcccgcagatgtacccggacgatcagatcagcgaggagcgtccggaagacaccatcgccgaactcgtgcgcggtgcgttccttgagaccctggacgacgagctgccgcattcgctggccgtggtggtcgattccatcgactatccggaagacaacgagaccggtcggggctatgacggcaaggcgcaggtcaacgtgtccatttacgtggagcgtgactcacagaagccgatcatcatcggcaagggcgcctcgaacctcacctacgtcaagaagaagctgcgcaccccggtcaaccgcatcgtcggccaaaaagccaagctcgacctccacgtcaaggtagccaaaggctggcagtccgaccccaagcagctggagcgcctaggcttctaggaatcggccttcggccggttataacaaagggagattccaatggaatctcccttttgctgtactcgagtcctccttacttcttcttggtgtacatctgggtgttgaggagggtggagtagcgcttgatgaccttggggcgaatcaccttcatggaggcggtcatgaggccgttctcctgagtgaactcctcgggcaggatgatgaacttgcgtacggattcggcgcgggagactccctcgttggcccgatcgacccactgctgcacttcggcgcgcacggcggcgttccttgccgcgtcctcgagggacatgttctcgtcaagccccttggcggcgagccacgggcgcaacgacttctcgtccaacgtcaccagggcggagataaacgggcgtttgtcgcccagcaccaacgcctgggagacgatctcgcaacgctggatgacctcctcgatcgggccgggggagacgttcttgccgcctgcagtgatgatcagatccttcttgcgaccggtgatgtacaggaagccatcgttgtcgatacggcccaagtcgccggtggcataccagccatcttcggtgaacgacagctcagtggcctcgtcgttcttgtgatagcgcgggaacacggcacgacccttgacctgaatttcgccgtcctcggcgatgcgcagggagaatccggggaatgcgatgcccacggaaccagcgtggaacggcgtacccagcgggttgaacgcgcacggtgcggtggtctcggttagaccatagccctcgtatacaggcacacccgcgccacggaagaaagccagcagttcggggtcgagcggggcaccgccggccacaatccacttgacgcgaccgccgagcacttcgcgcagcgaagagtagacaatcggatcgaaggcagcgcggcgagtgcgggtcagtgcacctgccttgccattggcggagacttccttcatatagttctgcgcggccaccacggcggaggcgaacaccacgccctttggaccgtgtccggccttctgggacgcggcgttgtacaccttctccagcacgcgcggcaccacgatcatgagagtgggcttggccacctgcagatcgctgatcagcgtcttgatgccggtggcgatgtagatgcggacgttcgaggagacgacgatgtagttgatggcgcgggcgaaggaatgggcctgcggcaggaacagcaggatggtgttcctcttgtcgtgcagcagatcgggcatgtaggtcggcagattcagcgcggtctggcagtagtgttcatgggtcatttccacgcctttcggcgcggccgtggaaccggaggtgtacacgatggagcacaggtcggtcttcttgaccgaatcgatgcgctcgtccagctcctcgtccgagaccgtggtgccgtaggccttgatttcgtccaagccaccggtctcgatggtgatgatgtgctccagggacgggcactcttcgacggacccatccgccttcttacgcatgtccgtatcctgcacgatcagcaggcgggcatcggaattattgacgatattgcgaatctgttcggccgaatcggtgtcgtagatggtggccagcacaccgccgcaggccatgatcgccgcgtcggtcaggtcccagtcgtaggaagtgcggcacatgaatgccacggcatcgcccttcttcaggccgtaatgaatcaggcccttggccacggcacgcacatcagccaagaactcgttggcggtgacggtcacccaatcgttgccggacttgtaggtgtacagcggctca

SEQ ID NO: 997 - DNA, 8417 bp, Unknown
  R117_24m  MAG No. k141_28020
cctcatggggcggtatgccaaaatggcttaattccgcggtttcacatattcttcaaaccgccccatgggcaagttaccgcccgatgagcctgtaaccgccccatgggcacatcaataacgccctcaacctcacactgcgtcagggacgaacgcttcgaagatgtggcggtcgaagtagggcgcgcactgggcgagttcatcgctgctgcgcacggtccatgaaaccggcatcgcacccatcgaacgagcgagtttgacctgcggcgaagcgccaccggtccagtcataggccacgaaatcaggacgagacagccagtcgaacgccagtaagccggcggcccattcagccgcaccattcttgctcagcttcgccggccagctcagctgaccgcggcacacctcagggtgatgctccttgtaccaattcaccgcgcccgggtggaaggattcgatcacgtacgggccgtcatacgcctcaagcaaggcgtggcccttttccatgagctcttcgctacgctcatcccaagccttgttgtcgctgaacttgtattccacaatcagcggagcctggccggccaccacgtccagcacatcggagaacagcggcacatgctggtagtaccccttcggcgcggcggacggcgtgaccaccagcggcggattcgcgtcggcaccgggcagcggcttggccttcagatcgccgggcttgctgccggggaacagcgggatgcgggtgagctcgtcatatgtcaggtcttcgacgcggcgcgggtcgccggccacgcgcagcaaatcggcgtcatggaccacgaccacttgaccgtcgagcgtaagctgcacgtcgagttcgatgccatagccagcctcgcaggcggcggcgaatgcggccagcgagttttcaggagcgatcggaccggtcatatccacactgccgtagccggccttgacagccatgcgacgggcaagcgacacataatcatcgttttcggcgatggatcgctcagtggtatcggcttgggcgctgaccgaattatccccaccataatcagcgatatcggtatagccgaccaaaccagaacccgcatcgtgcaagccacgatgggcataccataccttcggaatggagggcacgaaattacgacgcttgtcattgaacgtgcgcggggccacggcccacacggcagcaccggcggcggccacgcctgccagcgccacgtttctccagagcttcgacgacattggaatccttcctgttgggctgcctctagcctaacgcttctgccagccattgtggagtggttggatcgtccagcttcagcgcgcggtccaggtggttggcacgcagcggctcccagctgaaatctgccagcagatcggcgggtttgcaagggattggagtgggttgcagacgcagcaaccaggcgcagtatccgatgatttgctcgggggttacgttgcgggcgcgcaaggctcccatatccagcgaacgttcgcgcttggctaaacgccgaccggccgcattgtcgatgagcggcaggtgcgcatactcggggtgctcggcgagaggcttttccgtgttgccgcattccggctcaaagccgccagccaacagacactggcgaatccacatttgcagcgcggtggagcgcagcagatcacggccgcgcacgatatcatcaacatccatatcgaggtcatccacgaccacgaccagttgatagccgaacagtccatcggctcggcgaatcacggaatcgcctacctcgcgggccaaatcgtagtgctgtggactatagacacggtcgttaaagcatgcgacaccatcaacgattccggcatcgccctgctgttccggcggcacggctcccgacagcgcagcggaatcgtcaggcactgtacgttgcttttctcccgctgccggtttcggcatggcgatacggatggaatgctggtcgccgcgagacagacgggcacggacctcgtcgggatggtcgtgcagcaggcggcggcacgtgccggggtacaccatgaagccgtcgccctcgttgggggccgaggcggcgcgaatgtcggcacgcgagcagaaacaggggtacagcacaccttgcgagcgcaggcattcgagagcgtattcgtagcgctcagtgcgctgggattggaacatcggttcgccatcccagtcgaggccgagccaatgcaggtcgtccatcatgagctggtccgcaccggcaaccacgcgcggcttgtccacgtcttcgatacgcatcagcatgcggtcgccacgcgaacgggccgaaagccatgcacccaacatggcgtacacgttgccgatatgcatgcgccccgacggcgtcggcgccaatcgtccggtcactggctctcccttcgtccgttaacactcactttcctaccatatgcgacagtgaacaccttgatgccacggttcttccactcttggggaacacaattgagacggatcggacagatacttccgtttcaaggggctgatttcgatgttgcaggaggtctacttccatttcaaggggctggtagccaagtagacacggcgcaacaatggcggaatggcgttgccataaagccgctgatactcgcggttcggcagaagagcagcccctcgaaacggaagtagacctccgaaagggggcaaatcagcccctcgaaatcgagatagacccacaaagacgaaaaagtgggtatgactgctaccatacccacctgtttaagagattttgcagagaaaaatcactgttgcgaaaccgcccgaactcccctcagtcagcttcgctgacagctcccctcagagaggggagccagtgattgtcacttatcttcggtgacgttgtccacgctcacatccggatcgtcggagacgatttggtcgctcgcccaggcggagagctccagatgttcgccgccggtctggtcgacgagcacggtgtcgccgtcgtggaccttgccggccagcagcatgcgggccagctggtcgcccacttcggtctgcaccagcctgcgcagcggacgagcgccataagccgggtcgtaaccggtgttggccagccattcgcgagccgagtcggtgacgtccagcgtgatgcggcgatcggtcagacgctgggccacgccagccacctggatatccacgatgccgccaagctcctcacgcgtgagcgggtggaacatgacgatgtcgtccagacggttcaggaactccggcttgaagttcatgtggacggcgtccatcacggccttcttcttggcgtcggcgtccatgtcctcgttcacgaggaactgcgagccgaggttggaggtcatgatcaggatcgtgttcttgaagtccacggtcctgccctggccatcggtcaggcggccatcgtcgagcacctgcagcagcacgtcgaagatctccggattggccttctcgacctcgtcgaacagcaccacggaatacgggcggcggcgcacggcctcggtcagctggccgccctgctcgtagcccacgtagcccggagccgcaccgatcaggcgcgagactgaagccttctccatgtattcggacatgtcgatgcggaccatggccttctcgtcgtcgaacaggaagtcggcgagcgccttggccagttcggtcttgcccacaccggtgggaccgaggaacaggaacgatccggtcggacggttcgggtcggagatgccggcacgcgaacggcgcaccgcgtcggacacggcggcgatggcttccttctggccgatcacacgcttgcccaggtagtcctccatatgcagcagcttctcgttctcgccctgcatcaggcggccaacgggaatgccggtccagtcggagacgatctcggccaccgagtcggcgtccacacggtccgggaccatcggctcatcggccgggttggccgcgccggcatcggcagattcggcatccgcgctttccgcggcggcgagttccttctgaatagccggaatctctccgtacagaatcttcgaggcctcagccagatttccctcacgggtgaacttgtccgcctgcacacgcaggtcatcgagcttggcacgcaggtcaccgaccttgttgtggccggcctgctccgcatcccaacgcgccttgaggccgctgagcttctcacgggtgtccgcgagttcggcttgcagcttgcccagacgctccttggatgcaggatcctcagccttcttgagctgcatttcctccatttcaagacgggtcaccttgcgctgcagttcatcgatctcctcaggcgaggagtcgagctccatacgcaggtgggcagccgcctcatcgaccaggtcgatggccttgtccggcagctgacggcccggaatataacggttcgagagggtcgcggcggcaaccagcgcgtcatcgccgattgtcaccttgtggtgcgcctcgtaacgctgcttcaggccacgcaggatggcgatggtgtcttccacgctcggctcgcccacgaacacctgttggaaacggcgttccaatgccggatccttttcgatgttctcgcggtactcgtccagcgtggtcgcgccgatcaggcgcagctcgccacgggccagcataggcttcagcatattgccggcgtccatcgagccttcggccgcgcccgcgccgacgatggtgtggatctcgtcgatgaaggtgatgatctggccgtccgcgttcttgatttcgttgaggacgctcttcaggcgctcctcgaactcgccacggtacttcgagccggccaccatggagcctaggtcaagggagatgagcttcttgccttgcagggtggtgggcacgtcgcccgccacgatacgctgggccaggccttccacgacggcggtcttgccgacgccgggctcgccgatcagcaccgggttgttcttggtacgacgggagaggatctgaatcacgcggcggatttcctgatcacggccgatcaccggatcgagcttgccttccttggcggcggccgtcaggtcggtggagtacttctccagggccttgtacgagccttccgcgtccgggctggtgaccttcgcgccgccacgcacgccgggtacggccttgcgcagggaggctgcggtgacgccgttcttctccaggatttcggccgactggttcggcttgctggccgcgatgccgataagcaggtgctcggtggagacgtattcgtcgcccatctgctgcatttccttctcagcctgggcgatggcggcggtcagctggcggctggcttgcggctgcgaagtgctggagccggatgcgctcggcagtgcgaccaaagcgttacgcacggcggcgccgatggcctgtgggtctccgcccgcggcctcgatgagggagcgcaccacgccgttttcctgacgcagcaacgcatccatgacgtgcagggtctcgacctgcgcgtttcctgcggcggacgcactctgaatcgcgtcgccgacggcctcctgggccatagtggtgaacttctgttccatatcgtattcctccatgtcatgcgttccgcgcggagcggctcgcgggcttcgaaagccccgcaagcgccaccgcagaccgcaacttgtcgttgtctgatatggtcaaccgacctggaacccattctattcccaaaacttgagtgcaggtgactcaagttttggattttggtggggagggtgaacagtagccccctctgatgagggagctcacatctatttcaggaggccgacggcagcttcggcggcggataggatttcgccggagaggatggcgttggctacgccttcgatttgcggggtggtccaggtatcgcgtacgtcggggccgatttcgttggcgtactggcgcaccacgcggtatacggcggcgcccgccgcacccggacggtacggcttgcggaagtcgaaggagcggcaggagcacagcagttccacggccagcacgcgcgcaaaggccggaatcgaccggcgtagcttgcgggcggcggcccagcccatcgacacgtgatcttcctgcatggcggagctcggaatcgaatcgaccgaggcgggcacggcgttgcgcttcatttcggagacgatgccggcggcggtgtactgggcgatcatgaaaccggagtccacgcccgggtcaccagccaggaacgccggcaggccgcggttgcgcgccacgtcaaggaagcggtcggtacgacgctcggagatagaggctacgtcggcagtcggaatcgccaggaaatcgagcacataggccagcggcgcgccatggaagttgccgttggactccacacggccgtccagcgtgacgcacgggttgtcgatggcggaggcgagttccacgcccgccacggaggccgcgtattccacggtgtcgcgggcggcgccgtgcacctgcggggtgcagcgcagcgagtaggcgtcctgcacacgcacggtggagcccgggcggccggcctcgatcagaccggagcccttgagcatgcggacgatgttcgcggcggaatcgccttggccgcgatgcggacgcagcgcctgcaagtcggcggcgaacacgcggtcgttgccgagcatgccttccacgctcatcgcggcggcgatgtccgccgtcttgagtagcaggcgcagatcggtgatggccatacacaacatgccgagcatgccgtcggtgccgttgaccagcgccaagccttccttctctttcaaatcgacgggcgtgatgccggccgcacgcagcgcttcgccgccgccgatcttgcggccgtcagcgttgcgggcctcgccttcgcccatcgccaccaaagcgcaggcggcgagcggcgccaaatcaccggagcatccgagcgaaccgtattcgtagaccaccggggtgatgccggcgttcagcatatcggcgtagacctgcgcggtttctgggcgcacaccggtgcgtccggtgcacagggtgctcaggcgcagcaccagcaggccgcgcaccacctcacgctccacttccggtccggcaccggcggcatgcgagcggatcagacttttctgcagctgcgcgcgctgttccttggggatggaagtggaggcgagcgcgccgaatccggtggagataccgtaatgcggcacggtgtcgtcggccaaatgatcgataaccgcgcgacttagcgccatctcatgcttcgattcgtccgaaatcgccactttggcaccgccgcgcgctacggcgataacgtcctcgatgctcaatgccccaacgcctacggtgaccgtctgctctgccatgttttcctacctctctatcgtgccgagctccacttggtattggatatattcatctcgccagcatggcatatcaacgttacgggactgtccacaatatgcaccgccccgcgccagcgccgcgcgaacgctcctatactcacggctggtttgttatgcgcctgaccgccgccggtgctgcggcgggtgcttgtgggataagagaagaacatgatttttcaggccggttcgctgctgctcgttatcatcggtgtctacatactcaaacatgtccacattttcggcgagcgtgattacaaaatcgtgcagggtctggtattcaatctgacgcttccttgtgcgattatcctgtcgttcgccacgaacaagcacgacatgcgcatgctgtggatcgtgttgttcggcttcttcgcctgcgcgattccgctgttcatcgtgtatttcggttctcgcggcgacgagaagaactaccgcgccttccagatgctcaacgcctcgggcctgaacctgggcgcgttctgcctgcctgtggttcagacgttcatgggcccgtccgccggtctgccgatcatcatgctcgatatcggcaacgccaccgtggccacggccgggtcactgaccatcacacgcacgctgctgcatatggatgacaatttcaagtcgctaccgctcatcctgcgtctgcgcaatattgccagggacttcctaagctcgatttccttcgacatctacatgctgatgctggtgttcatgttcctgcacatcacgatcccacagcccatcgttacgctcatcaccccgttcgccaatgcgaacgccttctgcgcgatggccatgatcggactgatgatggagattccgaacaatcgcaaggacaaggtggagttgggcaaggtgattgtctggcgcatggtattcggcgcgattatcgccgtggccgcctggttcctactgccattcgacatgaggattcgcgagatcatcgtgttgggctcgttcgcccctatcacgatcttctcaaccaagttcaccgattcgctaaccggcaacgccaagctcgccggcttctcgctgacagtgacggccatcatcagcttggtggtgatgaccgccctgcacgcacttctgccgggagcgtaagg

SEQ ID NO: 998 - DNA, 7270 bp, Unknown
  R117_24m  MAG No. k141_28728
cggcacatgaatgccacggcatcgcccttcttcaggccgtaatgaatcaggcccttggccacggcacgcacatcagccaagaactcgttggcggtgacggtcacccaatcgttgccggacttgtaggtgtacagcggctcatcgcccatacgttcggcgcggtccgcatacaggtcgtagatggacgtaccttcgtccagcggcggattgccttcggtggaggtggtgagcaggccggtggcggggtcgatgtcggtgacggtcaggtggccgtcgtcccaatcgtcgctgtgaggcaaagcgatattggtctcgaccggcacgtcggcgttagacaggtaatcgggctcgtctggagtgtcgtcgtggaccgggtggacgaagtcggatcccaacctgagcgccttacgggtgagattgatagtgtgctgcgtgaaggaattgataaccgacaagtcttgctcctgtaaacctttcagtgtcgtccagccatgaggcgaacgcttctcaaagttcaaattgtaatcgcccaaaccgaactcgtcaccttacgcaaccgtaggattctggcgggttaggggagtgcgtggcaaaatattgcacaggtcccgatattgttgagtaaccgtgagctacgaaacggtgattgtcgatagttattgagcggttggttgctgatcgatgccaggtgattgttggacgacttccgagcaattcatccgcaatgcacatggacacattcgtatttctcactaatttcgggttcgtttctgtttcgattggcggaatctcaagtcatggtctttaccttccgactacactttctatgcggataaccatgtccattttgaagtagaacaagaaagggctctcatggcgcaaaacccagaagccaccgtggtgttcggcgttttgaacgaaacgtccgaaacggaatcccgcgtcgcgctgacgccggatatcgtcacccggctgaagaggagcggagtctcctcgattattgaggccggtgccggcattgccgccgaatacaccgatgaggattacgaaaaggccggtgcgaaggtgaccagccgtgacgaggtgctcgccgaagccgacgcgctcggttttgtggaccgaccgtccgccgagaccgtggccaagctcagggccggccagtgggtcattggcatgctcggttccttcaccgatgccgattacgtggccgcgctcgagaaggccggtctggtgggcatcgccatcgaaaagctgccccgtaagctttccagcgcccagtccatggatgagatgacctctcagaactccgtgatgggctacaaggcagccatcaccgccgccgatgcttacggttccttcctgccgatgatgaccaccgccgccggcacgattcgcccggctaaggcgctggtgctcggtgccggcatcgccggcctgcaggccattggcacgctgaagcgtctaggcgcggtcgtcaccgcgtacgacgtgcgtcccgcctcccagggcgaggtcgagtccctcggcgcgaagttccttgatctgggacttgacttctccaagggccagggcgagggcggttatgcccgcgcgttgagcgccgaagagcaggctcagcagcaggctgccgtcgatgagaaggccgccggctttgacatcatcatcaccaccgccaaggtcccgggccgtaagcccccggtgctgctcaccgcagccggcgtcaagggtctcaagcgtggtgccgtgatcgtggactgcgcagcatccgacctcggcggcaacgtcgagggttccgccgtcggcgagcaggtcaccgagggcggtgtcaagctgattggcgctccctacctggcctccggcgtcgccaccaccgcatccaacctgctttcgcgcaatgtggccgacatcctcgtgcacttcgtgcgtgacggcaagctcggccaggatctcaccgaagaacttgatgacgcgctggtggttgccggccgcgccgccgccccggcagctgctgccgatgccgagaagtccgagaagtaaggaagaaggaataccatgcctactctcgtcgtttccattaccctgttcgtccttgcgctgctcatcggcatcgaggtcatcggcaaggtgcccgccaccctgcacacgccgcttatgtccggcgcgaactccatccacggcatcgtcatcgtcggcgttgtgatcgtggcagccgaagccaatagcccactggcctacgtgttcatcttcctggccgccgtgctgggcaccatgaacgtcgttggtggctacgtggtcaccgaccgcatgcttgagatgttcaagtccagcaagaacgagaagaagggggagtcgaagtaatgacctccgcaaccgttggcgccatcgacatcgtcgcatggttcgtctacctgttctccgccgtcctgttcgtggtcggcctgcacttcatgaactctccgaagaccgcccgcaagggtaaccagatctccgcgttcggcatggtcgtggccgtgctcatggcgttcatcgtgcttttcgccaagggcttcgtgaacattgtcgccgtggtggtgctggtcgtcggcatcctgatcggtgccgtggccggtgtcgtctccgccaagaaggtgaagatgaccgacatgccgcagctggtttccgtgttcaacaccgtgggtggtggcgctgccgcactcgtggccctgaacgacatcctgaccaaggaaggcaccccggacatcgtggtgctcatcaccgctggtctcggtattctcattggttctgtgaccttcaccggctcgctcatcgccgccggcaagctgcagggcatcaagtgggtcaagaagctgaacctgccgggcaagggcgtatggaacattctgttcgccgtgctgtccgtcgcctcgctggtcatgctgtgcgtccagcccgaacagcgtctgctgtggtcgattctgaccaccgtgttcgccctgtgctacggcttggtcttcgtgattccaatcggcggcgccgatatgcccgtcgtcatctctgtgctcaacgcctgcaccggtacggctgtggctatgtccggtctggcgattgacaacgttgccctgatcgtggccggcgcactcgtcggttccgcaggtgtgaccctgtccatcctcatggctcaggccatgaaccgtccgctgctctccgtcttggccggtggcttcggcggtggtgctgacgccgccgctgctggcgacggtctggaaggcaccatgaaggagaccacgccggacgatctggccgttcagctcgtctacgcgcagaaggtcatcttcgtgcccggcttcggtctggctcaggctcaggcccagcgcgagctcgctgaccttggcgaactgctcaagggccatggcgtggaagtctcctacgccattcacccggtcgcaggccgtatgcctggtcacatgaacgtgctgctggccgaggccaacgtgccctacgaggagctcgtggatctcgatgagatcaacccgcagttcccgcaggccaacgtggctctggtcgtcggcgccaacgatgtgaccaacccggctgctcgccgtcctggcaccccggtttccggtatgccgattctcgacgtcgacaagtcccagaacgtcgtggtcatgaagcgtggccgcggcatgggctacgccggtatccagaacgaactctacttcgaggacaacacccagatgctgttcggtgacgcgaagaagagtctgcagtccgtcatcgccgccgtcaaggaactgctcgcgtaaccattcttggctcccctcacagaggggagccaagcttctatatctactgcagcccaaacacccgcttaacaaagccgttaacgcgacgccaatagtggtccggatcggtgctggcgctcatcgtgtggtcggcgccgggaatcagcagcttctcgcggtcgatgctggcgcaggcgttgtaattgatgtccagatacttcgggttgacaaaagtatccgctccgccatgaatgaacatcatcggaatagtcgcgtgccgtaatgccttcacacaggaggcgtcctcaaaccggtatccagccttgcgtttagacacatgactggccactttgaccagcagcacggccaacgagtgcggcaaacggaacatcgcctcggcattatccgtaaactgcgagaccacggaactgtatccgcaatcggaaatcgcggcgacgacgttgcgggggagtcgcgcatcgccggccgccatcatcaccgtggcggcgcccatcgaattgccatgcaacagaatgcgtgcatccggatcagctgcggtgatcagcgaaacccagcccaacagatcgtcgctttccagcaatcccatacccacgtaacgcccttcgctcaattcatgggcgcgctgcgcgggtagcaggaccgtaaaaccgagttgcgcatagcgatgcgcccatttggccatttccgcgggctctccggtatagccatggcagcagatcgcgtatagatgcggctgtgggtcggaacaatccgggtccaacagccagccgtggagtttcaatccatcatggctgcgcagcgtgaccgattgcttggcctcctcgaaccaccggccggcctcaagctgctcggacatgtcgaattcgatgcctttcggcgtctcctcgtgcggcatgttgaacatcgaacgtttggccttggtgtccagcgcgaacatgaacatgacgttggcggccgcggctgtgacgccggctcctgtggcggctatcgcggcaagtgccgcagccatgcccctgacaacgcgagtgtgtgcggcgatgacgtcatggccatcctcattgatgacgtcgtccgaacgagtcatatcaacctcccgatatggtactcaccatcgtacgttattatcgaaatcatccccaacttcgtgaaagaccgtacactgagtgtcgctgagcgtacgtttttcacgaaatggcgaacgatttcgtgaaaaccgtatgatgagaacgggtaagcgtacgttcttcacaaagttagggattatttcgcggaaaccgtacgttgacgtagctgggacggcctatatgcagtgtcatcgaagcatcattacgcaaagtccggggttggcgtatacttgacaattgttgctttggcgagggaagtgtgcatgctgacacatgacacagattccgttatcgactcggcgtatttcactccttgtagggtgtctttcggcgcgtcgtggcgtctgagcgagacagtacgaaacgaagatacaaggagtatccattatggctaccaccattaagcttgagggcgaggcccgttccgagttcggcaagggcgttgctcgtcgtctgcgcgttgccaacaagattccggccaccatctacgccggcggcgaagagcccgccttcgtgaccttgccgatgcgcgagaccaccctggccctgcgtcacaccaacgccctgttcaccatcgccttcgacggcaacaccaagatggccgtcgtcaaggacgtgcagaagaacccggtcaagcgcatcatcgagcacatcgacttcctcgaggtcaaggccggcgagaagatcgacgtcgaggtgccggtgttcgtggaaggcaccccgaagggtgctgccgtggcgttcgtcgacattcaggagctcaaggtccgcgccgacgtcaccaacctgcccgagaagatcgtggtcagcgtcgaaggcctgaccgacggcaccaaggtgttcgccaaggatgtcgtcctgcctgagggcgtcgagctggacgtcgaggatccggaagagtccgtcgtcaccgtcgaggtgccggaggatgccaccgagtccaccaccgctccggaagctgctgccgccccggctgacgccgccgctgctccggctgccgacgccaagtgagtcggtcgcttcgatagcgaacaattcagaacataactgaaacgtggaagcccgcagccgttgagaacggtgtgggcttcttcgttttttcaccatgtgaactctgccacacgagtaacacatgggtgtgcaaaagtatgcaacagagttcgcgccacaagcgcacagcacacaccccatatggtggctttcgggccgccaaagtcaagaagaagtagctagtgatgactgaaaacacgcaccacgatccggcagcactcgacaagctcaccgaaccgttcaccgtactgccgaacgacaaccccgcatccgatgagaagcgccagtccctcatcgacaagccggctttcggccaggtgttctccgacaacatgacccacatgacttggaccaagggcgaaggctggtccgaccgccgcgtcgaaccgtacgcaccgctcaagatggacccgggtgcttccgtgctgcactacgcacaggagtgcttcgagggcctcaaggcttaccgtcatgccgacggctccacctggctgttccgcccggatgcgaacgccgagcgtttccagaactccgccaagcgtctgtacctgcctgagctgccgattgacgacttcctcggttccgtggccgcgctggtcaagcgcgacgccaactgggtgccgtcccgccgcgagtacacgctgtacatgcgtccgttcatgttcgcttccgagccgttcctcggcgtgcgcgccccgcaggaggtcgactactgcgtgatcgcctctccgtccggcccgtacttcccgggcggcgtcaagccggtgagcatctgggttgaagacaagtggttccgcaccggccctggcggcactggtttcgccaagtgcggcggcaactacgccgcctccctgctcggcgagtacaagggtgttgagaatggctgcgagcaggtgtgctttgtggacgccgccaccaagacctaccttgaagagctcggtggcatgaacatgatggccgtgcacaaggatggccacgtggagaccccgtccctgaccggcaacattctgccgggcgtgacccgtcgctctctgattcagctgctgcaggacaagggccacgacgtggtcgagaccatgatcgccctcgaccagctgctcgaggacatcaagtccggtgaagtcaccgaggtgttcgcttgcggtaccgccgccatcatcaccccgatcggtcgcttcaagtccgagaagttcgacgtcaccgtcgccgacggcggctccggcaagctcacctgcgaactgcgcgacgagctgctcggcatccagctcggcgaagtcgaggacccgcacaactggatgtggaaggtgtgctgaa

SEQ ID NO: 999 - DNA, 4351 bp, Unknown
  R117_24m  MAG No. k141_29577
ccgtccataacgcgtcaccatcaagctggagtatcgaatcgcgcaagcagtgcatccagcagttgtaccgtgtcttgcggattctccacacgaacaccgatcgcaccggcctcaaccgcaggatagtcattacccgtaggcgtcatgcgatcgcccacgaacaccatttcatcggcctgtatgccaagtgtctgcgtcagcttgcgcacggcataggccttatcgatgccgcattcgctgacatccacactggtgtagccgccggccctgacccgcatgtgcggcagatcggccttgaccgcttcgaccagcgcctgtttcttcgtgttatcgcgatcccatgcctgtttagccgctacgggtgcgaactgtcccagagcggagaaggtgatctggctgcccctgttctcgattcgaggcccccatacctgctgttcccacaatcccagttcccgggcatgtcgctcaagactttccgagacagcggccacggtggcttcggacagatcatgcgcatacaccaaggcccattgcgtgccatcccaccggtaataccgggagccggaggcaggcatgacatgcagattgccgcgcctggcattcggggtgagtacatccagcacctgtgaggtgaccaccgccatgccgccccctgagatcagggccaccaccgtatggtcgagcagcgcacagaaccgttcgatcatcgcgggcctcatcggctgttttgagctggccagcgtgttgtccaaatcgaaaccgaacaccttggcgttggagcagacattatcgaaatcaagttcggaccacgaacgtaccaccatttgtcgcgcctccctcgttgacgaatgttcacagccaatgaaccaatcctaacgcatgttgcctccgccatgtcctatggtgggaaccatgcttcagccaccttggaacgcacgaatctaccgcaaccgccacggtcgcggcacacgaaccccgatgttcggcacccgtctgccccgttaccgcactcgcaccggcatgttcgacgatatggtggcggcccaggttcgcaggctcggccaagcgtggccggaactgatacgtccgctccagttcgcggtggaggatgtgccgccttcggatccgacgccttggcagaccgagccgaatatgacgtcccagtgcttccccgccagccacggcattcccgcacgagtcgtgctctaccgtatgccgttgcagaccgaggcacctaccaagctcgaattgcagttggccgtcagggatgagctggtggcccgcatagcggaattgtatgggcgcaggcccgaggaaatcgaccccgattggggcctgtgacagtattgcgggggccgtgccacttcaagtaagacagtggcacggcccccgcagctatatcggcgccgaaacatcatcagaccgatgcttcggcgagcgcgctctacttgacgatggaggaatcgttccgagcccagacatggaccgtggcgggcatcagcgttgaagcgtcgatggcggacaatccggcgatgtccttgtcttgcaacgaatcgtgactgaaacgcgctccccagctcactttcttggatgagtcctccaacatcagcacgaccgcggtgccatgatcgccggaaagtttgccggtctcaatcgtttgcgccgcgttcgcatccagcgtgatttcctcggaggtcaccgaagcaccggcatcatcgtaggcgtgcaaggtgaccgtcctgcgcgcattggatgtattggccagcgtgatggaggcctttactccgtcgggaagggccaaccccgagaattcggatggctcgccggcattgaccaatgcgaaatcggcttggccggagtcaccggagcgtgtggccttgacggagaacgacacggcatcctctgcggtggacatcacgcccaacgccccatcaggagcctctcccaagtcgatcgccgtcaccttatcggcagtgacggtggcatctttggcgggaaccaatcctttgtcggtaatccatgacagcccggtgctggtgtctgccttggcgaacagataagcggtgaccgcatcgccggcagtgatggacggcgccaccgacgcattggaggcggtcggcagcggcagcgcgaaatcagaacccttcggtgtcagaccatccatggtcaccgtacgtaccacggacgcgataggagtctccttgctggaaacggtcacgaacagaccatgctgcccatcgaccgcggcggacagttccatcgaggactccccctcggccggcacagacagcgtggattgtgtggacaatgccattttcccggctgtctcggaaccccagacggcaatgtcgacggtggtcggcttggtggagggattcgagacgatgagctgctgtgtggtaccggtcgtgccgccggagagcaggaacgactggctgagcgaggtcgatacgcaggatgccgccgatacgcctctcacatcgccgtcatcggcccatgatgcgatggtgccgacggtgccggtgccagctgcggcctgcaacatacgggtattgatcaggcgagctccctgatcgatcttctgagcaccggttttcaccgaggaatcgtcggtcggatcggcgtctttcaaagtcacgtcatctgaactggacttttgcccgatcgccgagacagtggcgctgtagacggagccgaacgccgcatagcgcgcctgtgtgctcagattgccgacagtggcctggaaggcgctgtcgccgtacgtgccggtatcggccaatcctataggtgccgggcagtaggtttcggactgggtcggactaactgtctggtcgatggcattatcggaagcggccaccttgtccacccagatattggggatgggggccatgacgagaacgacgaacagcgcaatcaacaccagcatggtgatcacaccgagcacgatgccgatcgcacgtttgaaaccagaagttgtgttgctcatgcctgctcctccaatccgtaggacggtcgtctgcgaggcatggcgaccaagcagtacaacgccgtgatcacacctaggcatatcagccagacgtgtctccagacactatgctgtgcacgttgctgccatgaggtatccacctgctgtgaggtgctgctacgcagcgtcagacgatagtagctgccgctatccgtggagaccagggactgggtgccgttcgatgcggcgatattcgcgctcaactgttcatacggcatgtcgttcgaggaatcgccggtctcgggaaccacgtagatgccgccgaatccaagcgcgctgatggccgcgatggcctcttcgtcgggattggacagcagcgaggcacaggcctgggccagttgttcgtcaaccgcatcatgcttgccggacagcaggcgcgcccgctggaccggggaactgtcgatcagatcgccgcgcggggtgcgcatcaccgcatagttgacgatgttgcgggtctccgcactcacggcaagcacacgatgatcggcactggcttccagataatcggtggtgaccatgggcaggccgttttcggacacgcccagtcccgcatccttatgacgttcgatgccatacatgcattggatgccgatgcagcacaccagtatcagagcaagcaccacacggccagacacgatgagcgcatgcagacggtcccttttcggtgcgggatcgctgccggacgcatgcaacggttggaatcgcttcaccgccccaccggcgacgagacacacgcaggcaaggaagcccaatatcatcatcgcgatgccaggctgcgcggaaccggccacgacaccatcggcatccacggctatggccacacggctggaaatcagggcgagcgcgcctccgcagacgattaccacccacatcagccgcgaggtccgcaacgcgaacggcagcaccagcgaagcaagagcaagcagcgtgatgacgccgaacagcacagtgaccgccaaatcggcataatcggtcgaccccattcgccatcccagcgcacgctgtacggcctcaagcagactcagcgacgccggcgacccgttggcggatgacgttggcaccgtgatgtcgccgaacagttgacgccacatgcccaaaccggcgtaacgcaccgcattgacgagcgtaggagccaccgcaaaggcggcaggaaccggaataagcaacagcatggcgcgcttgcgacgcacgaacagcaggaacatcaggaacacgacgatcagcgcgaacagcagctgcggttcggcggccaccacagggatgaagcacagtgcggcgatggccgcggcctgaacggatgtgcgcggcttgagcgggtcttcggta

SEQ ID NO: 1000 - DNA, 7740 bp, Unknown
  R117_24m  MAG No. k141_30119
cgtgtccgtgatcgacaagcccgagccgccactgctctcccccgtagccggggaaccgcaggacagcgcggtcagcctcacatggacgcccggtgccgccaatggcagcccgatcaccaactacaaggtcagttggaccggtgccgccaccggagagaaggattgcggtgccgtcacctcatgccaggtcactggtctgaagaacggcaaaacctattccttcaccgtcgccgcgcgaaatgacgtcggctggtccaagccgtccaccgccgtcgaagccacaccggacaaggtgccgtccgctcccaccgatgttacggtcacaggtggcaataaaaccgccaaggtgacatggaaggcaccgagcggtgatttcagcgccgtcgacaactattcggtgaccgtcaccggtgcaggtgctccgcagaccaaggaaaccggcaatacggccaccgagctgtcgtttacgttcaacaacaacgacatttccgatggcaccgccattacggcgaccgtcaaagcccataacaaaatcaattggagtgccgagtccgccgcatcgccgtcagagaagatctggggagacccggatgcgccgaacattgcgttgtcgaacaacgacaccacagtaacggcgaaagtcactctcggcaacaaccgcaatgccggctgccggaagatatcctttggtggcgacgctggcggcgaagcctcttgcgagtcaccgagctcccagtcgttctccatcgatgagtcgttgctcaacaccacaacaatcaccgtaacggccaccgtggtgccgcagcgcgatgcttccgccggcacgggcaagagcagctttgtcccgcagtacaaggtccagccgcccactgacgtctacaccaccggatccggcagtacatgcaccgtgcattggaccaagcatgggcatgcgcagtcctacagcgtgactgccgatggcatcgattccggtacagctactaaccggaactcactcgacttccgaatgagtccttgggccagatgcaacaccgcatcggtgcaacaggtgttcaacggcgctaccagcgatgccgccaccggaggcccgcgcaatggcgctccctacacctatgagaagaaggctgtaatcaacaaaccgcaggggctgcgctggtcagacaacgctcacgtcattaacgtcaccggcggttcggttgatgtctatggcaagccggccactgtacaaatcatcatcaatggtcaaccgttcacgtggaactccggccagccattggacgtcaccgacttggccgtggccgccgatggcaactacacgtggagcgtcaaagtcaccggcgggccgggatactccggtctcgacaatacggcggacggcagcagcgtcgcgggcacacgcccctctgattcctcggaggggaccgagtcgctcaaatccggtaccgatgtcaccactttggccaagaacccttggattcttggtttcggtaataccccaatatcgtcaaccaccattcacaagcagtaggagaacatccatgagcgagaacatcgacgacgcgacgcagctgtctgacacgacccgtctgtctgacagcacgcagctatccgacgccacgcacttgtccgatgccacacatctggcatcggaaccgcacactggcaccaccccgaacaccgagacggcacagcaacccgttgcgttgcctaacctgccgcagcggccgtcacaagcgtcgtcagaaaagccgtctcctactactgatgccgcctccattcctgcgggcgatgacagcaccgtgctcaagccacgcaaggacgcgacgccagccatcccgcagcaggtcggcatgccggcaaagaccagcacgcccaaagtcgcgcttccgcacttcggacgtaaatccggcaagcaggccgctactgcgaatgctgcccccgccacccagacctcccgtcaatggacgaccacaaccgccggcaagaccgcagcatccaacgccgaaaccgtggctggtcgcgggccggtagccaatcagcaggccgccgcgcaatcccagccgcaatcccagccgcagcgtcagtcgagcaaagccgcgcaagcagccgcatcggcactgcccgccagcatcaattccggactactgccccagcccacggctcaggtccgggatttccagcagtccttcaatgcgctggtcgagaatgtctccaaggtggttatcggcaagaccattcccatcaagcaatgcgtcaccgcactgatggtcggtggccatattctgcttgaagacaaccccggcaccggtaagacccagttggcccgaggcttggccaactccatttccaccggtttcaagcgtattcagttcacgcctgatctgctgccttcggatgtggtgggtgtgactttctacgatcagaagcgcggagaattcgagttccgcgagggcccgattttcgcctccatcgtgctggccgatgaaatcaaccgtgcatcgccgaagacgcagtccgcacttctggaggttatggaagagcagaaagtcaccgttgacggcgtcacccatgatgtaccgcagccgttcatcgtgatcgcaacccagaaccccatcgagcagctcggtacctataagctgcctgaggcgcagatggaccgcttccttatcaagacgtcgattggctacccgggccatgatgtgtccgtcgatatcctcaagcaggtcgatatcaccgaccgtgcgcagaccatttccccggtgctgagcggtgacgatgtcatgcggctgcgtcaggtggccaccgaaatctatgtggatgatgcgattcgtgaatacatcgtcaggctcatcgaggcgacccgccacaacgagaagatcacagtcggctcctccatgcgtggcgctttggcgctgacccgatgcgcccgtatctgggccgcggccgatggccgtgcctacgtggtgccggatgacgtcaaggaccttgcagtggccgtgctcgcacaccgtatcacgctgactccggaagccaccttcgatggcgcgactccggaaagcctgatcgcacaggtgctcgaagacgttccctcccccaccatcggttcctgatagggcctggaaaggtatccgaccatggcatctacatccgccgcattacgccgtcgccggcgcgctgaacgcatgttcaagcgcgcggtaagacgcatcagacggttcttcgcatcctacgtctcgcccttgggctgggcggtaacgggcgcaggcatcgcatgtcttattgcgttcctgcctctgggctggtatgagctgctcgtattcggcatcgtggcgatggtgatgatgctcgcggcaatcgcgctttccctcggcaacacacgcttccacgcgtccatcgccgtatccaatcatcgcgtgaccgtgggagacaccatatccgttatcgtcggcatcgacaacaccggcagaacgccgacaaccacggcacgcggatatctgccaatcggcgatgcgcatgaacgattcaacatccccatgctggctcccgggcaatccaagcaaaccgatgtggagttccgtacggtatcgcgcgcaatactgcccatcggaccattgcgcatccgcaagggagacccgttcggcctggtgcgtcacgaaaaggagctggccgaccgcatcatcgtattcatccaccctcgtaccgtgcgtctcgataccttgaatgccggcgtgccccgcgatctggaaggccaaccatccggccagatcgtggatgatgatctcgacttctacggattgcgcgaatacgagcagggcgacgacgtgcgtaacgtccactggctgagctccgcgaaaaccggcacgttgatgattcgccaatatgaagccacgcgccgcaccgacacctcggtgaccatcagcgtgaacccggatgagtacgtcaacggcgaggaattcgagatggcggtgtccatccactcctccatcggcgtcaaatgcctgctgcaggatcgcccgctgttctgtcacgcgggcaacgcgcacggccagccgcgcaacgccatggagttcctcgacaacgccagtgccatagagcctgatcgtgaggataatccgaatctcgccgagggcacgctgaagcacagtcctgatgcttcgttctattttttcactgttggatcgctgaaagacatcgagcaaatcaagcgcatgaccttggccttgccccgatcggccagctgcgtggtattgcaggccagcgccggcgccaatcgcggcatcagaagattcgccaacttcacattggccaccatcggcgaactcgatgatctcccactgatcatgggggtgctcgcatgaccttcgaccagtccagtatcaccaataccaataccgctgcgtacgccggatcgagcggcacatacaccggcacttcctccggcacgtacaccggaaccgccaccaccaccggctcctgggccgactccacacattcggttatctggatgaccagaggcaatgtgcttcgcggcatgggcctcagtcgccagccgtggggcaaacgaatcgccagcctcgtactcatagcggcgatgatgttgctggcgcaagccaatctcatcgacgtgtacggcggcgtggccacttgggcgatcgccgccgtaccggccaccttgctgggcgcgatcatcgctctggcgggcatgttgccggcgttgcgactgtggtggcaaatcgtgtttctgacgtttgcccaattcatcatcggtccggtggtaacgctgagttccaccacgtcccattacgtgattcccaccttgaagaccttgagttcaggttgggaaatgacgtttggctcgttcaagtacattatttccgtcgatccgcctctgggcacgcaagacggcgtgctgatggcggtatggaccatcggcctgtggcttacgttcctcaccggcgtgtttgccattaatgccaacgcatggttgtctctggtgggagtgccgccccttgcggcggccgtggccgtatgtgctctgctgggtacggacagcggctggcaacgtgccatctgcggcattgcctttgccttgctgctgattatctggctgtcttggcgtcttgaactgctggaatgggggcgctggatatccgcgctgatcatcgtcgtgctcgctgccggccttgctttcggaggcacgttgctggtgccgcaggaccgtttcgtgctgcgtgaccgctacgatccgccgttaagcccctacgattacaccagcccgctcagcggcatgcgatcctatatcaaggaccacaaaaaagacgtgttgctgaccgtccataatctgccggccggaacaccagtcaaacttgcggtgatggatcgattcgacggcacagtatggaacctgtccgattcttccgaagccacggactcctcgaattatcatcgcgtgggcaccacgatcaaggcggatgagcagggcgaatccttcactgcgaccttcaccgtcgatcagggattgaccgacacctggctgccgctggcgggagcggccactggcgtgagcttcgccaacgatgccgacaacggcaatgacacgttctactacaacacggataccgattccgccattattcccgccggcacgcgtaaaagcctcacctataccgaatccggcattatcgcccgcaagcccaccgataagcagatcagcagtgcggccgcggcccgcatcacccaaccggaagcccaggatgttcccgattcggccagcaaactggccacgtccattgccggcggacagtcctcgggcggtgccgcagccacggcgttggccgacacattgaaagactccggatggttctctcatggactcgaaggcgattatccctccgatgccggccatggcaactaccgtatcaacaagctgctggcaggcacggccatggtgggcgactccgagcaatatgcctccgccatggcactgatggctcgtgagctgggactgccctcccgtgtggtcctgggcttcctgccgaaaaacgaggatggcgaaatcaccgatgcccgcacggagaagacctcgggcaatggcaccaaaatcgaattcaccggcaacgatgtcaccgcttgggtggaaatcaaattgcagggcctgggatgggtgacgttctatccgacgcccaaggagaccaaggtgcctgatgaaaaccagaacctgacgccgccgaatccgcagacgctggtccggcaaccaccggtgccgttgaccgatccgctgcgcgatcagacgcaagccaggggccaaagctcattggcaggcgccgacgccgatgattcgccgaccaacctgttctgggtgcgattctggcgagtgacccgcaaggtggccctgtacggcagcccattgtggaccctactcatcgtctgcggtctgattctgatgttcaaggccatgctgctggcgcgagcgcggcggcatggcagtccgaaagcccgtgtggcagcaggttggaatgccatacgcatgcttgccgagcaaagcggcatcacagccaagggcactcgtcgagatcaggccggtgccatcgcccgtcaactcggcacagatgaccaggctttgatccagcttggccgggaagccgactacgccacgttctcggggcaagacattgaatcgggccaagccaccacatattggacaggagtcgaccaattgcgcaaggcaatgctcgcttctttgccgcgtttcaggaggatacgtacacgactttccctgaaaagcgtggctatactgtcaaatagacacgcagccaagtcgcacacgacgcatgtcaagcgcgcgcgtaagaaggggaagacgtcatgaccacaggctccatccgtatcgcgatgaccagtgacgtgggtcttaggcgcaagaacaaccaagacaccggattcgcccaacagggcgtgttcatggtctgcgacggcatgggcggcggcaaaggcggcgagcaagcaagccagttggctgcccagcatttcgcgcagctggcttccatgccctcgcgcacccgccatgacatcgacgacaccctggcacaggctcagcacgacattctcgatttgggtgaccgtctcggcggcgtggccggtacgacctgctccggcctggttttgccccagccttacgcagatgccatcaatgcccacagcgcagctccgtttgacgacgccgactccccggatttctcggaccagacctatgtggtcaatgtcggcgattcccgaacctaccatctcagcccgctgccggatgccgatgcccccgccacggatatcatccccgtgtgggacgcctcctcgctgacccgcatcacgcgggatcattcccaacgccaggaggctatcgattccggtcagatgctgccggaagaggcggaggcgaccattccacgcaacatcatcacccaatgcctgggcgatccggacggcatagtgcccgacgtatatgttgccgatctgaccggccgtttcatcatctgttcggatggattgcacggtgaagtgtcagacgaacagattgcggccatcgccgcagcgcattccagtccgcaggaagccgtggacgccttggtggcggccgcgctcgatgcgggcggaaccgacaatatcactgtgattgtggccgatatgccactgaccgaacccgaacatcacgcgttcagcgcttttaaactggacgagggcgaggac

SEQ ID NO: 1001 - DNA, 9508 bp, Unknown
  R117_24m  MAG No. k141_30163
ccgacaagagcgcgccggccacggcgcgcgccgaatacgacatctacaaggacatccccgcgcccgcgcgcatcgaccgcacctgggacaacggcacggagtcctcctgccacctgctcgtggacgaggccctcggcatgctcacctaccatgcggacccctactcctcataccagcgcggcacgaacgagaaccgcaacggacgcatccgccgctacctgcccaagaaaaccaatttcgacggcctgacggacgaggacctgcaggccatcgtggacgagatcaacgacacccccatgaaggtcctggactgggaaacgcccaacgaggtttggtatcgagagctcggcaaggtactctcgaagacaagccacccaaagacgagcgttgcacttacaaattgaattcgggccttgatgacactgaagatgtcacctccaacggctctttacgacctcgattgcattcattaggtcatttcttcgttcattaggtcggagggtgctgaagccatcccttggaacggcggggtttcaagggccgctccgaccaaggaccgacctaataaacgtcaaaccgacctaatgaataactccgataccggattatgagcaacacagccgcaacgaaatgcgccgcacaggcttagcccgaacatcgattcgggttcaagccagtgcgacgcagatcaacttcaggtataagacctgtattcaattattgggttgttattagcctaggggcaatagcctcacgtcaggcacggcgcttgcgccagataaccagaccggcgccagccgcgccgagcacaactacggccgcagcaacggcagccaccgcactacccgtgggggcagtggtagtagcgttcttctgctgctggtcaggcttctggttttgcccaggcttctgctgaccgggcttctgcggttcaggcttttcgccgctatccttcttggcgagaccatcgtgtgcggcagtgagtttgttgagcgcagcggtcacctgcggtgcggttgcggccggatccttgactacctgctttgcggcagcaagtgcatccgcatatgccttccacgaatcagccgtgtagtcgttctggttgagcttctcactctcaacagcggcgatcttgtcggcaagaggcttgcgctcctcatcggtggcaggcggaaccggagcctcgggcttagttaccgtgacttcgacggacgcggacttgttctcgtcaaccgtggaggtggcggtgatggtcgccgtaccttcggcaacggcggtcaccttgccatccttgtccacagtagcgaccttcgcgtcggaggacttccaggccacggtcttggccgcatcaccggtcaccttcacctcggccgacaactgggcagtatcaccagcgaccagcgccagcttgccatccttgacaccatcaccggagacggcaacggaatccacagacggagtcggggtcggggtcacggcttcgcccttgccgagattgatgttggcgtagtcggactcatttccggcggcatcctgcgcatagaagtgcacgtaagtgtcgtggtcagcggagagctgcaccttcaccttgtcctcgtcggtgtaggtgccccacatcgtgttctcgttggacttcgggttgctggacgggccggtggagtacagcacacgggtcacgccggagcctgcggcaccgtcatcagcggtgagagagacgaccacatcgttgccgttcttgctctcctgcttagcggtgaccaccggcacgttggtgtcgaccttgatggtctgggagacctcgcggctgttgtcgttttcatcggtggcacgggcggaaatggtcacggaaccctgcgcggtcacgctgatcgggcccttgccactggtccactcgcccttgccgatcttgtactcgatcgtctttatcggcacggtggagacgccgcgctgcgcggtgatggtgaacttcggggcagtggtgtaccagccggagccgggggccgcggagtcgaaatcgatagcaacaatcggctgggctttcgggtcggaaggcgcgacgacgaagaacgtgccttccgccttgatattgccgacaccctcgatagagccttccacgaagccgacctgttcggcttcagcatactcggcggccgggatactgtcccaagtcactttgtgacccgactcgaccgagccgtcagcgtaggtcagcgccacggtatcctgcaataccggcttgacaccgggagcggtgatggtggagacgtactccgcgtcggtcacctcggtgttgagctggtcgtagacaccaatagtggccgtcgcctgaccggccgcaactttgatgttgtcataggtaccggcagcagtagtgcccttgacttcggcggtagtaccagctgtagcataagcgtcggccggaacggtttcccaagtcactggaaccttaatgctgggaccatcttgaggtgtcgcccacacttctgcaggcaacttcgaggtcgggtccacgcccggcgtggtgcgcacggcaacttgctgcacgtctaagaaagcacctgggtcgcccggatccactggtagtgcagcgctggtaccaaacacctgccactcagtgacggtaatacccttgttgtcattggccttcttgttcaccacaagcttcatggacttggtggtgacctggtcgaaggtgtaggtatacggaccatacaccgggttggtggcgtcgagctcgtcgtcggcggggaatgtcttgtccaccttcaggttcggcacggtctcgtactggccggaatcagcattgagatactcaatcgagacatccttgggcagcggcacgccaccatcaccggtcttgacgttcgtccagtagtagcccacagacttggacgtggtcacggcgcgattccatgtgtaagtggcagtttcgctggcactggtgttgccccaagtgccccaaccgccatagctggcgttgccgtccaagctatcgtcattgatggcagcagtgctgttccagccagtgacatagctgacctgaacgtctggtgcattgtcgttgcctttttctgcattgagcgcaacattcgtttcagcgtcgtccgccagtgcactcggcgcggccgatacggagaagacaccgccagccagcagcgtggccgcagctacgaacagtgcggcgaatcgtttcgccacaccgcccttcacggccgaagtagtgctttcgatggtcataatattctttctgttaggcgttatggtttgtatcactcatctcccgccgtgtcgtgcactacgggagacggtttggtcgcaggaaaacgtcagctcatcttggcgcgagcggaggcaagcagaaccacctgacgatcacgactggaaagcagcccctcgtcttgataggtcttcgtgacctcctgcaccttcttgatgaaggcggcacggtccttgaacggcgcgcccgcccagatgtcatccatcagcgtgctctcgctacggtcctgtgcagccgggcgcttcgggttcagcacatcggtgagcttgcctgcgaagcccacatactcgtccttgcgctggaagtacatgtggtacggggtgttgtcgccgttgtaggcgggctcgaactcgtcgccgtcaatgatgaagtagttcttcgtgccttccttcttctgtacgcccagtttgatggtgccatccaagccgttgcgctcgtagaagccgcgttggatgaacttggtggatgggttgagcgcgttgagcaccgtgggaccgtagaacagcgtctggatgtccttgcggtcatcagtcgactcggtgcgcagctgcagcgggatggtgacgacgatcttgtccccgaccttccagctgccggccacggtggcgtattcgccagcggtgacgccatctatagccttgccgttcacctcgatcttcgcacctttgctccacgcggggatgcggatgcggaaggtgacggcgctcttcggcgcggccgtaatggaaatcgtcgaggtctcctcctccggatagttggtttcctgtgcgagcttcaggccggtgtcggtccagtcgagtgtggaagctgtgaacagattgacgtacagttccttgttgtccgtcgagtggaagtagatggaatcctggtacttcgagtggctttccaaagcggtgccgccacagcaagtgccgatgttgccatcaccatattccttctgcgtagccggattcactgggtacatgtagcagttgcccggcgtgagggccgtgccggaatcgaggtcacgggacttacctccgagaatatggttgagaatcgtgcgctcataatagtccatgtaggcaggtttttgttcgataaagaacagatagcgagccaccttgagcatgttgtatgccgcgcaggattccgcgttgcgcttgccgatatcgccggccacagtatgtgccggcccccacatctcgccttcgccagtaccaccgtgagcatacatacggccgggcacaatcatgccccagtacccctcaacggccttgagataacgcgcacgagcatcagcatcgatatccgcgtcgcccatggccgcgtctttggcgtaaccgacgaactgtggaatgtgctggttggcgtgcaagttgttgaggatatcgacaccagcaccacagttgtcaatgagcttgtcagtgtcgaaaaatgcggaggccttaagaaattcgctacggtccttgtccttggagacgttgtacaaatccaccagcgaatcattcatgccgccgtattcaccaccgatgtagatgtcccacatcttctgcagctgggttttggtgcatttgctcagacgcgcataggtccaatgtccgatgccttcagccaggtcgagcgcgtcggcattaccggcaaactcgtaagcggcaatcagaccggcaagaatcttgtgctccgtgtaccacggtgcccaaatctcgccatagggagcatattcctccaatgccttgaactgccactcgccataggcggcaaggaagccggggtggctgtagcgggctttgccgttatacttcatctcgcgcagggaatctcggcattccttcaggccggagacgaactcgttgatcttgttgagaatcgcttcctcccccgtttcggcatacgcttgggagagcatgtgcaatgcatgtccggcaaagtggccgcgcaacagaccatcagcaccgttcttgttctggccacgcgtgtattcggcatcgccccattgctgttcaacagccttgtctagcgagccgctggggaagttctcccagccaccggaaggctgcgtcgtgttgtccttaggcagcaggttcgcctgcgcacggaagcaaaccagccagcggtctaccggatagttgcgtgcatagtcgagcatcccttccttggcacgatcgaacacgctgttcgaggtgatggcgacgttccgcagagggaacggagctaccttccagcccggcagagcgggcgcgtcggtaatggtcttcgcgcttttcgtggtgcgctgcgctgcgggaacggccacgccgcccgcgccgttcgcgcccgttgcacctgccgtgccagcgacggatggcgctgcctgcaccgttgtcactcctgtacccaatgcactcgccacggcgatggtgccgccgatggcggccgcgcctgcgagcacagcacggcgagagatgccgtttgttgcttccgttgaactcatcttgctccttcgttggactgccgcgcgttcattgcgaggcatgacggacgaagacactctgccgcattcgcaaccattcaatgcacttaatccattcaatggcccgacgacgcaggtaagatgcgtcagtggatggcacacacatactcggaatcgtctggtactgcccgttttaccatcacatcattgtggtgcgtccccgtcgtcatgtatgtatgggagagatgacggtaaagcaaacagttaccatatgcgattattcgagtttttgcgcgccctccatgccgcttgtcttcgttgtgcgcgttcacaataactcaaacagacgattctcaccatgcgtcaaagaaagcgactcactcattttttctctggttttcgtagcgcacaataccaatgaaaatcagtctttatcagcatttccagccatgctattttcgtaattttccttttgttttcctcttgcgaaaaccaacgaacccaaacacatatgctcaccaataacacagtaaatgcattcaaattaacatgttcccgagcaactctcacaagcagctcaaacgcaacaccgcacttcaacttgaacaacacaccattcctcgctatactgataaattggtgcgttaatgaggtatacccttcccctgtcacaacacagaaattggaaggacatactatcatgcctaatcttcgccccaccgagctcattatcattctacttatcatcgtgctgctgtttggcgcgaagaagctccctgagctagccaaaagcattggccaatcgatgaagattttccgtgccgagaccaagaccgatgacccggcaacacaacaaaccgtcaatacagtcagcgacgcccctgccccagctccggcggcagcaccggctcccgctcccgccgtaccccaagccgtcacgatgaacgccaccgccgccccgactacagcaaccggagccgaacagcgatgagcacggttcccggaaaccccgcgcttccggcaccccttgcaccggcgatgcatcccggcgatcgggatacacatcttgacctcgacgatctcatcgatcactcacacgaggccacgcagcaggccagcgcgggtgcgcaacaccctacacgccggtggaagcggggtgtagggcgcaagtccaaaacgcgcaagccccgcaaccccgatgcggtgatgcctctggccgatcatcttgtcgaatttcgcaaacgctttgttcgggccattgccggcatcatcatcatgtcgatagtgggatggatgttcagcgatcaggtgtttcgtatcctgcaacaaccgttcctgacggcggccgggcagcaacagggactgatgagcatcacattcaatggcgtggtctccgcattcaacgtaaagctggagattgcgttcttccttggtctgacggcctcctgcccgtggtggtcataccaagtgtgggcattcattaatccagggttgaagcgcaaagagcgctggaccgcggttacattcatcggagcctcagtgccgctgttcctcaccggagccggactggcatggtatctgctgccccaagcggtggcgatccttaccggctttgcccccgcaaacaccgccacattgctcagcgccgacgtctattttgatttcattctgcgcatgacagtcgctttcggcctctcattcctgctacccgtagttatggcggcattgacgatgatgaatgcggtcgaaacacgaacatggttgaagcagtggcgtctcgcaacggtcatagcgtttatcttcgcggccgtggccacgccaaccggcgacccaggaacattatgcgcactcgctttgcccatcatcgcaatctatttcgcagccatagccgtatgcgcagtatacgagcacatccagctatggaaagtcatgcgcgcggcgggcgaagaacccaaacttctcaaacttttacataaaatgcgcgccgcgttaccatttcgcgcggcgcgcaaagccaagcgcaccggcaaacaggaagcccctgcaacaataactgcagaaggagaataatatgttgttcggcatttcgggcacggaactcatggtgattcttgtcatcgctttagtgctggtaggccccgacaagctgcccgactacgcacgcaaggtcggacgatttatccatagcatgcgcgtacgcggccaagcgttgagcgaacaaagcaacatcgacgttcacggccttgtacaggattccggcatcaatgatattcgcaaaggtctggatgatgccacgcaagatgtgaaccggctgctgccgcctatccggtgacgttatcaatccaacggcaacgttgactcgcgttggattagcttcaccggcacacgctccacaccatggtgaggatgccccgcaatcgcatccagtaggcatagggcagcttgacgccccagcatttcgttgttgtcatcaatagaagtaagcaacggatgcgcgtacgacacataatccggactgttgtcgtgcccgataaccgctacgtcttgcggcacgcgacatccgttacgttccaattcctcgatgcagccacgagccagcacatcgttttggcatatcactgcgtcgaatgcagcaccgtcattgagcagcagacgggcagcggcgcgcccccattccgcttcccatggaccgaaccgcgcttcgccagccaactgtaatccagcatcatgcaaggccttgagcgcaccccgcatccgttcatgtgtaaccgagtactcggagtcgccagcaataatcgcaatacgagtgcgcccgcaggaaagaaggtggcgaacggccaaacaccctgattccacattgtcttgtgccacggaacaatcatcgggatcacgggacgggccataggcgtagaccacaggtaccggagaatccacgtagtatggcaccggatccgtacacctgctgataatcaacagtcccgacactccttgcaccaacattcgttcaataccactgtggaacaatgcctcattgcctgacgcattgaacagtagcgctgcggctgagcgcgcttgaaacgcattctccgctccaataagaatggtcggagaaaagacgcctttcatatcaacgccaatgatgccaacgcgaaaatcctgcatgccgtgagaatccctgacgcttaaccttgccatcgatgccatagcttctgcggcgctataacccaacctccgcgcagcatcaatcactcgaatacgggttttctcgctgacgtgaggctttccacgcaaggccttggacgcagtggacagcgatacattagccgccgatgccacttcctccaaacggactgcgcccacattgagctcttcctcaccctctgacatatcgactcctctggcaaaggcctcaatgcccctaaatgatgctgcaaacagcctttagtctaatagactgccacctacggcacccgcatccggtaagcacacacaaaatattgatatcaaattgttatattgcacataatccggatgcggctccaatcaattccggtttatcttaatcagtcccgatcaatcaaagcagtgagagcccagaggatgctcaccacgtcgatggcctcctggaggaatgcgccgacgacgaccggaatgagatcgaacgcggcggcaatcatgccgatggtggcaagcacaaggcccgcgattacggcttgaagcatcacgcgcttggtgcggcgtgcaatggcgatggcgcgcggcacggcggcgatattgtcattcataatgaccacctgagc

SEQ ID NO: 1002 - DNA, 15404 bp, Unknown
  R117_24m  MAG No. k141_30715
accatcgtgaccaccatcgtgatcaacgtgatcgccttcgccatcgcctacatgctgaccaaggcgatcaagggctccacgctgttccgctcggtattcttcatgccgaaccttatcggcggcatcatcctgggctacatctggctgctgctcctgaacggcgtactagcccactggggccgcgccctgacctataaggcgtcctacgggttctggggcttggtcatcctggtgtgctggcagcagatcggctacatgatgatcatctacatcgccggcctgcaggccctgcccaccgatgtgctggaggccgcggccgtggacggcgccaacggacggcagaccatgttccgcatcatcatcccgctgatgatgccgtccatcaccgtgtgctccttcctgaccgtgaccaacggtttcaagctctacgatcagaacctcgcattgaccaacggtgcgccgagcaacatgtctgaaggtctggcgctgaacatcacccgcaccttctacggccgtatgggctgggaaggcgtcggccaggcgaaggccgtgctgttcttcatcctggtcgcggtcatcgccctgattcagaacaagctcaccacgagcaaggaggtggcagcctgatgaacgagaacaagcctgtgaagcatggcgcattatggaccgtgctgtttgccgtcgtctccctgttctgggttttcccgatcgtcctggtgctgatcaactccttcaagcagaaggcgtacatctccaagaacgcgttctccctgcctgccggcaaggcgttcgtgggacttgagaactatgtgcacggcatcgagaccacgcagttcttcgcctccttcggctggacgttgcttatcaccgtcggctcggtggtgctgattctggtgtgcacctcgatgtgcgcatggtggatcgtgcgcgtgaacaactgggccgcgaagctgctctacaccctgttcctgttcaatatgatcgtgccgttccagatggtgatgttcaccctctccaagatcgccgacatgctgaagctcaataccccgtggggcctgtgcatcgtgtacctcggtttcggggccggtctggccgtgttcatcttcaccggcgtgatcaagggcatcccgcaggagcttgaggagtccgccatgatcgacggcgcgtcagtgccgcgcatcttcttccagatcgtggtgccaatcatgaagccgtcgatcgtctcggtggccatcctcgaagccatgtggatctggaacgattacctgctgccgtacctgacgctcgacctcggcaaatacaagaccatctcggtcgccgtgcaatacctcaagggcggctacggttccgtggatatgggcgccatgatggcctgcctggtgctggcaatcatccccatcatcgtcttctacttggtatgccagaagtatatagtctctggtgtcatggctggaagcccagtgggcttccagcaggctccaggctgagccgcgacagcggcgaagctaatgatgagcctcgtcgtaggcgagtccgtaattgcagggccgaaggcggagcggtcaagggctgagctccaccaatccggctcccctctttgagggggagccgtcggcggaagccgactgaggggagtatcctgagctccatcaagtctcccctcagtcatctgcgatgacagctcccctcagagaggggagccacaggcgacacaaggagtagttgatgaactggctggcaccggactcgaaattcatgcgcgcgtggagcaatcttgttgacggcgtatggatcaacattctgatgctggtcacttcgattccgctcatcaccatcggtgcggccctgaccgccggccatgatgcttgccgccgctccatcgagggtgagggcaaaggcgtaaccgccaactacttcaagtcattcaaagccaacttcatcaaagccacactgctgtggctgccgttcttggtggtgctgattgcgctggtctggtcatggatcgtcctgcagatcacgccgctgctcatcatcaaattcgcgctgaccatcctctggcttatcggcttcgaatgggtgttcgcgcttcaggcacgcttcgagaacaccgtggccggcaccttgaagaacgccttcatcttcggcatctcccacatcgcgatgaccgtggccctggtcatcgtggatgccgtgttcgtggcgctgctggtggccagctggttctacatgcccagtggactgttcctgctggtgattcttggttacggcaccatgctgatgctccatatccccgtcaccgagcgtgttttcaatccatatctcattgactaggcgggttctctcgcgaatatgcggcgatcttcgaggtctgagcgttctctgtccacgcaagcgcggtaaagataacaaattgataacagtttggggcggctggcggagcggggtgccgattgaggggtattagtgattggcttggaagggggcttttggcatacggggagtgttcgggctgggcggttgccccctgtaagtgcttatatacataaggaatctggcacactgagtctcagtgccgtaatggtatcatcgcaaataatgtttgcgttcacgtagaggcgaacgagacacccgacaagtgggtcgaggcaaagggcaaggagagatgcggtgaagcattggaagaagatggcagcatcgttgattgcaatatcaacgatggtggcagtagttccgacgacgtatgccatggaatcggaagattcccaaccacagacaaccgataccgcgacagtgcagactactaaggctgctgaaccgacgctgctcgccagctgggacttcacgggcaaaaacggcaccacgaacagcgcgattgccgattcgaccggcaagtacaacctgacgctgaaggacggcgccaagatcgaacagtacggtgaccgcagcaacaacgaggcgctctcactgcgcggcgatggccagtacgcccagatcaatgaccagctgttcaaggatgcgggcgactccttcactctggagttcgcgtccaagactcgtcacgacgacagcggcaagttcttctcgttcatcgtcggcaaggacggctcgaacgacgccaacaccaccgatcaggccaacgccaacaagtacctgatgttctacaacagcaagaccgccatcaagggcgttatctccaacaacaactggggtaacgaacagggatccaaggtcaccgtttccggcaacgacaacagctgggccgattacaagattgtcgtggacggcaccaaccttgccgtgttccgcaacaatgccctgatcattttcaaggccaacaccggcatcaagatgagcgatctcggtgcgaccaccgcctacatcggcaagtcgttctactccgtcgatgagtactggaatggtgcaatggatgatatcaaggtctacaggggcgctgacctgaccatgccgaccgccgttgcgatttccggtaccggtgtggtgaacaacaagctcaccctgattgagaaggactccaccaagctcaccgccaccgtcactccggacgacgccgtgagcaagaacgtcacctggtcctcctccgatgagtccgtggccaaggtcgccgcagacggtactgtaaccggcgtcaaggctggtactgccaccatcaccgccaccactgagctgggtggtgtgaaggccgaactgcccgtcaccgttgagccgatgaacgcccagaacgccgccgcagccgacctcgatgccgcgattgctgcgctgaaagttccggcggccgagaatctgccgctagtcgccaagggcaccaagaacggctcggcgattacgtggaagtcctcggacgagaagctcattacgtccactaacgagaagtacgaaaacaagaccactggtgccgatgacccgtatcgtggtgctggcatcatcaatcgtccggcctacggcgacggtgattccaagccggttacgctgaccgccaccgcttcctacaacggcggtgagaaggtcaccaagaccatcgaggtcactgtcaaggagaagacccgcatcgcgcctgacaccggctatgcggccgtcacttttgagagcgacagcaacggtggagaaaaggcctgggtggcttccactgagaagaacgatttcttcacgtttaagactcgcaacaatggccaggcggtacttaccaatgatgcagacacgggtggcttgcgtgacatgttcgtgctgcgttcccacgaaggcgacaagtactacctgattgccactgatctcaaggtctcgtcaatgggctggagccagaaccaggttaacggttctcggaaagttgaggtctacgagtccaccgatatgatgaactggacccgtaccaacggcgacggcaacggcggcatcaccatcaacacgccgaacgccggtatgacctgggcgccggaagcttactgggatgatgacctgaacgcttacgtggtgttcttctcttcccgcatgttcactgatgacacccgtaccactccggtcaagaacgacaaaaccggcaatagctcctatgctcaggtgcgttacgccatcacccgcgacttcgtgaacttcaccgagccgcagatgtggcaggacaccggctactcgcgcattgattccaccgtgcgtaagatcggtggctactactaccgattcaccaagaatgagcagggcggtgccgctggcgattacatcaccactggtaagagcatcttccttgagcgttccaaggtgctgactgcaccgaccaccgaggcatctccgggtcaggacccgaacaccggttggcagctgctcgagcaggcattgctgccgttcgaaggaccagagaccatcaagctcaacaaggatgacgaactcaacacgaaggacgacgacggctacattctgctgtccgacaacttcgcctaccgtgcatttatgaccacgggtgccgagctttccaagaccacgtgggacaacccgatgaccaagcgttacccggacttcaacaacgaaaagaagccggtcaaagccgagccgggcgctcagggctacatcactcagggtgctaacggcggtctgccggacaaggtgcgtcacggtgcgttcgtgaacgtgcctgagtctgtgctcaaggtgacgaagtcctggaccgctgccaacccgacgcacatcgaggctgttgactccaccaccaaggccgtgtacaacgccggcacccgcgagctcaccgccacggtgaccgccgccgataagggcacgctcgccggttcggtgaagttctctgctggcgactggtccaagaccgtgaagctcgacgccgaaggcaaggccactgtgaccctcccggccagcgtctctggcactgttgcggttgcttacgacggctacaccgatggtttggtcaatccatccgatactacggttgacggcattgaacagggcaaggtcgatttggctgagctcaacaagcagatcgccgccgccgaagcgctcaaggaatccgactacacggccgattcctgggccaagcttgccgccgcgctgaagactgccaaggccgcgctcgccgctgagaatcagggcgaggtcgataccgccgcagccgaccttaagaccgcaatcgaagccctgcagaaggctccgaccaatccgggcgaaggtgacggagataagggcgacggcaataagccgactaccccgaccaccggcgacaagaccaacgtcaacaagcccggcagcgcgctgagcaataccggtacggccgtgctcggcctgggtggtgccgtggtagcactcgccatcgccggcatctccctaaccctctggcgcaagcgtcgcgcctgagctgctacggcaaccaagcccccctctgacgagggggggctgtcagccgaaggctgactgggggagagaccgcggcgaagccaccgaaagaacggcatggccttcggccgattctgtatcccgcggctgccgccgcaggtctctcccccgactgcctaacggcggccacctcgaacgcaattaaggaccagctttcagctggcttcatatttgctcactgtcgttcgccttcgcctaaaaacgactctggcgttttcttcacggctcagctcatcagagggcggccacaaaacttcgctccataactgaaggcgcaaccacaatcaaccctatcaatgaggagaaacatggggaagctgatacgaaaggcaaccggactcacggtcggcgtggcaacactgctcgctggtctggtgctgccgatgacggccagtgccgagagcgcatcgccaatcgatgccagtccgatcatccactattcattcgataacgcactgacgtccaagaccatcgccaacgagggcagcgcggccaacagcgatgccaccctatccggcgacgccacggtggccaatggccagatcaacctgaccggctcgcaaaccattagcgtgccgaccacggccatcgccggtaagaaggacgttaccgtctccatctggctcaagaacaattacggcaacggcaataccgccgccgcgtacatcggcgcggccaagaccggcaattatccggccaacggctactggctgctcaacccggccaacccgagtggctacgcgaaatccgtaatgaccaatgccactgcggccgacccgaataacagcccgtggggcaccgaagtcggccctggatcgacgaacgccgccaccaccggcaccaaggccaccagcgatttggctctgtacaccaccgtcatcagcggcaccaacagcaccatgagcttctacctcaacggcaagcaggttggagacgtcacctacaccattccggccggtggcctgaccaattacggcgacctcgtcgcctacattggcaagtcctcctacgctgacccgaactccaagctcgacgtggacgattacgccgtatacgacactgccatcagcgccgcagacgtgaccaagctgtatgacgctcaggtgctcgacaaggccgaggccgctgtcaaggccgctgtgcccgcatccgctaccgaggacttcgcgctgccgaccagcgccgctggcgtgagcatcgcgtggaagtcggacaacgcagctatcgccgttgacaacgctaccggcaaggccacagtcactcgtccggccgcaaccgcagctgatgccgaggtgaccctcaccgccacgtttggcaacaacgccaaaaccgccgcctacacggtcctcgtgccgaagcagctctccgatgccgagcaagccaaggccgaccttgacgccgtcaccatcgaggactccgacgacatccgtagcaacttctccgtgcccaccaagggcaacaatggttcgaccatctcgtgggaagtgaccggtggcaaggatatcgccacactaggcgaaggcgtgaacgacaaatctcgaacggtcactgttaagcgccctgccgccggtagcgatgccgccactgtgacgctcaaagccactgccaagtacgataccgccaccgaaacgaagaccttcaccgtcaccattcagccgatacctgccgccgaagagaaggacgaggcctacgtgtgggcgttcttcaccggtgagggcgtgggcggcgagaaaatcagcctcgcggcttccaagggcaacgatgcgctcgactggaacacgctgaacaatggcactccgctgttcacttccgagtttggcgagaagggtttgcgcgatccgttcatcatgaagtccaaggatggtgacaagttctacatgcttgctaccgatctgaagattgacggtcgtgcccccctcaacgggctgaatggctttgctggtgcacaggctaacggttccaagtacattgagatctggaagtccgacgatctggtcaactggtccaagcaaagccacgtcaaagtgagctctgattacgcaggcaacacttgggcgcctgaggcctactacgacgaggaaatcggcaagtacgtggtctattgggcctcgaacctgtacgacaacaccgacgagaacagccgcaagcagctgacctacaaccgcatggtgtacgtcaccaccgatgacttcgtcaacttctccgacccgacagtgtggattgacgttgatcgccgaggcggtgcaggcagtggatccatcgatgtgaccgtgcaaaaggtaggggatacctactaccgcatctacaaagatgaaaacacgatgtctttgcgtcaggagaagtccacagatttgactgccgcaattggtggtgccggcgtgaagaactacgccgatgcgcttaagggtagtgcatggagcgaagttgccacgaacatcggtaaaggccaggctaacggttacggtaaaaccttcacttccggcgaaggtccatcgctattcaaggccaacgatggcgatgtgaacggctaccagtactacctgttcgccgaccagccgagctatcatcaaggtccaaaccactatgtgccgatggcgactgaggatatcgccagcggtcagtggaccgttatcggcaataagatgcctgaggcgaacttcccgaccaactccgatggcggcaagccgcgccacggaaccgtgctgcccgtgacccgcgcccagtaccagaaggtgctggaggcatacgccccggctgtggctgtgaagtccgttgacgcgctgtctgccgagacaacggttggtgtggctccgacgctgccggagaccgcgcatctgactcatgcggacggttccgtttctgacgttgcagttgagtgggatgccattgacgcatctttctacgccaagaccggcaccttcaccgtcaagggcatcacccaagacgattcccgtatgccggttgaggctaccgtcattgtgaacggcatcgacctctccaaggcgaccgtcaccgtcgaacccaacgagttcaccgcagacggcgctgccaaggaaccagccgtgaccgttgtactcgatggcgcgacgctcaaggaaggcgccgactacacggtggcctatacgaacaacgtcgaacctggcactgccacagtgaccgtaaccggcgctggcaagtactccggtactgtctcggcaacgttcaccatcaaggccgccgagcccggctccacgctggacaagtccaagttgcaggcgcttgtcgataaggtgaagggctataacaaggctgattaccagtctggttgggatgctttcgccgccgcgcttgccgacgcgcagcaggtgttgcagagctccaccgaccagcaggaagtggacaaggcgctgtctcggctccagtccgccgtcgacaagctggtcaagaagtccggcgattccggcaagaccgatggcaaggatgacggcacgcaaaagcccgccgccaagccgggcagcgctctgtccaacaccggcgcctcggtgttcggtgtgggtatcaccgcggtcatactgctcgccgccgccggcgccgcctacgccttccgcaagcgccgcgcctgaactgtttgcagcgtagaccaagccccttctggatgagtcgagctgtgaagcaagcagcctactggattgtttgcttcatggcgcggccccatcagaggggcgtatcgcacgttcgtccgacgacgctgtcggacgcataggctttatggccccatagctccaatagccattaccgaacttcaccactcaacatctagatctgctgcgcgacaagcagtatcaccgcgcgcaaagaggaaaccaatgacaaccaaaccatcgataggcaagcgcctgctcggtgtgatgctggcagtgccgatggcgcttgccggcatgggaatcggtgcgaccacggcggtcgcggccgataccgttccgaccgataatctcatcgccgcctacgacttcaccacgaagccaagtgacggcaagaccgtggccaacagtgcgccgaacgctacgcttggcgcggccgaagtgcagaactccgccgactcgctctgggccgatagcgctcttaccctttccggcggtgccaagactggttccggcgactgggtcaagttgccctcgaatctgctgcccggcaaggacgccgccacggtgcagttggaggtcaaagcggattccagcatgctcaatgctttccatttcctgtggaacatcggtaacgacagctccgatacggagtatttcttcgccacgctcaactgcggcagttcgcgtaacccgctcgtcggcctgaaatcgggcggtacggagacgctcgtgcagtccagctcctgcgtggccaaggccgaccaatggttgtcggtgaccgccaccattgatggcgccgccgcgaaactgtacatcgacggcacgcaggtggcatccggcaccgtgccggccaaactgtccagcgtcaaggaccagtcgctcaatgccatcgcacgttcgccgtggcccgacaacctgttcaagggtgcggtctcgaacttccgcgtatacgatgccgcgctcaccgccagtcagatcgctgcaatcagcactgccgatgcctcaattcatgccagtgaactcaccggttccgtgctgaatggcatcaccatccccacgacggtcgacgatccgttcatttcgttgcccactgcgaacggcgtgacgtgggcgtcctccgatagcagcgtcatcgcgactgacggcacagtcaaccagcccgccaagggcgaggcagccaagactgtcacgctgaccgccgccgtcacgatccgtggccagaccgctacgaaggaattcacggtcacagtcaacccgaccacgaaaactgccgctgaacagctcaaggaagccgcggccggctacgtgatcccgtccgtcgtgcgttccggagacgccctcccggcggctgtgaatggcactaccgtcacggttacgtccactaaggacgtagccgtcgaggatggcaagatcaccatcgatggcgacgaggccacgaccggtaccatcaccgtcgagttctccaagaacggtctcgccggcatcgagcccattaccaaggtcttcaccgtaaaggtgctgcccgacgcgaagtccgcgaccatcgccgcctatgattgcaacgccaccagcgccgacgaggccaacaacggcgacatcgcctacagcatgcacctcgcgttgcagaacgctgacggttcgtacaccccgtacaacgagaattacggtatcttcttcgcacgttcgccgaaggcgcagaatctcaacgagaacctcgacggcaatgattaccgcagtctcaaggatccgagcctgctccgcatggccgacggcacctatggcgtgatttccgtgcgtaccaaccgcggcaccgccaccggtgactccaccgcgaagtccagcgtgctcatcgccacctccgaagacctgctcacctatagcgaacaggagaactccggttccatcgtcgaccttggcgagaccaacggcgtcaacgctccgtacgccgtgtacgacaccgccagcaagcagtatgttgtcggctgggccgatgacaacggcgtggccaagtacaccacgttcgattcgctcaagggctccgcgtccaagcatggcagcgtactgtacggttccatcgccaagtccggcgtactcgatgccgacggcgtgcagggcatcgcgaacttccgctccggtgccaccatcgcggtggacgaggcgaccgtcaaggcgctcaacacccgttacggccgctctgagaacaccggcacgagcaatctcactgacatcaccgtcgagaaaggttcctcgattgatgagatgacctcgcagctgccgaagaacgtggacctcacttactccgacggttctaccggctccctgccgatttcctcatggaacactgagggtatagatctgacgaaggtgggtgattacactgtcaccggcaccgtcaagcagaccgaataccagattccgttcgccgaggaccgcgccgatccatcggtgtataagtggcagtggacgcatgaggtcgacggcaaggaagtcaccgaaaccaagttcctgatgatcgcttccaacgacatccaaggtgatgtcacttggcagcatggttcgccccacatgccgttccgcatggccgacacgatttccggtctcgccgacgagccgggcaacccgaatgccctgattcagtcgaacggctacaacaacaaggaggtgtcgctgctcaaggctggcgacaaggactccgagggtaatgccatcatgcacagcttctgggctccagaaattcatgagattgatggtaggctcacgattctgttcatggccggatacggcaacacatggtccaacggcaagtcggtgtacatgcagctcaagcaggatgccgacggtcatgacctcgacccgaccgaccccgataactggactgtgccgacaccgatctaccgcaatgacgcctcgctgctcaacggtaacaagcagctcgcagccaccgcgtccggcggagtgggcatgtcgctcgacatgacctatttccaggatgccgacggcaggtcctactacgcctggcagcagctcggcgccacctacatcgccacgatggatccgaaggacccggcccatgtgaccagctccccggtgcgcatcgtcaccccggagtatgcgtggaacgccgccatagccgaaggtccgaacgtgaccatgcgtgatggcaagctgtacctcatgttctccggttccggcgtaggcaagacctacaccaccggtttggccgtggctgatgccgccggctccgacctgaccgacccggccagctggacggcgctcaactacccgattcagaagtccggtccattcaatggcgagatgcagctcggcaccggtcacggcatgtggagcgaggacgaggacggcaaccagatctacgtgttccatgcttatgctacgaagaacctcggctccgtgaatgccaccggccgcgacatgttcgtacgccgcgtgcactgggctgccgacggtatgccggtgttcgacatgagctcttccgaggagctggcgaacaagatcgtttccgttacggtgcatgtggttgacgatgcggttgcggtcgataagtctggtttgtccaaggcgcttgcgtccgccaagcagctgcacgggtccgactacaccgccgcctcgtggaaggcgtttgccacgatgctgacctccgctgagaaggtctatgccgacgatactgctacgcagaaggacgtcgatgacacgaccgtcgcgttggttaaggcgcaggctgcgttagtgaagattgatggttccgattcaggcgatggctcgggcgattcgactaagccgagcgacggttcgagcgtcgatgcgggcgataagacgggcaacaatcttggtttgtccaagaccggtgcggctgtgcttagtcttagcggcgtagccgtggcgcttgctgtcgccggtatcgctctgactctccagcgcaagcgtcgcgcctgagtggccatcaagctcccccctctgacgggccgagccgtatagcgaacagccctgtgggctgttcgtaggcgagggtgagccgataggcgaaccgacaagctgcgggcaaagcccgtccttgattgcgggacgggctcccggcgaagccatgtggggaagagacttacgacctgtgaacaacattcgcgttctactgattgccttcccgaaaaggaatccacccctccaaaagtgaacgctcacactaaaattgtaagtacttacaactaaagatgcggccctgcagcgccccagtccctcaaaaacggtgtcgttcgagggggcagagcggtgcatggccgcatgagaacacagttcgcgctggcaaacggagcagcttcgtcagcgcgaaaaaggtgcggaacccggccgataaaggggcggtcgatcatcgcacgataacaatttgggcctttcgctgtttgtggtgggtggttgtggtgtggggtgatgccggcgggtgggttggaggcatggatacctcttgcctgttcaccgccgcattgcagttgcgggggccttggaaggtcgggtccgtggatttcagggacgcgggcgacggcgggcggggactgcacatcatgatcggcttcgagcccggcgtgcgcttccattgccccgagacgggctgccggggggcgcctgtccggtgcatgacacgagggagcgcgtgtggcgacacctgaacttcttccagtacaaggcgttcatccacgccgccatgccccgcgtcacctgtcccgtgcacggggtgaggacggtgtccgcccccgtgggccaggcccggcagcgggttcacgctcctgttcgaggcgtgggccgtggagatggcccggcacctgccggtgagcacgctcgccgggcagttggacgagaccgacacccgcctgtggcggttcatctcgcattacgtggacgaggcgaggggactcgaggaccacacgggcgtggaggccatcggcgtcgacgggaccagccgcaagggccgcaactgcatcaccgtggtcgccggcctggtcgagcacgacgtgaccgacgtgaccccgggcagggactcgaccacggtcgaacggttcgccggggacttcatggaccacgacggggtgcctgggcgcgtgcggctcgtcacctgcggcataagccgcgggttccagaaggacatccgcgagcacctgccccatgtcaggcggatcatcgacaagttccacgtggccaggcacgccaacgaggcggccctctccgacctgcggctggagaccaagcgcggcctcacgcggcagcggctgaagaccgcccgcgcgtgccggatgcgcgaggtcctgcagggcatctgcatggacagccgcccgccggggcatgggtcaggctataccgcctgtgctcgtggatgatacactcgaggctcgaacccgtgaaggaacccgcccgtctgatccgccgccgcttcgccgaggtcgtcgcgtacttcgggcacccgtacgccaacgccgtcctcgagggtgccgacagcgtcgtccggaacgtgaagagacgggcccgcggcttccgtgacatggactacttcgccaccatggtctacctgacctgcggcaagctcgacctcaaagccgtcaccacctccccctcagtgagagttttttgcaaattggcccgtacccgcacctcgtcacagcttgtataatcacgattatactaatcgtgatacaataaatcgtgatgcgatagaaatacgccggcgtatggcataaaggaggcgggcagcatggcattcatcggacgagacgatgacctcaagcaactgcaggaatgtttcactgagcgtagggcacagcttgtgttcgtctacggccgcaggcgcgtgggaaaaacagagacgcttattca

SEQ ID NO: 1003 - DNA, 23969 bp, Unknown
  R117_24m  MAG No. k141_30965
cttcctccaacgggagcgattgttaagcgccgaaatcggtatcgccttgggcctcggcctgggcgatggcggtttcggcgttttttgctgtttgctcaatgacctggttgtatccggtcaaggccgcgaacggcatgaactgggcggcccgctggcgacgagacatatgcggatgcttgcgtgattggtggtgtggcaggttgatgatgtcgtcgtatgcatgggtttcttgcagggtcatgcgcgatggcctccgatctgacggttgcgagcctgaccggtggcaccgtcttccatatccatggctttgatgacggcgttgcggccgaatttacgtttcacatccagcaacgcacgctggatatcacgctctcgagccaacgtctgtgcggcggcatcgtccccacaagccggcatacgcccgcttccgtcgccaccggattccgtgctatcacagtcatatcgcatatcgccatcatcaccgaacaaatcaagctgctcatagcgtttgcccgccgccagttctttgggcgtggccacatcatcggcaacaactgtgagtcgacgcaccagcaaccgcgcatccacaatacgctcgtacagcatggtcatcgcctcgcgaatacgtgcggcagacgacgtaaaatcgcccaatccaatcgaccccacggccgacttaggcacccgacgaccgaaacggtcaacggtcaccggcccttgataggtctttgccgcgcgttcggcggcacgcctcatcgcccggtctgcgcatgaatcaagcttcgaagcatcgagactgccaatgtcatagccgaccgccagtgtcagccgattcgtcatcacccccttatcgaccagatcgagggcgagcgcatcggccatctccttggcgatcagccgagccgtatgccaatcggcgggcccggtgagcacctgcccgctgctgatgctgtgcgcacctggctcataggattggatgtccgcgatctcgcacggctcccagccccacgcatggtcgatgagcagttcggcattgacaccgaacatgtgatacagcaggtcttcgttgtagtaatccgaagcacgacccaccgagcatcgggcgatatcgcccatggtcatcagaccggcgtgctcgagtttcctggcatagccgcgcccaacccgccaaaaatcggtgagcggacgatggctccagagcagccgacgatatgacatttcattcagttcggccacgcgcacgccgtccttgtcggcgggcatgtgcttggcgacgatatccatggcgactttggccagatacatgttggagccgatgccggcagtggcggtgatgccggtttcatcgagaatttcgcgcacgatggttcgcgccatggcatgcggccccatacccagcgagcgcagatatggcgtgacgtcgatgaacacctcgtcaatcgagtagacatggatgtgctcgggtgcggcgtatttgaggtagatgccatatacctgcccgctgacctccaaatagtgcgccatgcgcggcttggcgatgaccatcgaggctttgagtctcggcgagcgttccaggtcgcacgcatcgcaggactccccgattaatcggccgccgggagcatggaccgcgcgctcgatgttgactccattcaggcgctgttttacctcgaatagccgcgcacgaccgggaatgccatagttcttcagcgagggtgagaccgccaaacatattgtcttatcggtgcgggtttcatcggccaccaccagatgcgtggtcaatgggtcgagtccgcgcgccgcgcactccaccgaggcatagaaggacttgagatcaatggcaatataggtatgctcgcgttgcgtcgataccgttccgctgcccatcgccatcacctccttaccaccgccggcccgaccagcatatcaatacggtcgaacatttgttcgatacaacatgtctgttcgaagctgccgaagtcgacgcacgcaacgcgcccaagcacgctcttcacccacaccacacgcacagcggcagagcagcggcagagcagcggcatgcatgcgtaccatgggaatatgaagaaaagcattacggcagacagcgattttgcggcgtgggcggcagcccgatcccagaaaacgaatcgatcactggcaggagcccgcctcgcgattccggagccgcagaagcgtgccgaaatcaagtctcaggcccagcaatggggcatgaccgtcgaagatgccacgatgaccgacgggcatagcgaggaattcctctgtgacggcacacaaagcattgattccattgccgacatgcgcacggcaagtgggctggaggcaatggagtacgcggaacagcacatgccggtattacgcgacaccatggatgacctcaccgcccgcgtcgatttctcaggcattcgtattgccgtctgcctgatactggagccaaaaaccgcgattctgctgcgcaagcttaaggccgccggcgcaatcgtcggcgtatattgcggcccggattccacggatccccgagtggcggaacagctgcgccgagaaggaatcacggtcgaatccagccgagcctggaccgcggaacaggcgcacgaggcagccctgcgcctgctggacaagatacagccgaacatcatcatcgacgatggtgccagcttcgcccgcctcgcctcgctcgaacgccccgagctcacggcgaatctcattggagtggccgaggaaacgaccagtggcgtacgcgcgttccagcagatgcaggaagcgggagcgctcacctacccggtcgtagccgttaacgacagtgtgctgaaaaccggattcgacaacgcccacggcactggggagacatgcgtgaccaccatgcagcgcattctcggcgagcatgcattcgacggcaagaacgtcaccgtcatcggctacggcccggtcggccaaggcttcgcacggcgtattcgcgcgcttggagccgaagtcaccatctgcgatatcgatccagtggcttcactcaaagcggtgttcgacggcttcgccgcacaagacattgacgaggcactcccttgcgcggatatggtggtgtccgccactggcgtgagacatacagtcacacttgagcacatgcgcgcaatgcacgagggcgcggcgctcgcagtgatcggcggcatcgccaacgaaatcgccttggacgaggtaagcgacttcaccccacaggtcaacagggacaccgcgcaactcattgttcccgacggaccaacgctcacgctaatcgccgacggcgatggcgtgaactacacggtgggaggcggcaatccaatcgagatcatggatctgagcttcgccgtacaggccagcgccgtcgcatatcttctggaacatcgaggcacactggatcacacgcttatcagacttgacgcagcgaccgaccagcgcatcgccgccagcgcgctcaaggcgcgcggataccgagccagccatgccgtggaggacaacggctacgattggcgactgaccagattcgcggaaaacgaccgagagaacgccgaccgatagccatagacacggcgccgaacacaacgcagcgaggagaatatgaccgacaacacctggccgaccgtcgataccgagcttatcgatgatgtgacactgtattccgccaaactcatcatccccgtgacgggccccgtcatcatcgatggcgcagttgccatacatggcgaccgcgtggttcatgtaggtaaacgccgctgggtgctggaggcgctgaagcaggaaatgacgtctcacggcaccatccgtgaacggcattgggatggggtgctcacccccggattggtcaacgcgcacactcatctgcagtacagcggcatggtgcaggtcgggcaaggcacctacgatcggttccgcgcctgggaactggcattcaacgaggtgtacgccgaggcgcagaagacccagccatggaagcagtgggccgaggacggtgctcgccagatggtcgagtcgggaacgacggccgccgcagacatcgtcaccgatttggacgccgccggcgcgctggcttcgcagggcatgcacggcatcgcttattgggaggtaatgggctggcacaacgacgaatggatggaaaagggccgcaccgagctcatccggcagttgcgccggatgaacgaggagcagctgccgaacctcggcatcagcccgcatgctccgtatacgctggagtccgaaccgttcgttgatcttccagacattgctcgtcagctgaacatgcgactgcatatccatctggcggagaccccgctcgaggccggcacttatccgccggtgctcaccacttattcggcgtccgactggcgtgaccacgattgggaaagctaccggcagctcaaggacgtgggcaaaggtgcctccgccatccagttcgtcgatcagcttggctcgcttggcccggatgtgcacattgcacacggcgtgtgggccaatggcgaggatcggcgtattctacgtcagcgcggcgtgggcgtggccttgtgcccccgatcgaatcgcattaccaacaccggcaaagatgcaccggtgcgcgaatacctcgaggaaggcaatctggtaagcgtgggcaccgattcgctctccagcacgccgaccctcgatctgctcgatgacgtgtcgatgctttacgacctggcccgcgaacaaggctatgccagcgacgatctgacacatcgcctgattcgtatgatgacgctgggcggtgccgcctccatgggcatgcacgtgggccgaaaccgcattggacagatcaacgcgggcgcattggctgatttcgcgttcttcgacatccccgtcgacacatcatctccggccggcatcgaagaaacgctggaaacactggtgaagcacggcgcaggcacgaaccgagccacggtgatatccgggcgcgaagcctacaacaacgcctggtgacaccgctgacctgacctgacctgatatcaagaagccaaaaaccagcaaacccgtcaagaacaggagatctcattatgagcgtcgctttgcgagacatgagtccatacgcccggtccatagtggaacgccttggactggaagcccaccccgaaggcggctggtacacgcgtgactggcaatccccgcacacggatgaggcctcaagccgaccgctatcgtcactgatttacttcctgctgcccgagggagatgccagcgcctggcataaggtcgatgcggatgaggtctggctgtggcatggcccggcatcggtcaagctggaactcggcggcagcggcgagactccggaatccgacgaatccaagcgaaccgtaatcaccctgggttccggcatcaccaccgatcaggccgacgtaaccgtatcgggacatgcggtcgtaccggctggcgtctggcagcgcacagtgccaggccagggcgatgcgctggtctcctgtgtggtcagtccgggattcgtattcgacggcttcacactcgaacagtgaacgccatttcgctctgcgccaatatgagatatccgttcgcttacgcgccagattgcgcggctctagccggccataagcaatggagataaccagcatccgagaatatcgctgttttgtagtaacccaatagccatacaattggcgcgcatgcatcaagcacggctttgaaccgtgtgcatgacgaacacttgaggagaggaagcccatgttcaataagcaacacatcgtccgtaccattgcggccaccgccagcatcctagctctgtcgttcaccgcagcctgcggttccggccagtccaccgcatccaattccgccgattcgaacgatatcacccagcagacgtacaagccgggcaagctgaccatcgccaccggacagccggcctacgagccgtgggttatgaacgacaagccggaaagcggtgagggctacgaggcggccgtcgcctacgcagtggccgacaagctcggtttcaagaagagcgacgtggtgtggacccgcaccgcattcgacaccgccatcgctcccggtgccaaggactgggatctcaacatccagcagttcggcatcaccgacgagcgcaagaaggccgttgacttctcgtccagctactacaacgacagccagtccgtcgtggtcaagaaagacagcaagttcgccaacgccaccaaggtatccgatctgaagaatgcgaccgtgggcgtcatggtcggcacccttgcctacgactacgccaaggcgaacatcaaggacgacatccagacgttcaatgatgatgccgcactggctcaggcacttgacgccggtcagatcgacgcactggtcaccagcaccgtggaatgcgtgtacatggtgcagtccgagcaggtcaaggacgccaaggtgctcggccgtctgcctgactccgaagacaagagcggcatgggcatcgtgctgccgaaggattccaagctgactgcagccgtgaccaaggcagtggatgacctgaacgccgacggcaccatcaagaagcttcaggacaagtggctggccgagtacaccaccgacctgaccgaactgaaaaagtaagtggagtaggctcacatcataaggtcacaacaccttggccgggcgctgcggaaattttcctgcgacacccggccattccggcattcaggaagcgagcgacattcatcacatgaccgcagcaccaaccgaaaccaggcagcacaatgcccctgacggacacgaggtaagtcaggtcgagctcaaacgacgccaatatcgtgttcatcagcaaattcaatcgacgattaccagtctgatcagcaccattgtgttcattgtggtcatcgtcatcggcctgaagctctcccccggctggccacgagtcaaggagaccttcttctccggcgaatacttcgtcaaatcgtttccccatgtgcttgacggcctatggctcaacatccgcgttctgctcgtcgcagtggtcggcgtggcgattctaagcacgctgatcgcattggtgcgcaccagccgctcccctattctgttcccgctgcgtatcctggcattgatctacacgactgtgatgcgcggcgtgcctattatcgtcgtgctgtatctaatcggtttcggcattcccggcctaggcttgttcggccgtatcgatccctcggtactcggcaccattgcagtggtaatgggatacagcgcctacgtctccgaggtgctgcgtgccggttttaacgacgtacatccttctcagcgagcctcggcccgctcgttgggcctgacctccggccagacgacccgactgatcgtcattcctcaggcattgcgcaaagtcgcgcccgcactgatgaatgacttcatctccatgcaaaaggacgtcggcctgatttccgtgctgggtgcggtggatgccgtgcgcgccgcacagatcgacgtggccagcacctacaacttcacgccgtatgtggtcgccagcctgctgttcatcctgatgagcgtgccgttcatcctgctgaacgactggtacacggaacgtctgcgtaaacgcgaactcagcggaggaacggtatgagcgaaatgaccaatatcaacaccgaggcgagtgactcccccgtgagcaacaagacggtgctgcgtcttgatgacgtgcgcaaatcctttggaaacacgcaggtgctgcgtggcatttcctttgacattcaccaacatgaggtggtggctttgctggggccttccggttcgggcaaatccacattgatgaaatgcgtcaacctgcttgagcaggtcgatgacggccagatttggctgggcaataccgatatcaccgacccgcgtgccgatcaggacaagattcgcgcacgtatcggcgtggtgttccagcagttcaacctcttcccccacatgtcggtgctcaagaacgtgacccttgccgcaatcaaggttcaccactggagcaaggatcgcgccgaaacccgcgctatggaactgcttgaacgcatcggcatgcgcgataaagccagcgcctaccctgatcagctctctggcggccagcagcagcgcgtggcgattgcgcgcgcactgatgaccgacccggaactgctgctgcttgacgagatcacatccgctcttgatccgatgctggtcggcgaagtgctcaacatggttgccgagttaaaggcccaaggcaccacaatcctcatggccacgcacgaaatgagcttcgcccacgacgcggccgaccgcatcgtactgctccgtcacggcgtcatcgccgagaacggcacacccgccgaggtgatggacgagtcgcaggatcccgagaccatcgagttcttcagccatttcaggcactgagacgaagccgaaaaacaaacaccggattcatacgacgaaaggccaaaatcctaagccactattcatactcaactgatctggtgcttaaaccgcgtccgcgaaccccaacaagttccaccaccccacaacacgcgatgtagccgccgattggtagggttggcagatagttaatcccctgtttgaaaaaggagctttggcttgtcggctgaactcgaagacattcatgaggaatgtggcatcttcggcgtatggggccaccccgacgcctcacgactcacctattttggcctgcacgcgctgcagcatcgcggtcaggaaggtgccggcatcgtctccaacgataacggtcatctcatcggtcatcgcggactcggcctgctcacccaggtgttcggcgatgagcgcgaaatcgaacgactgaagggcaattgcgccatcggccacgtgcgttacgcaacggccggctcgggcaccacggacaacatccagccgttcatcttccgcttccatgacggcgacgtggctctgtgccataacggcaacctgacgaactgcccgtcactgcgccgcaagcttgaagacgaaggcgccatcttccattcgaactccgacaccgaagtgctgatgcacttgattcgccgttcgatgcagcgcacctttatggacaagctcaaggaagcgctcaacacggtgcatggcggtttcgcctacctgctgatgaccgaagacgccatgatcggcgcactcgacccgaacggcttccgcccgctctccctcggcaagatgaagaacggcgcctacgtgctcgcctccgaaacctgcgcactggatgtcgtcggcgccgagctggtgcgcaacattcgcccgggcgaaatcgtggtggtcaacgatcacggctacaagatcgtgcagtacaccaacaacacgcagctggccatctgctcgatggaatacatctacttcgcacgcccggattccgatatctatggcgtcaacgtgcactccgcccgcaagcgcatgggcgcacgtctcgccgccgaatccccggtggaggccgatatggttatcggcgtgccgaactcctcattgtccgccgcatccggctatgcggaagcagcaggcctgcccaacgaaatgggcctaatcaaaaaccagtatgtggcccgcaccttcattcagcccacgcaggaactgcgcgagcagggtgtgcgtatgaagctctctgctgtgcgcagcgtggttaaaggcaagcgcgttatcgttatcgatgattccatcgtgcgcggcaccacgtccaagcgcatcgtgcagctgctcaaggaagccggcgccgctgaagtgcatatgcgcatcagctccccgccgctgaagtacccttgcttctatggcattgatatctccaccaccaaggaactcatcgcagccaagatgagcgtggaggaaatccgcgaatacatcggcgcggattccttggcctacctttcgctcgacggtctggtcgaatccatcggactgaacgccgacgccccatacggtggcctgtgcgtcgcctacttcaacggcgactaccccactgcgctcgacgactacgaggccgacttcctgaagtccctcacgcccgaggaccgtgtgcgtctgcctgaattcgcgctgtacaagagcaagtacatcggcaacgagtacaacaccgtgcagccggacgtgcagtaggttcggccggtccttcgactacacctcagtcattggtctttacgactacccctcagtcagcttcgctgacagctcccctgacaaggggagcttagtacaaacgaaaatccactttttgcaggtggctccccggcaagggagcttgaaaatagaacagaaaggccccaccaaatgccaaaagcatatgagaacgccggcgtgagcgtcgaagccgggtacgaagtcgtcaagcgcatcaagtcgcacgtggcccgcacgaaccgtcccggcgtggtcggcggcatcggtggcttcggcggcctgttcgacctagcctccctgggctacaaggagccggtcctcatctccggcaccgacggcgtaggcaccaagctcatggtcgccaagctggccaacaagcacgacaccatcggcatcgactgcgtggccatgtgcgtcaacgacatcgccgcccagggtgccgagccgctgttcttccttgactacatcgcttgcggcaagaacgacccggccctgcttgagcaggtcgtggccggtgtggccgacggctgcgtgcaggccggttccgcactggtcggcggtgagaccgctgaaatgccgggcatgtacgacgaggacgagtacgatctggccggtttctcggtcggcgttgccgaaaagtccgccattgtggacggttccaccatcactgagggcgacgtgcttatcggtctgccttccaccggcgtgcactccaacggcttctccctggtgcgcaaggccctgttcgagcaggctggctataccgtggacactgagctcgccgagctgggcggcgcaaagctcggcgacgtgctgctcacccccaccaagatctacgtcaaggccctctccccgctgttcaaggcgggcgtggtcaagggcgtggcccacatcaccggtggtggcttcatcgagaacatcccgcgcatgattccggacggtctggccgccgaaatcgaacttggcacctggcctgtgctcccgatcttcgacgtgcttgagaaggccggcaatatcgatcacaaggagatgtacaacatcttcaacatgggcatcggcatggtgctggccatcgaccccgcccgcaaggacgaggcgctgaagctgctcgccgacaacaacgaacccgcctacgtgctcggccagatcaccaccgacaccaccgacacgcaaatcgtactgaagtagctccagataccggctcccctcaaagaggggagccaaagactttaggaaggaaaaacatgggtcagaaagtattggtcatcggctccggtgcgcgtgagcataccattgcctacacgctactcaaatcgccgagcgtcgacgaagtcaccgtggcgcccggcaacccgggcatgctcaaggatggcatccgcaccacacagctgagccagtcgaatcatgccgcgctcatcgaattcgtgaaggacaacggctacgactgggtgttcgtgggcccggaagtcccgctcatcgaaggcatcgtggacgatttcgccgccgccggcatcaaggcgttcggcccgtccaaggccgccgcccagatcgagggttccaaggacttcgccaagcagctcatggaccgtcacaacattccgaccgccaaatatcagacgttcggagacttggacatggctcaggcttacgtacacgagcatggcgcgccgatcgtcatcaaggccgatggtctggccgccggcaagggcgtgaccgtggccatggacgagcacaccgcccagcgtgcgcttgaagacatcttcatcgatcatcgcttcggctccgccggtgccaaggtcgttatcgaggacttccttgacggccaggaattctccctgatgagcttcgtcaacggcactgatttctggccgatgccgatctcccaggatcacaagcgcgcccacgatggcgacgaaggcccgaacaccggtggcatgggtgcctacagcccggtgccgcagattccgcagtccgtggtcgacgaggccatcgagaaaatcgtgcgccccaccgtcgaaggcatggccgaggaaggcacaccgttcaccggcatcctgtacgccggcctgatcgccaccgccgacggaccgaaggtcatcgaattcaacgctcgtttcggcgacccggaaaccgaagtcgtgctcccgaagctcacctccgacctcggtgccggcatctccgccattctcgacggcgaaacccccgaattcatctgggatgagtccaatgccaccctcggcgtggtcatcgcctccaacggctacccggagaacgtcatcaagggtgcccgtgtgcccgagatcgaggtcgacgaggattcgcatgtctactatgccggcgtcgcctccgacgacaagggtggtctgattgccaactccggccgtgtcctgctcgtcgaaacctccgccccggacatcaagtccgctcaggacaaggtctacgcgatcatcgacaagctcgagctgcgcggactgttctaccgccacgacatcggcttcaaagccctgaagtaacagaagcggcgcatctgccgcatatttttggcccggtggccatgtcaatcgattgacgtggctaccgggccagatttttctgtcccggtagccgatttcggctctttttcgcaaaccaggacagttgaacacctcgaatataggaatatttggaattcccttccatgcaaaaccgcactattccgccattttcgtaatacgcggacgatactttcggcgtcagttttgtcccggtaagcagaaaatgactcgaaatcaaataccaggacagaaaaatctggcccggtacacgaatcaatcgattgacgtggctgccgggacagcgaacgtcactatgacaacgccatcacccaatatcagcgagcgatatcacgctagctgaatttggcgatgatgttgaacagtttggccttggcttcattgaagggcgggtacacgaggcgcagagtgtcggggaactgcggcttggtaaccacggttttgacgtggctgaaggtgaggaagcctgctttgccgtggtaggcgtcgatgccggacgcgcccacgccaccgaacggcagtcggctggacagcaggtgacccaacggcaacgaatatcccaaagctccggagctggtctgacgttcgaaagtcagccgaacctcgtgatcgcgcgagaacacatatgcagccaacggccgggaccgcttgttgatgaatcggattgcggactcggcatcctcaaccaccaggatcggcagaatcgggccgaagatctcctccttcattaccggcgcatccggtgacgtgccgtatagtacggtaggcgcgatatatcgggcggcgcgatcgaccttgcctccgcaaacgattcgcccggccggatcgaatacgccgggcaccttgtgaatctcgctcggctcaacagcggccgaggcagtcgcatcactatcagcggctgccgtattcgaaccggccgccggcttcgccgcattgttcgcgctaccggtgccaccaccggctgtctcccccgcgcttccgcgtccggcagccacgacattgaagcgccgcccgaccatatccatggccgcgcctaccgccgatgccacctgtaccagcggcgagctcggctcctcagacggcacggtgccgaccggcaatagcttgcacagtcgttcaaaatgacgatcgttgataatacgaccaaaatcaggcgaggccttcggatcttcgccatagaattcggtgatggctacggcgatgcgctcggccagagcctcggccacatccggcgtggcgagcacatagtcgggtgccacgcaggtctgtccggcattggtgaacttgccccatgcgatacgtcgtgcggccacattgatatccaccgtacggtccacgaagcacggtgatttgccgccgagttccaacgtgaccggtgtcaggtgctcggccgccgcacgcatgacgattttgccgacgtgcccgccgccggtgtagaagatatggttgaacggacatttcagcagttcgccggtttccttgggcccgcctccgaccacgcacacggactcggggtcaagatattgcggcacgagttcggcgatgaggcgcgaggtgttgggcgaaagctcggagggcttcaggcagatggcgttgcctgcggcgagcgcgtcggccattggctccagagccaacagcaccgggtaattccatggcgagatgatgagtaccacgcccttgggctcggcgatcgtccagccggcggcgggttgcagcatccaatgcatcgccttgggatggcgcgcggcccacagtccgagccggttgcggacgaactgcgcctcgccggccaccagattcagctccatcagtatggtttccgccgcgggtttgcccaaatcggccatggccgcagccacgaaagcatcacgattgtccgctaccagacggcatagcgcatccaattgcgcccgtcgccaagccaatggccgcgtacacccggattcgtaggcgtgacgcaactgagcgaaatccgcattgaccatggcacatccttcccgcaggatgcccgggtcggttttccgggcatcgactgtacctatcgtaccgtcatgacgatggcatgagggcgtttgtgctgcaggcaataccagacgtttcggctggtattcgccaaatagcttgggctcggccgaagtaggtggtgcaggtattgtcggcgagttcatcgacggtgatgggattggcgctggccacgccgagcagttcggcattggcaggcaggtcgtgttgtgcggccacagagtccacttgtacctccacatccacagcttcggcagaaggtccgacggcgatatgcccgcctgcatcaaccacaatgcggcggtcatcggtgacatgcacgatggcgtcgcggccctcatagcccgcccatgaccagctggccacgccgtcatgtcctcgttcgatgaatcgcgaggtgcggcccgcgagggtcgcgcgactcgtgaatcatcgcatcgtgcgggagcgtgactggctgccgcgctgccgtatcgcggtccttgccaattgaacggaaccgccagccatgattcacatcgatgcgcttcatggctttattgtaaggcgggagtgattggtctgtgggatctctccctcagtctcacttcgttcgacagctccctcatcagagggagctcacagcactatggcaacggtacagcaattttggacgggcttcgcccgcgttttgctggctcgcctgtcggctcgcacgttgcctacagaccgaaaatcctccggattctccgtcgcggcacagccgctcccctcacctacggatagcccactgagctatccgctttacggttcggccgggctgtctgctttacggcaacgtcataaaatctgtgtctttgaggtagtttttgccggcggtgatgtcgtattggatgagcttgtagtcggcaagcaactgcttggtttccttgtcgaagtcatcggtggacatcgggttgccgttttggtcgagatagatgttctggccttcgggaatacgatcccagccttggaccttgttgaccacaggcggttccatagcggcaatcttggaatgcatttcggtcaggaacgccagatacgggctgaccttggcgttcatgtgatcggcggcctgtgccacgaagaagttcggcgaagagtaggctgcatcgcttgccttattgccttgggagctggaagccttattcgaccagatgaagtaatcggtcaggtgcagggccaaggagttgttgccatcctcgctggcggacgagtagatgcccggcaagtgatcgccgtagaacactacggtgacgggcttatccagcgcatccagttcgttcaggaactcctgagtggcctgatcggtaatctccacacccttttgataggtctcaatcgactgctgttcatcatcacccagcggcgtacccgtggtagattcagcggtgtagtcgttgttctcataccactcgtggtagggcatgtggttctgcatggtgatgatctgaatgaacttgttcgtcttgccggacctgatgccttccagcgcagaatcataggaagacttatcagagacgtacggcgactcgtcaatcttgtcctgatacttgatcacgtccggaccggtcagcgtgtagaagtgcgagaacccgaacttcttgtagttcgtagcgcgcgagtacatgctggactcgtacggatggtagccgagcgagttggcgggcgcaccccacatctggttgatggtgggggtccaatgctggctcgggaccagctgctggtacgggctggacagggaggaatcgaaattggccatgctcagaccggaaagtcccatgtattcgaggttggccgtaccgccgccgtagccggaggagagcatcagtccggaggtggtgcccgccttgatcttgcggatgttgggcatcgaatccttattggtcttcagtcccggcacgcggctcgggtcggagaaggattcggacagcacgtacaccactgtcgaatcagtgaggttgttggtgcgggaggcgttgattgtctccgcttccttctggtagcgagcggcgaccttcttcatggtctcctcggagtagttgctcggcttgtccatgatcttcgggttgagctgacgggtaaaggccacgagcggaccgttgcgctgcgcgtcatacacggaatcccacatggatggcgtgtcccccaaggcgcgggagaacttgttggccagcgaatcggtggtgctcacatgaatgcagtacaacgcgaacaccagaatcggcagcagcagcagaatcagacgggaggtgaggttcaggctcaggttgtccgtacggatcatgcgacctttgcgcccgtcgaagtggcgcagcaccagaatcagggcgagcagcgcggcgaacgcgccaagtgccacgaggatggtcacgtgcgcgccggccggaatgaaggtgagcatattgccggtgttcgagccaaggaagccgaggtcggcgggcagaatggcctcgtaacggatctcgaccttgaaatgttcgatggcggccacgatgattccgaccgcaagaatcacgatgcttgccgtccagaatctgttgaacagcatcagcaacatgaggtacagcaacgcgacaagtatcacgttgagtacgaatacgaaattgccgtcggtccacatcttgctcacgaagccgaatccgacggtcggactggacagttgcacacgggtggagctggacgaaacgcccacttcgagcgccgtcacaacaataatgtcgaagataacgaagagcacgccgtacgcccagccggggaagggcttgtgggggtgctggggcgtgacttcattggcttcggcctttttgacccaaagcttgaaatggggtttcactgtggtgatactactagtgttctcgctcattcgcctgtttccgtatgtgacttttcaagggcatattgttgccgctgaagcttggaaaatccatagttccactatttttcttaccgtttcctaactattcaccctaacgcaaagggtgcctcgggacatccccgaagcaccctgatatataaggagccttccctgatagcgaagcgttctgttctcccctaggcaacgcctcgctatctgacttgattattccccttattgctgttgcggattgccggctaccgccgcattacttcacggcggcggcgaactggtcgaccagtgcgctcatccagtcgagcaggttggtgtactgcttcggcatctgctcggtgagctccacgatcggcacgttgacgtccttggcggcaccggtgatctggtcggtggtggagttggcttcctggctgttgaagacgagcatcttgatggagccgcccttcagggtgtcctggaagtccttgatgtcggccggggtcggctcgctctcgttggcggaagcctgggcgtagcccttcggggtggcgtcggtcatcttgaggtcgtcggccaagtgccaggccacggattcggtggcggcgtacggcaggttctcggtcttggcggaagtctccttgatcttggactcaagctggtcttccttggcgtgccattctttgttgagcttggcgtagtcgtccttgtgactcgggtcggccttctggtaggcggcggtgatggcgtcggcagcgttggaacgcaccttggcggagaaccagacgtgcgggttgtcgccttccttgatgccggcggtttcggcggcggtgaccagcgtggccttggtcgactgggcggccttggtggcccacgggtcgtaatcggcgccgttgaccacggccaccttggcagtgccgaacttggcaacatcctggctggtgggctcgtaatcgtgcgcctcaacgttggtcttggtcatgatgttggtgacttcgacgttgctgccgccgaggtcttcggccacggaaccccactggttgatggaggcgacgacctcgatcttgccggaagacgcggcgctgctggaatcggacttgttgccggcggcattgctggaaccgcaggcggccatcgagaacagggtcgccgcggcggccgcgatggcgagcgcgcgcttggcgttggacatgatggacatgattggattttcctctctaattcggctgtttggccgggcgatgctgctgttgctgcatcatcgcccggcccccaacacgacagaataacatgtattgagaattattatcatttgcatttacgtcggtgtgttgcacgcgcacacccgcactgccggcggaaatcccgcgccccgacgatgacaacgcgggatcccgccgttttcggcagacgaaacggcagtatccccgcgtccgaacgatacccgcgcgggggttctgccgtttaaggcctcggaaacgacagaaatcccgcgccaccttcgttcggacgcgggggttctgccgtttgccgcacatgtcacaacggcatcacggcacagaccgacgcctgcaccaggtcgacgagccccacggtgtgggcatcctcacagaccagcgcatcacgcaaggcgattgcacggatgatgtcgcggcaggcgcactccccgtctgtatccaaatggcgtgccaggcaaccggcaccaatgaccggcaattcgagcacgcacgaggcctcacggatcaggcgggagaccactacgccggtcgaacgctcgtcatagacgccgttctcctcgcccatgccgcacaggcacaaacggtcgtcgtcaaagaatcgctcttcgaattcgtcaaggcctacggcattggccaccgcacccacgaacatcgactcaccccactcgttgagacggaaggaatcggccagatactgcgcgaccggcgtggcctcaaggcccacaggcagcgagaccagaaacgcgccggcccgcccttgcagcgatccgagcgtccgttcaaggtcatgtttgaccgtgcagctcatgcagcacccctcgagcccgaacgaatcggactcgccgaacaccaccccgcttgcctggggcttcgcgacgttgcgcacgatatcgagaccggattccacggcttcgttcgggcgcacgtcataagcaatcgagcatacggacgggaaggaatcgatcaacgagaacgccacggagtccaggctcaggcggtcggcgccggtgagcagcaccacgggcgtgcgcccctccgcgtttccctgtgattgcaatgccggatgaatcatgacagcctttctaatttgataatggttatcattatgatatagttgcaggcatgtccaaaacatgtcaaattctgggaacacgcgccggggtcggcaaccgcgtctcccactcgcacaggaaaacacgccgaaccttcgccccgaacctgcagtccaagcggtactgggtgccgtccttgcagcggcacgtcacgcttaccgtgagcgccaagggcatcaagaccatcgaccgcatcggcatcgaggcggcgatcgcccgcatccgccgcgatcagaacgtcaactgaaccggccacggcatcacccccatgctcgggcagtcagtaggcccgccactgtgccggcgcgtaaccgcgcaacaaaccgcgctaacgagctgcatcacccacatggcaccgcgacgtacgcgacatacgtgacataacagcgtgacacccacacatagaaagcaccactcatggcaagcaaatcctccgcaatccgcccggtcatcaccctgaagtccacggccggcaccggattcacctacaccaccaccaagaatcgtcgtaatacgccggaccgtcttgagctcaccaagttcgatccggtagtccgcaaacgggtgctcttccgagagacccgctaatccatctgttcgttcattggacaccagtcgcgaggcgaggaagaggcttaagcacccgccgaaatcgtttcctcgttggcattccggcggtttcctctatcaccatttcatgaactcatcttccgaaccttgcggcatgcgcccaatgaacgaatgcactcgtcccagctccggccggcgcgattcccgcgccccggagccttatcaaggagccggacatggccaaaaccagtaagatcaaccgacaattgcagcgcgaacgcatggtcgccaagtatgccgaacgccgcgccgaatacaagcgcgacagcgtcaaccctcatctgaccgccgaagaacgcgccgaggcgatgcgcaagctgcaggccctcccccgcgacgccagccccacccgtctgcgcaaccgcgattccatcgacggccgcccgcgcgcctacaaccgcaagttcggcctgtcacgtatcaatctgcgtgagaaggcacacaagggcaaactgcccggcgtggtgaaatccagctggtgatcgggccggcacaaccggccgtcaggccgtctcaggccatctcaattcaccggattccacccgcgcgtccgacgccattctcatccatatcaccacacaacaccacacaaccaaaggtccataaccatgcaagagggcatccaccccgaatacggccccgtggtcttctatgaccgctccgccgacaagtacttcctcaccaagtccacactggtggccaaggccgtaaacctgccgaccatcgactgggaggacggcaacacctacccgctcgtcaatgtggaggtgtccagctacagccacccgttctacaccggcaagaatgtggtgatcgacgccgccggtcaggtgcagaagttcaacgctcgttacgggcgcaagtgattcgccgcacattccgcaaagaccgtaagacaagaagaaaggaacggacatgaaggtcaaggcatcggtccgctcattggcccgcaaggatggctcctatgtcgtccgccggcgcggccatctgtatgtaatcaacaagaagaacccccactggaaggcgaggcaaggctgatggcactgcccaagtacaaggcgtcccgagcaaacacgcattcgcgccgagccaactggaaggccaaggtgcctcagctggccacggtcagaacgcctgaaggcgaagtggttcaggttccgcagaatctggccgcagccgtacgaaaggggtatatgaagccataaccaacatcgtggattccgcaatccatcaagtctcgcaacaacaactcgacggtccgctccacaggccggcggcgtacgttctttctcccatttccttccgtatgccgtcacctgccggggcgaaccgccgttttatgaggccaccgcatccgatctggccaagctcgccaaggcagacatcgtggtgctcaacggcgccggctacgacggctgggcggaaaaggcgcagcttgacaagaaacgccagaccatcgtgaacgtgggcggcctcatgggcgtcaccgccaccgacgagcacgagcattcccacgaccacgccgagggcgaagaaggccgccatcaccaccatggtgctacgaacccgcacctgtggttcagcccggaagccgtgctgaaggccgccgaagccatcaacgccgtctacgcggacaaggccggggccggttctgccaccgccgccaccgtgcaacgtcacttcaacgacaggaagaaaccctcaaggaaatggacaactggcccacgtattacccggcatccatgagcaaggaggaagtggccaccgagatgctggcccaccgattcgccatcggcccaggcaaccatgtgcaaagttccccgcatatcgatgtgtaccatcggtatgcggggaactcgcatattatctcgaccactatcatgcgtacggtgctaatatgacggcgatatggcaggtgatattcgcatgaaagaacctcgcacgcagcgcacggaacaggtgaacaccgcgcaacaggaccattcggcgaactatctgtttctgattatcggcacgccgctggtggcgttcctgattgcggcttccgcgatgctcgagtcgcgtgggtttccggttccgctggtgcgtatcggcaccggtgccgcggggcttatcctgcaggcgattccgttcatgctgctgggcgcgatgatgtcggccgtggtcagcacgttcgtcagcaccgattctctggcccgccacataccgaaatcgttggccggcggactggccgcggcattggcggccggcctgtgcctaccggtgtgcgattgcatggtggtgcccacgttcgcgaatctgatgcgcaaacgcctgccgctgccgtgtgcggtgacgtttctgtgcgcagtgccggtgatgaacccaatggcgatatggtccacatggttcgcattcaccgacaaatcatggatggtggcggcccgcatggggttgggcatggtagtggcgatagtcgcgggggtgtcgttcgcggtgtggccgctccgctcccctgcggtgcgtgagaggccgctgacgattgggcggtcgttgatttgcgaggattgtgcaggggcgacgggtgattcgcctgagagccacccccagtcggctttgccgacagcccccgccggcgggggcacggggcgcggattggagcggttcacgcatttcattcggcatacgcatgacgactttatgcggatgatgccgattctgctgttcggcacgatcattgcctccatcatgcgcaccgcattgtcgtcgttgaccaacggttcaagcacgctcgatgacgctggtgccatcgtactgattctggcggcgatgggactggcgttcctgtgttcgctgtgctctacttccgatgcggtgatcgccgccagcatgattggcgcgctgccggtctccgccatgcttgccttcctggtcttcggcccgatgctcgacctcaagaacacgctgatgctggccacggaatgccggccacggttcatcatccggttcatcgcgaccgtggcggcggcctgcttcctcgccgcgattgccgcccatctggtgatgggagcgtagccatgaagcgcaaagtcacactccccgaccgcgtggaggcgctgtgtttcgcggcgctgggcgcggccatcgcctatgcggcggtgggcggatcatacaccacgctgaccacgccgcgttcgctgccgtatctcatcatcggtgcggcactgctgttcgtgctggcgaccgcagcatggctcggactgttccacgccacggagcgttcggttttgcggttcctgatcgccttgattattccggcgctgctgatcgtcgtgccgttccagcccagcagcggcagcggcggcttcgacgagtacgccggcggccgcgctatcgtcattccccgcagctcgcacaagcctgatggctcctcgcagctgcacggactcgacacggcgaacaagaccctgac

SEQ ID NO: 1004 - DNA, 9341 bp, Unknown
  R117_24m  MAG No. k141_32092
aaattattgatatcataagagttagcgcacggttgatgcatatggcccaatgcgggggtgccgtcaaccgtatcgcaatagtcgcaatgcggtcgtaaaaaggagtgttcatgagatctgctcgcgaggcatcgtcatcgtctgacggcacgcagcgtgtgagcctgaaagacatcgcagatgaattaggcatctcgcagaccgcggtatccttcgccatcaatgatcggcccggcgtttccgcggaaaccaaacgtcgggtcaaagaggctgcagccaggctcggctggacgccggtctacgccgcacaagcactgggatcctcgaagaccatgaccataggctttgcccccgcacgatccacgcaggggctcacggatgaaagcttcatgctgcacttcatggcgggtgtgcacgcctcgctcagccccaaaggctatggtttgctgtaccgcccatgccgattcctgaacgaggagatgagcgtatacaaggattgggcgtcgcgcaagcgcgtggatggcgttatcctcgtcgatttgcgagccgatgatccacgcccggaattgttgaagaatctgggtgtgcgcgcagtgcttgccggaggacccgacccgaacaattatgtgccgtcactgtccatcgatgattcacgcacgatgggaaccgtgctcgaacatttgtcgtcattgggacaccgccgaatcgcctatctttccggcgatccgaacctggattattcacaggggcgtgtcgcggcgttccgcgcatttgccaaacggcgaaagctggaatccatcaacatcgaattcaccgattttgttgcggaacaggccgcgatgctcacgttggagatgctgcattcaccgaagccgcctaccgcgttcatctatgaaacggagatcctcgccgcggccagtcttcacgccatggccgaagattattccgctcggcagatggaggcgggggagggccatgcggaagtctatccgaatgggctgcccgccattgtcagttttgaagacagtttcatttgtgaggcggcgtatccgtcaattaccgccgcgcatcgtgatgccagcgaatacggtgccaaagtggccaaactgctgctcaaagtgcttgccggagagcaggtgagcggcaaccggcgaatcctcaccccgaaactggtgattcgggacagcaccgccaagcccatggataccatggcgtagaacggtcattgcatcggcttgcagacaatgacatgcgaccagtacgacgttggcccccgtattccacggggccaacgccgttgagaaagaggaagaaaaaaaggatatagaggcttagatgctgtcgattattcagcgttcttcacggccgtcgcaatggacacggccgggtccaagaacggaatcagcgtggactggaaggcgtggtacaggtcggacttgcccggccagaccgtgccgatcacgtggttgttcttgtcaagctgatggaaccaggaaccgccctcgtggtcgatgacatgctcatcgacatactgggcgaatgtggcgtaccagttggcgtacatctcctcgccggtggccgcatacagcgtggcggaagtgttcaacgattcggccagcgtccaatgcatgcgatcggtgaccacgggcttgccgttccagtcggtcgtgtaggcgagtcccacggtgccgtcggcgttccatgcgtcggccacggcacgcgcgaacagatgctcggcggcgtcgacgtacggctgtgcgccgtcaaggttggcgaaggagcttaacgcccactgcgtgatcaagcgggcccattcgatgccgtgacccggcgtggcgccgtacggcttgaactgatcatccttcttgtcgacgttgcattcgaggtccagcgaccaatcggacttgaaatgttcggggatgcgccactcgttgtgcttcgcccagccgatcacatgatcgatgatgcggccggcgcgtactcgataggcgttgtctcctgtggcatccgtcacggccaggaatgcctcggtggtgtgcatgttggcgttgagaccacggtacgggtcgagctcggtgaattcggtattccaggtatcgacggccaaaccgatttcgtcatcccagaaatgcttgtcatacgtggcaagcgcctcgtcaagcagttccttggcacccggacgtccggccagcagggcggaggacgcggcgagaatcacgaaggcatgcgcatagcagaccttgcccggcgcatgggtgccgtccgcgaacacctgcgggtaccagccgccgtgctcgttgtcatgcagaatgccggtcaatcccttgagcgccgcatcggccagctccccggcgcccggatatccgagcatgtcgccaatcgaatacacatgggccatacggctggtgatccacgtttcgacgccgtgggatgggtcaagggtgccgtcggcgttcagccagccggaaccgccgttcggcgctgggaagcccttgccgaacttcagcagctcataggtttcggaagccatgaaaatgcggttggcttcggtgccgagcgtataccgtgggttattggtcataatgattgttcctttccttaacgagaacatgcggtgggtgcgcaatgagcattcagcgggcacgtcttagtgcttcacacgaatgtcgaaatagtccatgaccagttcacaaaacatcatattcgaccagctgaaccattcgcgcgtgtacttggtcggatcatccacgtcgatgccttcgtgcatgagatgtgtaccggcgtcggtggctacaagacggtcgaggatatgcgccttgaagtccttgctgtcgctggtcatcgcctcgatagacagggcgatgggccacacatagcgcggcggggtgtgcggtgagccgatgcccttgagatactcgccctcgtagtagtatgggttctcgtcgctgagcagcgtacgtcgggtcgccagatatgtcggatcgtccggtgcgcagtatcccaagtaaggggccgccatcaaggagggcacattgctgtcgtccatgatattgacgtggcccaggccgtcggtctcgaatgcgtagattgtctctccgttgcggttcgtcgttttggcgtgggcttcgatgccttcggtgatggtgcggcgcagctcgccggcacgggcggcgatatcggcgtcatccagaatctcaccgccgaagatgcgttccagatagcccatcaccacggcggcgaacatgttcgagggtaccagatagtggtaggtgcaggcgtcgtcgctggggcggaagccggaccaggtcatgccggtgtacgccaccggcgaccccttgccgtcattgctcagcgattcggtggggatgtccgtgtcgcggatgaagaaatacggggagcgttcatgatgctgctcggtctcgaagacgtcaagaatcttcttgacgccggcaatgaattcggcatcgaagtgatcggcgttgccggtgttcgcatacagcatccaagccaactggatggggtagcacagcgaatccacctcgtacttgcgctcccaaagccaagggctggagaaatcggaccggtcgtccttgtcccaggaggcgccgttcggttcctcgttgaaggcattcgcatacgggtcgatgatgatgtagcggaactgttgccgtatcagaccggcgatcaggttcgcaatatcgctgtcttcggcggcaagggccagatacgggcgcaattgcgcggtcgaatcacgcagccacatggccgggatatcgccggtaagcaggaatgtggtgccgtcgtcatgccgtttgaccgtggtggtcagggtgtcggcaaagcaggcattgaagttctcggcccaggcggcgtgttcggtgccacacaggtccgtgatgtgctgcatgaaatccgagaccgacttcggtatcgcggtggtcgtcataaattcaacttctttgtttgagggatatacatatcaagggaacagcattattctaaaccgctttagttcatgacacgcgaaaggatgtgaagagcatgagtgtgagcgcaccatatgaaaaaccggtgagatttcctgttcggagaatctcaccggttgcgatcagtcgattcgtgaagtcgcacgaatggcggataaggggatgggtggattacttgccgatttcagccagatagtcgggcatctcggccgggtactcgggccaggcaccggcctgggtgcagacgtaggcggcggtgttgacggccttgcggtgtgcttctgccagcgtgtcgcccagcaggatgcgggcggtgaaggtgccggagaaggagtcacccgcacccacggtgtcgttcacctcgacgtgcggagtgtccagcgtggagacctcgcccttgcgggagatgatggtggagtaggcggagccggcggtcagaatcacgtagtcaaggccgaattcctcgatgaaccagcgggaggcgtcttcgccggaggtgccgcggatgtcgaacatgtcgcgcagcagcaggagttcctcgtcgttgatcttgaagacggtggccgccttgaggagttcctcgatgaggtccttggagtagtggtcgccacgcaggttgatgtcgaagaacttcatcgcgcccggcttggtgtgcttgagcagctccgtgatggtggcgtgcgattcgggggagcgcagggccagggtgccgaagcagacggcgtcagccttggagaccacgtcgatgagctggcgggtgtacaggatgtggtcccaagccacgcccttgacgatggtgtactccgggatgccgttcttcagcgcgacctcgacggtggaggtcggccaggcgttgcgctggatgacggtgttgatgccggcctcgttggccttggcaatcagttcgtcgccgagctcatcctcgccgaccgcgctgatagcccagccttcggtgccgttcttcatcgcgtggtaggcgaagttgacgggggcgccgccggctcgcttgccgctcggcagcatatcccacagcagttcaccgaggctcagaacgatcggggtagtcatggttggtttcctttcctttgtttcttttaccgggtgtttcgtatggaacatcttgtgatgtcggcgcttggtttaggagacgtcgaagaacaccgaggggtgttcgaggaattgggtcaccgccactgctgcggcaccggagaccgccgcgtcggcggacagggtggataggctgatggaagtggaggcattgatttcggggatggcccgttcggccaccgtggcgcgcacctcatcgagcagtatcgggccggcttcggacacgatgtcgccgatgatgatgtgctcaggattgtatccattgaagatggtgacgcatccgtagccgacgtatcgggcgacttcgcggacaatggcgattgacgcttcgtcgccgtcgccggctttggcgaacagggcgcgggcggcttcggtgtgggtcatatcggccgcgccgggaaccacggtgccatcggcgatgagcatgtcgtgaatggcgggggtggagcagtagcgttcaaggcagccgacgttgccgcaatcgcaggggcggccgttgacgtcgatggagatgtgtccgatttcggtggcggcaccgaggaagccgttgatgagacgaccgttgtcgatgacgccgaggcccacgccttcgccgaccagataataggcgaggttgccgtcggcgtgcaccgacgggtcgaagagataatgtgcgagggctccggcgcgggcgtcctgttcgatgaacacaggcacgcggaaagcggtggcgaattcgtcgatgaagttgattttgcgccagccctgcatgctggacaccacggcggtgcggcctacgttacgcaggtaggggccgggcaccgccatgccgatggccacaatggacgggtcgttgtcaagcagttgttcgacgcgctggtggatggtgacgatggtgtcgttgatggtgttgccgtacaccgtgggcaggttttcaaagctcagggtgttgccacacaggtcgaacacgccgatctgcaccagcgagcgggcgaatttgatgccgatgatgcggaaccgcgtggtgtcgagtttgagaccgatggaacggcggttcttggaaccttccaaatcgccggtctcttcaatcatgccggcctcgataaggcgtgcggtgattttggtgatggccgcgggggtgagttccagtgccttggcgatttgcgcgcgggagctgatgccgttgtgatacaggtgcttgacgatgcgggagcggttggattcggagacactggcttgggaagtggcatgggtggtgtttgttgccatcggtcttaagtcctccttgtctgcaccgctgcgagttgttccgctcgtctttgaatctgaacttgattaagatattaacgctgttaattgattgacgcaatcaatatgtcattcggtgtgtcgtgcatgtgagtgtcgtcttgggggaatttgttaagatggttgtcaatagtcggatgcacactgatatcaagcgaaacgttcgatgaagaacaggggaggactgatgtctgaaaacactatgaacaatctcaaaatcggtgttgacgtgggcggaacaaaaatcgaagctgtgctggttgacgcaatgggcacggtattgggttccgcccgtattcccgccaggcatggcaacgatgccgtgatcgaagacatcgtcgctgtagcacatcaggcagcgggtgagcgttttgacgaggtgagggccatcggtgtcggtaccccgggcacggtggattcggccagcgggcatgtgggcaatatcgtgaatctcgacgtggtctcgctggatatggggccgttggtctcgcagcgttcgggcgtgccggcccatgtggaaaacgacgtcaatgccgccgccgtcggcgcggccaccgtattgggcggtgcggacggcatggccggtaccattgcgttcctgaacttcggcaccggactggctgcgggcatcgtcgaaaacggcgtgctgatgcatggctatagcggcgcggccggcgaaatcggccatattccagtcgaacctcatcgcctcaagtgcccttgcgggcaatacggatgcttggaaacagtctgctcgggcgcatccgtggggcgtctgtggcccaacgccgacccgccgatgcccgacctgattcgtcgcgcgaaaaagcgggaggccaaggccgtcgatgtgctggacatggtagtgcgcgccatcggcgacaccatacaaatcctggctcagtccgttgatccgcgactcatcatcttgggcggtggcatggccaaaaccggcgaaccattggtcgaggtgatcacggctgagctgcgccggcgcgaatcgcaatgccgattcctcgaaacgctggacctgccggcccggctgcgtctggcacctgtcggccaaccagtcggagccatcggtgccgccatggcggcgtagcctggcatagtgccggggcatgggagatgaggcctcagatttgtctccgaggccccatctcccacgcagtcctatatcgctttatgtcgtgctgtgccgcgcttggtcttgcgcgtttcgttgccggggtgaccggcttttatttggccaagtgttggaagaccacggcgatggcctcgccctgtacggtgatgtcaggtccgcattcgcagcgccgaatcaccgtgtgtttgtggaaggacgaggatgtggcggcatccagatattgctgggccgcgccgatgaacgtcgcgttgatgatgttcggctggccatagacgcatacgtctgccatatccaaaaggcccacaggcatggccagggcttggccaagatagcggcccgcccgagcaaggataccctgatgctgctccacgtctgccgcgctgagttgcttcttcaatgcggttccggaaatcatcgtctccaagcaaccgtgcttgccgcaagggcacagcggcccgtcaagatcgatggaaatatggccgagctcgccagccgcgtgcagttcgccgattaccggcgtgtccgagagcagaatcgccgaaccgatgcctctttcgatgcgcacgaaaagcatattcggcccgccttggccaaagaaacgttcggtgagcatggctgcggtggcgtcgttgctgacgtttacttcaagtccgaaatgttcggcgattggcgtggacaggtcgagattgttccagccgcgcatcgtggaggagcggaccacgccgttgtctaccacgccgggggaggcgactccgatgccgatgacctcgccatcggacatgcccagcatcttctcaatgagctcgatgatcacatccacggaaacgaatgagccggtgttcagggtgacttcggcgtgacgcagcggctggccgagcagattggtgactgcgccgtgcagcaggtgctcctgcgtcaggtcgatgctgatgatgcgcagtcgatcgatatcgatgctcagcagtgtgcctcgtttgcctttgccgccgctgggtgcctgaccggtctcgcgcagcaatccttcctccagcatccgaccgaccacatcggaaacggccacgcggctcaatccggtgcgtcggccgagctcggcgcgcgaatactggttggtggggaacaacaacctgaagataagttggcggttcttgcggcgcacatcggcgggggaagccttggccgcatggtcgtcggtcgttgtgttgagaccgagatatgacatgtttcctcctacctgatggtgagcgagtggacggcgattgttgttccatacacagcttagacggtgaagcgcaatttcgtcgttgaaactgttatgaaacttcactaataaattccagtgtacctgtgtgaagcgtcaggaaacaccgtgagtgttcataaggtccaaaattgttactatcattaacaaatagcgaatcaccaatcggcgctacgccgaacggtggttggaacgccgcgcggcatccggacgtgacaaggatgttgccattatccgcaagacgggcggcggtacagcgactcgcatcgggcgggccgtacggaactggaggaaaccgatgccggaaatcatcattgtcaagaacgaagccgaggccggcgagatttacggccgttgcgtggcggacctgatcaaagcaaagccggacgccgtgctgggcctggccactggctccagcccgctggccgcctatcaggcgctcgccaagatcgtcaaggacgaggccattgacgtttcgggcgtgcgtggtttcgcgcttgacgaatacatcgggctgccgctgacccatcccgagtcctatcatgcgaccatccat

SEQ ID NO: 1005 - DNA, 26598 bp, Unknown
  R117_24m  MAG No. k141_32805
ccattggcggcaccgggcgtccatgtgaggctgaccgcgctgtcctgcggttccccggctacgggggagagcagtggcggctcgggcttgtcgatcacggacacggtaatcgatgcggtgacttcacgatccttggacttgctgccgtcttgcacggtgacgagcacggtgttcgtggaagcacccggatcggatgcgacggcgatggtgacgtttccggaggcatcgcatccggcgatagtgagtttggcggcgtcatccgccttgcagctgatgacggtcagcgaggaatcggggaacggattgtacgcgccggtaagcacgttcacggcatcgctggcaccggccttgatcttcagcgtcttgtcgccgacgcgtgccagcggacgggtggaagacactacgcgcacggtcacaccggcattcacggtgcccgcgccgtatgcgatttgcacgggaatggacgcggtggtgccaggagcggcatccttggtggcggaaacctgcaagctgccggaacgggacaggttagcggtgattcgcccggacgatgagcttccgccggaatacgtgtattgcttctcgtcgtcatacacgccggacggtgcatgggtgagcgccgtcagatcaacggtcttgggggccgcgcccgcctcgacatcaatagtggaggacgagaacgtgggcggcggcacatcgcggcctatcaccgtgatctggagagtgatcactgcggaattgatgatcttggtcttatccgatccctgcttgccatccacagcggtaaaggtaatggaggcggggcctgcgtagtcttttgccgcagtgaacttcagggtcttgtcgttcacgtagaaatcggagttggaagccttggtggcgctgacggaatcagcgctttcgatatacggttccttgccggcgccgacgcgaacatagtcattgatgttgatttcaatggtctcacgcgaattgaccttcaattccggtgccttgggacgcaacgtgggcggaaagacaccataggccggtacctggatgaacgcggtggaggtgatgttgtatttcgtattggtcaccgtgtaaggcacggctcgcgcctgtgacgtcaggtcgacggtgatggtggtcgaatgctcgccgcccttgacgtgagcgtgagcgctggcggagggatgcacgccgaccttgagctcattggctgtgccggaaggattggcgatccactgggaaacatccacatccacggacttcttatcgatggtggcggcggacggcacacgatagtcgtaggcggtaggcggctcgatggcggcattcggatccacgtttaccgtgagggtggccgtatcggacaagccggccttgtctttgaccgtgtaggcgatataggcggtggtggcgctgccgggcgtggtgaaggagatcatgttgtctttcgcgctcaccccgtcgagaccttggacctcgacatgcttgtcgacggtcagattggtgttgtcgccggagatgtcgttctgcgcgaccggcacggttgcggccgtattgggcctcaacgtgatttcgtcatccctggcgtatacgccggagtcggacgatccttggaatacgcccacgcggatctgcgcctgtgcgcgctgaccggtccaatcctccacggcataggagaaggtgtcggtgccggacgaatccggatacgcttcatagaccaagtagtcggaaccgacttcggatatgcggcccagcgtgggtgccttgttgcccagacccaacagctgatcgtcgtcgccatccatgtctatgccggtcagtgtgatggggatgcggaccttctgtccggcggcaacctgcgcttcggcgtcatgcggggttggcgcggccttgctcgctgcgtcgctcttatgcacggtaatggtgatattggcggaagccacattacccagattgtcttcaaccgtataggtgatggggaagttgccggtctcgctggatgcttggtagcggaccgtgtctccagagacgaaggccagacccttgaacgtctccttgtcgtattgcaggttgttcttgagcttgaccgtggtgccatccgagtaggccacatggtcaagcacatccacggacacgatgccgccggtgcgcacctgggcattgatattgctggccttgggcactgaattcgaggtggtcaaagccggtggctgcaacacgatggtgcccttggcggttccggaggcgttggccacggtgtaggtaagggcgacgggtttcgtgggcacctgacgcgcagtgatatacacgcgcttatggctgacgagaccaaccttgatgccggagtcggccggtgcgctcaccgtggtgacggacagcacgccgcccatcggatcgacgtcattggtgagcggctccacaatggcggtattatccgcgccaagcagggcgacatcgttggcggcaaccggtttggcggcctcgccggtggcgggctgtacctcgacgcgagccaatccggtggccggaatcgagccttgagtaatggtgtagggcacataataggtgccgggattggtggccttgaacgtcaacgacatatccgccgcattggtggtcgtcgaagcgccgttgggcgtatccacctgagtcagctgtgccggctgcaaggaagtgccatgcacgtaagaggacagcttgacgacggtatccgtgttgggaacggtggttttcgctaccgggtcgatgaccgcggccaaggtgttcgcgggcttgaccgagaaatacaccatgccggtgccggtcgccgtgccgtcggagacggtgacctcgacgcccacgcgtcccgacgccagcgcaccggtgttgaacgtaagctggccgtcggctcgggtggacacctgcacctggtcggtgttctgggccacagcggagaccagagtgagcgggtctccatccggatcgttgaagctgctcagcgcattggcggtataactggctccctgctccacatcgatctcgggaggagtgtcgaactgtacgggagcgtggttgcctccatcattcagggttacggtcaccgtggcggaagaggtctggccgcggccatcggaaatatcgtaagtaaaggtaacggtgcctgcggatgtggcggaggcatcgagttgcagataccggccgtcgtaaatcggcgaaatggtgacatctttgttgtttggtgcgccaaccttggtgattttcagcacggaacaatcggtctgctcgtcattgcgcagcacgtcgagaatctgttccgaaccggctcgtgcgccgatttcatcatcctcggctttgatttggccggattgtgcggaacaggtcttggagaagtcgtggtggttgttggccgagtcgttgttctgctgttctttctcggtctgctcggcctgtattttgttccactgtattttgatgactttggtggaatcctcagggttccacacattgccgttaaccgtgtcgttgagcaccacaaggcgatggttggtgcggaacaccaattcggaagtagtattgacggattcgagggtttgcggcttgacgctggtatccgcgggggagcaggcgcgaatgtagttgctggccttctggctccaagccgagtacacgcagcccttggacgataccggtcgtgccggattcgccttgcccccgttggctatgaaattcgccttggcattggacttcaacgggataagcgtaaggcctctcggtgatgccgcggccacccaatcggactgtacgtcatcggtgggaggctcctgaagggtgagggtgccggtcgtgtcgacatcgacgcggccgcccttgaatatgacggttttgccggttgcgattaccggcgtgctcccgatgacggtaaagctttcaacggtctgctgcttgccgtcggtcagcgattcgagggttttggccttggcgctgctgggattgtcaagacgcagcaccataccgtcggatggacggtatccgtagaccttgccatcgtgggttactacgatgcgcccgccctcgcccagcttcattttcggatcggaagtggtgggggccacggaatcaaggttttccgacaagccggtccacacattgccggtcttctcgttgatcagggctacggtatccccgccgaccacagtggtggtgttggctttgatgtcagtcttgacaccggtgctgaccgtggatgccttgatggtggaggctttggtcgtttcggtcaggatggtgtcgccattatgctgcgcgatgtcgaatcgtggggcggaggaggagacgccggcgtcggcctccttgttctttacgttgaatcgtgcggccttctggttcttcagcgaagtgacccacacggtgccatcgtccagttgcacatggcggcgcgtgacggtgctcatgatcaccgcgccggcaacaagtcccagaagcagcaggagcgtgattacgggaaccgtccacgtatgccctccggagggcataaggcggcgcaaagccgcgctgatgcgtcggcgacgatcgtatgactgggacgatgtggccatctgaactccctgaaccctggtttctctggttgctagtgtaatgacaacgctttacggttccaatacctgccgttcctgttgtccatttggtgaattcgccactgccggtcgcatgcctgatgcgatacgcaatgccaaggtggtatgcccggcagtggcgagcggatcactcttgcggcttggccgcacaggcgatggcggggctgacggacatctggcggttcttgcgcacaatggacacctgaatgcaggtctgcgagccttcctgcgcgttgacggtcaccgtgggatctgacgttgtgacggtttgcgcgctctggtcggtattgctgccctgcactatggcccacgcataggtatcaccgctttgcgggtctggattcgtccaggtgaacgtcacggatgacccatccgccgcataggtgccgttcagattctccggggaaggaatctgggcgttcgcggtatcggtaatcacgtcatcctgattattgcggttgttgtcatcatccttggtgccgggcgtcgccacctgtttggtatctgatccggtggcgctgtccatgcggggaacgaccacgaaggcgaatatcagtgccgctgcggtgatcgccgcaagtataccgacggtaatgcccaccggtttgacccatcgccgtgacgaatgggtgatctgatctcgctggtccgtggcccggcgccgacgctcgatgtctttggggtaggccggcatcccttccacggtaacgggagtggcatgcccgaaatatgcgaattgcacacgctgcatggcgcgtgcgaactccaacgcggagtagtaccgctggtcggggtccttgttcagggcccggcgcagcaccgcttccacatcggccggtacgtcggggcggttgaggcgaggcaatggctgattgacgatcagcgaaatcagttccgattgcgaacgtggatgatattcgtgctggaatggcgagcagccgacgaacatggcgtacagggtggccgccagtgaatagatgtcggcggcttccgaaccattggtcagatgctgaagcacttcaggcggtgcccacggcggcgagaatccggtttcggtacggtcatacacatcggtggagataccgaaatcacccagaacaggcaagcccttcgaggtgatgagaatgttgctgggcttgatgtcgtgatggatgatattgctgcgatgcgcggtgaacagcgcgcttgacagcttgatgccgaggtcgagtacctgctcgcaggtcatggaccgggccttcatgatgctgttgtaggtgccgcccggcgcatattcgatgacaatgtagccatggccatcggaggtgacgccggcaccatataccggcagaatgtacgggtgggatgacagcttggccatgaagttggcctcgcggttgaacagggcagcggcccgtgggtcaagggttttggcgctgacctttaccgccaccgggcgtgcgggcatacgctggttatataggtacaccgtggcggtggcaccgcttcccaacatctggacgaaatcatatccgggcagcttcggcggcctcatcggaatattggccatctgttccctccctccttggaaaatgcgctctccctgcattcgttctacaggataccgtcaagggtacgattcttcgtcgggttcggtaaaatttttccctctgtgacggtcgggtttaggctggagccatgatgacgagacttgaacctggaacagtgctggacggcatcgaccgtgatggagcggcgaggctgattgtcggcacgcctggaagcggcaaaaccgaattcgccttatcggtgttgatggcggggctgcgccgctatggtggcacgcaggcggtgatggccgtatccggccgtgtggccgccgacgcattgggcaatcgggtgattcgtgagctcgggttttccgtgcaggccaggccggtcaccacgctgggtgccgtggcattccgggccatatcagcttcgcgcgagggaactggattgccgtcgcctcgattgttgaacggtgcggaacaggatgctttgctgcgtcaagtcatggccgtgcatctgcgccatgccgtagcgggagatgattgcggcacctgtgatttgctacgcgtctactttgcccaggatgactgggcgaaactcatacgcgatgccggtgccggcgagatgcccggctcggccgcttccgcacaatcaagcctctcgcaacaagggtcggattcgctgtctccgacgtcggcaggcggctcgaccagcgcggataggttcactcgcggtatttcagatgcgtttatcggccagttgcgcgatatgctggcccgattggacgagctcggtgtaggcgttcacgaagagccacgtctcttggacgccgtgatggaggacgcgcgattgtcggtgcaatggcgtttggctttcgcgttgcgccgtgaatatattgcagcccaaagcgcggcatatccggggcaataccgtttggatgcctcgtatttgctggtggcaggagctcgtgtggtgcatgaggcattcgccgccgatcacgcggatgattccgaccggcctatgcgtatggaggcgttgggcttgccccggctgctggttgtggatgatgttcaagacaccacgctggccggcatgcgcttcttggaggagttggggaatgccggcgtcaagttggtgctggtcggcaacccggatgaatcggtgcagaccttccgtggatcgtatccggaatatctgatgcgccgtgccgtggaagggtggctgaaagccaaggaagaacagctggttggcggcagtaccggcgctgatcagtcgcacatgacgatggctgatgtgatcgcgtctcgtatttcgctgtcgattccctcgccggaagacgagccgctgcctccggccgagcgtcccggcaagctgaccgccatgctgggcggagtcgatgcagcgaattatcagtcggacggcacggtgaccgccggcctgtaccgatcctcacgtgaggagctggatgatgtggtctggcgcatcaagcgggcgcatctcgaccggcatattcggtggaacgacatggcggtcatcacccacgacaatgccgccgtgcggctgttcggcgaacgactgcgccgagatggcgtgccggtgcggtattcgtcggtcacccgtcctttgaaggacgagactttcgtgcagggattgttcgcgcttgtggagcttgcccgattgcgtgccgagggaatggcggaatgccagatgacgttggcttcctgcgcggcatatataaggactagagtggccacgttgatgaacggcccgttggtgagtgccgggggcagacccggtcaagggcgtcctgcaaggctcgcgccgatcgaatcggccatggggtcgttggagtcgctggcgcatctcgccacggatgatgccatgctgacctctctgacgacggcatgggagacattgcgtgaaacataccatgaaacacggcgtgaaacaggtcgtgaaacatcctcatcagtggttccgtcgccagtgtctgtcgaaatactcggtgaaccgtccgacgatgacttggcctttggcgttgacgcgctgtacgtgatgcttgccgttgatgatgccgccgcgccggcgcaggctgcgctcgcatccatccatgcggtgcttggcaacgaccctcaggcccgcgcttttgcgaacctgtggcatctggtgggcagcgttgcttccggcttggagcggctgccggcaagccagcgcgtacagccgcgttatgcactgtctgttgcctggaacgccaccggtctggcaccggtctggcagcgtgcggcattattcaacacggcagaggggcgcacggccaatgaccggctggacgcggcaatgcgcctgttccagttcgccgatgattccaccgccagccgagacatcacgtcattcatggcacaggttcggggcatggaagtgcaggccgattccttggcccacatagggccggtggaagacgctgtgacattgaccacgccggcaggcgcggccggacgccactggggatatgcgtggataccggtggtccagcaagacgtgtggccgaacctcgccgggcgcaacaccatgttcggtggtgaagaccttgccgagctcgtgctgaggggagcgcttgaagaaagtgacaaaaccgggcatgatccgcggttcgcggctgtgctgtcgggcgagaagaagggtttcctggtcgcgctgacccgtgcacggcgaatcatgatcagcgcggtatggaacgacagcatgagcccctcggactttcttttcgggtatctgccggaatactatccgcgcaaccggcaacaggcgcctttcaccacagtgggggcgcatacaggatccgccgaatatgatctggccggattggacgccgacccacgtgggttggtcagcgccgcccgcgcggttctggccactgctcaaccgcagcaggctgccgcaaaggacgccgcggttgcgttgacactcctgtcggagcatggtgtgcgcgccgcaaatccgcagagctgggcgttcgtggaatcgccggcccaatcggatagcgcgtcatctggcggtgcgtcatctggcggtatccaaacggggaaaggcaagacggatgcgcaggccgcacccatggtcaccctgtctccatcggcggtcgacagcctatgggcatgtccggtgtgctggatgctggagaaccggttcgccggtcctcgccccagctccgtggccaccagcttcggaaccctcatccatgcggttgcacagcaaggcagcgaggaagggctggaccatctttcccacaatgcccagacgttggccatactgggcttggactccacggccggcacggaacgccgcatcgaggctgtcacggcacggcttaatgccatctatcagagcaaacgccccgatccgaatgccatagccgacacccggaaccgctatgaggccacccgtaaggacgagtccgcggcagatgccctgcgcaacatcgccgattactttgtgcgcagcgacgccgatccggaaacgtatcttggcaagaactccagcaacttcagcattggcgcattggccggtgccgaatgcgaacgggagtttgccgcacgattcgatgtgcgtgacatactcgacgcatacaatgccgtgcccggcatgcacccgatcgatcggaacatgctggtccgtctgatgggagcactggtcggagggtggccggaaggcatggacgagcatctgaccgtgagactgtccgggcgcatcgaccgtatggaaacccgcgtactcgcagacggcggcgaatgcattcgcctcattgactacaaaacaggcagaacgcccacggtcaaacagattttcaatgatctgcagctcgtgtgctatcagcttggcctcgtgttccccgaagacgggccgcgcggtgccaaggcacttgccgcaatgccgcatatcagccaaagcgcgctgttccatgtcgggcagaatgcggcaccagccagaagctacgccccggaaggtgccttccagccgccgctgttcactgatggttcgttgaatgccgaaccgttcacgccacgatactggtataaagaccccaaccgtttcttcgacatacccgccatagatccggctactcctcccgaaggtgtgagtgccgaagcgtgggcgcaattcgccgcgctcgccggtacgcagacgttatggtcgctgaccatgatcgcccgcgtattctatgccgcggcggccagcaggtcggccatcatcgaggcccatccgcaagacacccatatcggattctgccgtatgaagaacgtctgccctgcctgtgcgggccagatcgacacgattttcgaaacgaggcaagcatgagcacgttcactcccagtgcggaacaggccgccatcatcgatgcgccagtcgatgctgacgtactggtggttgccggtgccggttccggcaaaacctttacgatgacccaacgcatcatcgcgcttatcaatcgaggtgtggcacctgaacgcatccttggcctgaccttcacacgcaaggccgcaggcgaactgctggaacgcgtctccgccgcagtggccggtgatatggcgggctctacgaccgccacggtgtctgatcgggcattcctcaagccggccattttcacgtatgacgccttcttccagaccatcgtgcgccaatatggactgcttgtcggattcgatcagaacacgcaaccattgagcgcagccggagcgcttcaactggccaccgaagtcatcgacagtcacatggatctggcgttcagtgaggattttggcgccttctccagtttggcgaaccgtgttctggcgttgtcggatgccattggcagtgccatgatcggtgccggctgcaccagcttcgatgatgcgatcaatcaagtacggcaatgggattcggcattcatcaatcgattgcagcaagccgtcgtagacgaacccatgcccgaggacgagccgaaaatccccaagatcaaacgactgaagaaagataccgacgccagctggcaagccaagctcgatgaccgtgccgaacatttgcacgcccgctgcgcctatcattgcggtgcgctgctggagaccacacgcaaacgcgatattctgctccagctggtggaggcctatgcccaagccaagcgggaacgcaatatggccgaattctccgacttcaccattgccgcgtatcagcttatcgagcgcttcccctccatcggagagcgcacgcgccgcaggtacagccatgtgctgctcgacgaatatcaggacacctccaccacgcaggccgctctgctggcagcactgttccatgtggatgcgtcacggaggtccgccgtcaacgcggtgggtgatccgttccagtcgatttacgcatggcgtggtgccagccctggtgcattccgtatgttccagcaagatttccacctgcctgccggatacaagccattcccgttgtccgtcaccaggcgcaacagccgtatagtgctcgaagccgccaataatctcacgctgccgttgcgctccaatccgtcgcgtccctccagctcattgatgcgtgaggtcgatgtctcatcgctcgaccccatgcctgatgcccccgaaggaacattgggagtgctgggcttcgccacggccgggcaggagatcgacgccgtagtgcgtttctgcaagacggccatcgcacggcaccgttccgcagccgaacaacaggaacagatgccgggcgaacagaaagcgccggtcgccgtgctgtttcggtccaaatcacatatgcccgaatatcaggcggcattggaacaggccggattgaccacattcgtggtcggctattccgcgctgctggaacgtccggaaatccgcgatctgatggcgttgctgcacgtggccgccgaccacaccgatacgggatcgctgatgcgcttgctggccacgccacgattcaccatgtccgcagcggatttgaccatgttggcccgttttgctgaagaacagaacatggaacaacgcttccaagcattggtgcaggccggccttgcccaaccggatacaccagcgaatgaatgggcggctgtggtgcgtgagtaccgcgatcaggtggccaatgcggtattcctgccagacgtattgctacgcggcgacctggtaaaactgcttgaacggttgagcgcacacgggcgcaacgccataacccgggccgcggtgatgctccgtcaggtgcatgatgccgtcgggcggccactgggcgacgtgattcgcgccggcatagaagcgttggatcttgacatcgacaccgtattggccggtgtgctgcataatccgcagcaccgcgccaatcccgctttggcgcatatgcctatggatgcgattgtggatttggtggatacgtacacgcaagagattgccgctgagcaaactccctcgttgcatgggttcatcacatgggtggatcatctggcttcggtggaggatgaagccgccagtctccccgacgctccggtggatgtggaactgatgaccgtacaccagtccaaagggttggaatgggatgccgttgcggtagtggggcttaccgccggcggattccccagcaatcagggcgaccatctcaagatcgtgctggacgaacaccatacgggaggcgccgagcaaggtcactggaccgcacccgaatatcatgagaccgccgactcctggctcaccaaccccaccgccgtgcccgtgcctatgcgcgccgatgccggcattttgccgcgattcccccatgatgccgatgtggaagccgaccccatcgcatcgttggcggctttggatgatgtggagcttatcgatgatgaagtgttcggctccatgcgcgaattcggcgatggcgtggaagaagtggatgcatccggctggtatttgacgcaggcggaggaatatgggcgtcggctgcatgccgacgaacgtcgattgatgtatgtggcgcttacccgtgcgcgggaagatgccctgatgacctattgcgcctatacgggcgaatccgggcgggacccgtcagtggtgcccaaaggctctcgcgccgctcagccatccaatttctggcttgaagtgcatgacgcgctccaagcccgtgaacatgcgatatcggctcaggactgtgtggaacggttgcaagccgccaatgccgggaagcccatgctgatctcggcgcaaggcgaagcgattgcccctcccgaagggttctttatcggagagcatgccgcggcatacagtgacgccgtggtgggggaggcgtggcaaacgccgattacgcagacgaatgccgccgccgaattgccgtggccggctaccctcagcgacgcggtgcatgaacagctgtcacgcggcatcgatgtcatcgccgcagattcctcgtcacttgagcagcaccaagacgccggcccactcctgcaacgggcacaattgctggtggacgacgccgatttgatggccgatgccgccagcggccagtcgcttgatgaggcagtcaaagccaaggcgcaacgcgttctggccgcaggacgccagaacgtgacaagcctgcaagcccgcgtaggtggcatgaacgaacgggaggagcgcctctactggcgtagcattatccgcccgattccgcgcatatcgtctccggcggccgaggccggcacgcagttccatgcgtgggccgagcaattcatcaatgccggtaagccggatgaagcggtactggcatatgaagccgaaccaagcatgccgcatacaggtcaggatgcgggattcgtttcccgggaagccatgttggccgatttggccgaacgggagcggcaatgccgcaagccgtccacacggcagcctgctgtcccacagcccacggctcaacaatccgcatccgccgcagccgctgcctccgccacttccataagcagcgacaatgccaccgagtccaagctggtggcgtggcagcgcagactggccgaatcatcgtgggccaagcgcatcccggcgtggacggagcgtgccatcgtcgtggacgtgccgggcgtgggcctggtcaatggcaaactcgatgcggtattcatcggtggacttgacccgtccagcaccaccgcacgctttaccgtggtcgactggaaaaccggtcgtcggcccaccaagccagacgacatcacccgcaaactcgcccagctcgacatgtaccgactgctgctggcagcggtcgaaggtgtggaattggacagtatcgacgccactctctactatgtcagtgagcccgacgagggcttgcgcgagcttcacgcccgcgcgaaaaccaaacaggaaatccttaccgagttgagctccggcattcccgaacaatctgacaacgactgagcccaaaggctcatgacctgtacagcatcggacggccttcaccggtggagagaccttatgcatcgcaaggcatctccgacgatgaagacgactggccacgtaccggtccgcggttgaaacgcaccgcgtgacgttgctcgggaaccgctaccctcggatggcacgtgtgggcgggcgcacgtgccggacaacgcaccagtaaggagttattgtgtccacgactcgcgcggtttcgaagtcgtccgctgcccactcgccctaccagcgcctgttcatgctgcccggagccaaggcgttctgcctgtccggcgcggtggcacgattgccgatctccatgatgagtctcggcatcgttctggcgctcaaccatctctacgacaattggaccatcgccggcaccatgagcgccgcctatgtgctggccatgagctgcgtcaccccgttctacgcccgcgccttcgaccgtttcggccaagcccgcgtgggccggcttgcgctcgccgtgcagatcgtggccatgctcgccttcgccttcgcggcgttggtgcgcgtgccgattccgctgctgttcgtcctggccatcatcatgggtctgacgcagttctcattcggcgcattggtccgaacacgctggtcctatgcgttgcgcggtgtggaagatggtgaacagctgctcaacacggcctacgccatggaagccgccattgacgagatcgtctttattctggggccgattctggcggcttggctggccacctccgtgcacccggtatcccaactgttcgtgcccaccgtggcatgcggtatcggcggcaccatattcttctcgctgaaatccacccagccaccggttatcgtggaacaggtcaccgtggccgcgcacgatgacggcagccctgctgcaagcgaagatgccgaccagctgaccctgcgccagctcaaacgcagcggcgccaagcccaagagcgtattgctctatgccggcgtactgccgttgctcgccgtgttcatcgtgttcaatatgagcttcacgtccttcgacgtgtccattaccgccaccatgaaatccatgggacttgagcccttcctcggtctgcaattggcgatgttcgcggtcggctcgtgcatcggcgcgctggtgttcggctcttgccgactcaaaggctcccattgggcgcatatggtgatgttcctgtcgctgctgaccgtcggctacgtgttcttccggctgtcaatggacaatctcatcctgctgggcgtcttcgaaatcctcgccggcctgaccgtctcgccgacgttcgccaccggcaacctcatcgtcaaggatctggtgccggcggaatccctgactgaaggactgagctgggtaaccaccgcaggcacggtcggcacatcgatcggctcgtccgtggccggcattgtgcttgacgcctccaaccctcatgtgggcatgatgctgccattcatcttcacgctggcgtccgtgccattggcgttggccggatgggccttggccaagcggcgtgggtgaaacgggatcgggctatgcccgatggatggttggcggcttcgccggggtctctccctcagtccgcttcgcggccagctcgaacgcaattaatgatggctttcagccaactgaattattgctcactgtcgttcgccctcacctaaaaacgcctccggcgttttcttcacggttcggcttgtcagagggagctcgattctgtggacgggatattggcgtgagggcttggcggtgataggctgattgccgattggaaaacgttccgggtacattgccgggcaggtacgggtagacagggaagaagacatgatcaaggtttcggtggtcggagcaaagggccgcatgggctcgcacgtggtcgaagcggtgaacaacgccgaggatacgcagctggcgctcgcattggatgccggcgacgacctgacccaggtcaccaccgacaacaccgatgtggtcgtcgaattcaccgtgccgtccgtcagcctgaacaacgtgctgaccctgatcggccaaggcgtggacgtggtggtcggcaccaccggttggaccgacgagaaactcgcccaggtcaaatccgccatcgccaacggcccgaagcccgaaacccagaaggtcttcatcgcacctaatttcgcgatctccgccgtactggccgactactttgcaaccaaggccgcgaaatacttcgaatccgccgaagtcatcgaactgcaccaccccaccaaggtggacgccccctccggcaccgccattcacaccgcccacggcatcgccgaagcgcgcaaggccgcaggactcgcccccgtgccggacgccaccgaaaccgatggcggctcacgcggccaggtggtcgacggcatccacgtgcacgccgtgcgtctgcgcggcctcaacgcccacgaggaagtgctcttcggcaacgccggcgagcagctgaccattcgggccgacagcttcgaccgcaccagcttcatgcccggcgtcctgcttgccgtgcgcaagctcgccggcgacgctccggctggcctgaccatcggcctcgaccacttcctcgacctgtaatcgacccgcagtcgaccagtagtcgcccccgcatttcaggcagggaagcgcgccgggacgcgcatcacggcattgccaccggctccggccataatgccacgcattcagcaacaatcaaggtacgtaatataagagtccacaatgggaagtacggtgaacactatgagcgagcatgacatgcaccttcttgagccagcacctttcggccgcattctgccggctatggtcaccccgatgaaatccgacggcagcgtcgatttcgccgccgcgcagaagctcgccaaatacctcgtcgccgatggcgcggatggtctggtggtcaatggcaccaccggtgaatcgcccgtcacccatatggatgagaaggtcgagctggtcagggccgtcaaggaggtcgtcgacgttccggtgatttccggcgccggctccaacgacaccgcacacaccgtgcgtatggtcgaacagactcaggaagcgggcgccgacgcggtgctcgtcgtcatgccttactattcccgcccctcgcaggacggtatcgtcggccactacaaggccgtcgacgaatccgccgaaaagccgatcatcgtctacgatgttcccggccgtaccggcttgaaggtcaaggtcgaaacctacgacctactggccgaacttgaacacgtcaaggctgtcaaggacgccaccggcgatcttgcagccgcagtggagaagcagcagcgcaccggcctcgcctggtattccggcgatgacggcctgttcctgccgttcctctccatcggcgccgtcggcatcatttcggtgattgcccacgtcgcctccaaccccatgcagcagcttgtccaggcattcgatcgcggcgatatcaccaccgcccgtcgcctcgccaaccagctcgccccccttgtccacgcgttgaatggcgacggctatcaggccgtcatggccaaggctgcgctcaaggtcaagggcgttatcccctccaccaccatgcgtctgccgaacatcggtcccgacgccactcagcttgacaaggctgaagagggcatgcgcgctgccggactgctgtaagcccgaaacgctgcatacgggttgccagcccgccgcccctgcatgacagagcagaggcaccacaacagaaatcccaaaaaggttatggcacaagaacaaaagaaaacaagcaagaacacgaattctcgccgtcgcggttccgcgcgcggccgcaacgccaacggatccaacagccgtacgccgtcccgtaagatcaacgccacccggcaggccaccgcaccccagcaggatgccgtgctgatcgccccgccgaagtaccgcaagggctccatgcgcatcacgccgctcggcggcttgggcgaaatcggccgcaacatgaacgtgatcgaatacaacggtcacctgctgctcatcgactgcggcgtgctcttccccgaggaggagcagccgggcgtggatctcatcctgcccgatttcagctacatcaagaaccgtctcgacaaggtcgacgccctggtgctcacccacggccacgaggaccacatcggcggcgtgccctacctgctcaagctgcgtccggacatcccgctgatcggctccaagctgaccctcgccttcgtggacgccaagtgcaaggaacaccaccagaaccccaccaaggttgaggttgccggccgtgagaagctcaaggtgggccccttcgacctcgaattcgtcaacgtcacccactccatcccggacgccctggccgtctacgtcaagaccccggccggctccctgatcgacacgggcgatatcaagctcgaccagctgccgctcgaccaccgcatcaccgacctcgtcgaattcggcaagatcggcgaaaagggcgtggacctgctgatgatggactccaccaacgccgaggtgcccggcttcgtcaagcccgagacctccatcggcccggcccttgaccaagcgttcgcccaggccacccgcaagatcatcgtcgccagcttctcctcccacgtgcaccgtgtgcagcaggtggtggacgccgcccacaagtacggccgcaaggtcgtgttcgtcggccgttcgatggtgcgcaacatgtccatcgccgccgacctcggctacctgcacatccccgaaggcaccgtcgtggacctgaagcaggccaacgacattcaggacgacaagctcgtcttcatgtgcaccggttcccagggcgaaccgatggccgcactcggccgcatcgccgacggcaaccaccgcgacatccacatcaacgagttcgacaccgtgattctcgccagctccctgattccaggcaatgagcacggcgtctacaaggtgatcaacaagctcgtgcagctcggcgccaaggtcgtcaaccgcgacaacgccgccgtgcatgtgtccggccactgcaacgagggcgagctgctgtacatgtacaacatcgtcaagcccaagtgcgccatgccgatccacggcgagaaccgtcacctggtggccaacggcctgatcgccgtcaagaccggcgtggacccgcagaacgtggtcttggccgaagacggcgacgtggtcgacctgtatcacggcaaggccgcggtcgtcggctccgtgccgtgcggttacgtgtacgtcgatggcgattccgtcggcgagctgaccgatgacgagctggaaaagcgccgcattctcggcaccgagggcttcgtatccgcgttcgtggtggtcgacaccgacaaccacgaggtcgtcaccggcccgaagatctacctgaacgccgtggccgaggacgaaagcgagttcgacaaggtgcgtcaccagatcgtcgaacagctcaacgaccagatgatgcagggcacgcgtgacacctacaagctgcagcagaccatgcgccgcacgctcggcagctgggttgcgcgccagctgcaccgcaagccgatgatcgtgcccgtcgtggccgacatcgcccaggacgtcgaaaccgtagaaaccaagtagtccggattatccagggacgaccgtaaggagtaattgaagtcatgcccggttctaatctcactcgtattgaagccgaagaacgtaaggccgttatcgaagcgccgattcactatcacgtcgaccttgacctgacggtcggcgcgaagaacttcggttccaagtcgctcatctgcttcaacgcgaagcctggttcgtcgaccttcctcgacctgattgccgacgaagtgacatccatcgacctcaacggcaagtccctggacccagccgtggccttccaggacaaccgcatcgaactgaccgacctcaaggagaagaacgaggtcaccgtcgaagccaagtgccgttactccaacaccggcgagggcctgcaccgctcggtcgacccgtccgatggcaacatctacctgtactcccagttcgaggtgccggacgcgcgccgcgtctacgccgtgttcgaccagcctgacctgaaggccaccttcgatttcaaggtgctcgctcccgccagctggatcgtcacctccaacatgccggttgccaccatcgaggacgatccgcgcgaaaccctcgacggcaccctcggcgacaagccgaacgaaagcacccgtctgtgggacttcgagccgaccccggtgatgagctcctacctgaccgccatctgcgccggcccgtacgccgaatggcacaccgaatacctgaacgaagacggtcgcaccgtgccgatggcccagtactgccgacagtcgttggccaaggccttcgcgaaggacgtcgactacctgttcgacatcaccaagaagggcttcgcgttctacgccaagacctggggcgtgccctacccgtacgccaagttcgaccagatctacgttcccgaatacaacgcgggcgctatggagaacatcggcatggtcaccatccgtgactcctacgtgttcgagtccaaggtgaccgacgcgctggccgagcgccgcgtggtgaccgtgctgcacgagctggcccacatgtggttcggcgactatgtgaccatgaggtggtggaacgacctgtggctcaacgagtccttcgccgaattcacctccacgctggccactgccgaagccaccgaatggcatgacgcctgggccaccttctgctccggtgagaagagctgggcgttgcgccaggatcagctgcccaccacgcacccgatcgtcgccccgatcaacgacctcaacgacacctacgtcaacttcgacggcatcacctacgccaagggcgcctccgtgctgaagcagctggcattctacgtgggccgcacgcagttcttcgaaggtatccacaactacctgaaccgccacgcctactccaacgccaccctggccgacctgctgagcgaactggagaagacctccggccgcgatctcaaggcctggagcgccaagtggctggaggaatccggcatcaacacgatcgccaccggcctgaccgtaaacgcggacggcaccatcgccgaattgaagctcacccagagcgcgccggccgaacacccggtgctgcgtccgcatcgcctggccgtcggcttctacaacgaagacgccgaaaccggcaagatcgtgcgcaccgagcagttcgaactcgacgtggatggcgaaaccaccatcgtcgaggccgcggcaggcaagccgcgcccggcattcgtgctggtcaacgacgatgacctgacctacaccaagattcgtttcgacgccgaatcccaggcattcgccgaagccaacctgcatcgtttcgacgatgccctggcccgcgccgtgacctggctcgccttctgggatatgacccgtgacggcgaattcccggccgaacgcttcgtggacatgaccctgcgtcttctggccacggaaaccgaatccaccaccttccgttacgcgctggcctgcatgagcaccaccgcccaccactacgtggcgccagcccgccgcgacgatgtgctgcgccacgtggccgccgagctgtggaccctggccaacgccgccgaagccggctcggacacccagttccagctcgccaccgcctacctgggctatggcgaggagggcgatgccgcattcgccgccaacgcacacggtctgctggacggcaccgtgcgtcttgaaggcctcgaaatcgacaacaacttcacgtggaccatcgtccaagcgctcacctccgtcaacgagatgaccaacgacgacgtggacgcgcagctcgccaagaaggagaccacggaaaaccgcgagttcgcctacggcgcccgcgcctccatggccacggcgcaagccaaggaatgggcttgggatcaggcactccacaacgacgagctgaccaactcccagctcgaggccgtggcccgtggcttctccgccaccccgcgccccgacctggccgagccgttcgccgccaagtacttcgagactgtggactgggtctgggccaacaagacctatcacatggccgaggctttgctcaacggcctgtacccgggttacgccgatcccgccacgctggtcaagctcggtgacgcctggctggacgagcacattgccgccgacaacgccctgaagcgtctgatcgtcgaaaacgtggcatcctcccaccgcaccctcaaggttcgcgaatacaacgaagcgctctgatttccttctggctcccctcgggtgcgaggggagttgtcgcctcaggcgactgagggaatcgcttccgcgaggagctacgtccacattccaacataaaacccgcaaccaatcctcaacagcgtattctcgctcaaggccggcaatgtgccggtcgatgagcgacaaggatacggggaatgattgcgggcttttccataacttcattgctactgattctgttggccggaatcggcgcaggattcgtgggctatgcggtaggcgcatcgtcactggtctcatacccggccttgctcgcgttcggcattccgcctgtattggcaaacgcttctaacaccgttggcgtggtcggcacgggcatcggtggcgtgatgggcgcgcgcaaagaactcaaaggccaagcggtacgctccattacgtatgtggtcattggcgcgttcggcggggtggccggtgcgtttctgttgctcaaactcgacccgagtgtctttgaattcgccgcaccagtgctgattttgctgagctcgctgatcatcgccatcaatccgcgcggccgcatgcaggccaagcaggccgccgcggatgccaccgcgcaactcaagcacatcgaagccactgaagccaccgatgccactgatgccgccaagcgcgcaaccacccctaccgcacctcaccgcccgccggaacaactcgtgcagcccatgagccaggattcctggtgggtatggctgggcgtggtggcagtcgccatctactccggctacttcggcgcgggcgccggcaccctggctctcgccatgcttgatgccgccaaaatcggcccattccacaagatcaatgcattgaaaaccctgatcggcacaggcgcgaacatcagcgcctcagtggtattcatcatccaaggcgcggtcgattggccggccgccatcatgctgtgcatcggctgcttcatcggcgggtacatcgccccgcccatcacccgcaagattcccgcaaacatcatgcgcgccgccgccgtaatcgccggcatcattctcaccatcgatctggggctcaaaacctattgattcgtgccttacactgatgcagtgaagcatacagcatggccgccaaccgcagcgtggccgcagaccccgataaggtggccaatgtctggcatttggcgactgcggaacctgagcgcctagaaaccaacgcggtaggcaaagaggtgagtgacttcctcgatccgccagacacgtcgcagattcacggcgttgcgtgccatgctgattggtggttcgcggcgcgagcaggtgctgttcgccggcgttatgaaggagctactcgcgcccatcaacaatccgcgatatgtcatcatcggcaaggaatggggcgtgcgcacgtacggtgtaagcttcccatgcccgtccatatttgcccgccgccagcaggacgccgaaatactgcgccggcagttggaccgctgcctgacgcattgcaccatggtatacacccgcactgaggaaggccggcgtacgctacttcgttgccaaacgcgttctttcctcaaccgtgacgaacaactgccgcgcatactgaccacaacatcggagtgatagatcgttgcatgcatagccgagaccactccggtagaggagatgccgttgggcatgttcaccgcatggctcagcgtgttcctcgccgtcgtgttgtatacgatcacgtttgccggcccattcgtgctggtacgccgtcttcgttcccgcgccagagcccatcgacctgcccggcatgcccgttaaccgatacttctcattgttcgtctatcgagcaaggtggcacgtacgctacttggtataggggagagtttctcgctgtctgtggtggaaaatccgagttttattatctgagtcagtgctttgggtttgcgttttgggctcgatttactattggacggcgatatccggggcgggcggctagctgttggggttcttgtcgcggctgtagatgtgtgttcggtctatcggtgatgcttgtcctgttcgtggaccgggcgaagtgcgggacgacgcgcggatttcgcggtttttcgtctgccgtcccgcagagagcccgggggatgattatggtccgtaacggggattggcgtgattgcgcggttctggcggttgatagtgtggaacgccacgaacgtcaaacgattgatttctctaccatcccacgttcctgcgggacgccgcgcggaaaccggccaaatccgcgtgccgtcccacaggcatgaggctgtattcggccggccactgtccatggcggacggacgaacagaccccactggccatcgtctgcgcttctgcagcgctcaccccggccttccacggaaatcatgacagcatgaaggtgacgaatggcctggcttgcctgtggacgccgatcaatgtgtgcgacaatgattcgcggtacatggcccctggcgctggagtcgcagatgctgcttgtgtggcacaggagctgtgctggtacgtgtgatagccggcttgttgtccgtactgctgactgtatggttgccttacgaagcggtttttgatgagagaaggttgatgatgtgggatcgtgtggatgctgttgccggtgcggttgttcgtcggcagttggattggccgtggtacatgctggaggccgtggtgttcgtcggcgtgctgtggctgctgaatgctgataaatctggttttcctttctgggtgggtagggttttccggtacggcattgttgtctggtgcgtgttcgtggtggctggttcgttgctcggctggcgtatggtccgtgtcaggcagcgcatgtggccgacgtggcggtattggtatcgcaacggcgtcatcgcgtcgttcgtggtggcgtgcgtttgcattgcgatgatgtgttgggctttttccgtggtttcggggttcctgtgctggttgagatccgttatgagccggctcccggagtttcttcggtcacgtattcggtccatgcgcgtgattggcaggccaaacggaccgtcgatgctggaagcacggtggtgcttcgtggcgaagccgtgcgtaatatgcgggtgaacaggttctacagcaagggaccgtggctgacgttcacgctgaatgtgtatgacaataatggctttttgagtaattacgccatgcggtatatgcaggtggtggtgttgcctgtgccggctcgttcgcagggggtatgcgtggtgctcggtaagcgatttgttggggcatgcggttcggccacagttggtggggccgccgcagaatgtgttgcaggtattgtccgctcatccgttgcgccccaatgtgattgttgcttcggggcgggcgtatctgtgggtgttccggtgccttgccaggccggtgaggtcggccgggagtatgagcgtcagaaagcggcgtggaagaaagtggagcagtgcaaggcggatggtggttcggattgcatgaagtattccgccacgaacacggctgatgagaccgacggcaaggctgtgctgccggataccggcgatgggaaggatggcgtgaagtcgtccggtgtgccactgtgggtgtggtttgccgctggctgcatgggcatcatcgtcgtggtcggcggcatcgtgctcgccgtggtgctgtcgaagcgcagcaagaaaggctgttcacggcatggcggccctgcgtcgggcagggggccgttgccgccggcgaacccgtatccgcctcaggtgcccggtgtcaataacggtatgatcccgccgccggccgcaggccaatacgtgccgcaacagcaggcaccatacccttcagcgttcccgcaacaagcgccgtatccggcag

SEQ ID NO: 1006 - DNA, 8457 bp, Unknown
  R117_24m  MAG No. k141_33269
catgcccaattcgcgcatcatcgcgttcaccgcacatgccaccaagctctacaccgaggtggaatacaagccgaccgacatcctgctgttcggccccgagcccggcgacatccccgacccgatggacatcatggagggccctcatgtggccgaacaagtgcggctgcccatgcgcccgtccctgcgttccctgaacctcaccaattgcgcgtccatcgccatctacgaagcctggcgccagctcaattttgcgggcggagcgtgaggagaaggcccggtgggccttcgagtagcgacgccgaacgaacgccgacaggcgcgagagcggaaacactgagcttcgcgcagtgatgaacgctgaatataaggctacctgcgtttcgaggggcggatttggcatccgccggaggtctactgccgcttcaaggggctgtcaaaggacgagaccccgagtatggccgttgaaatatcaatgcttgtactcggggtcttcatatatgccagcccctcgaaacggaagtagacctccagaaaggtcggaatcagcccctcgaaacgggaatagacctccagaaaggtcggaatcagcccctcgaaacgggaatagacctccagaaaggtaattcgagctggtatctgccttcaaagaggtacattcgagcgtttgcagaatgctatctgccttcaaagaggtaccgcaatcgagaaaccccgggtatgagtgttgatattccaacgctcatacccggggtttccgcatataggcacctctttgaaagcagatagctctccgcgaggggccaaatgtacctctctgaaagcagataccctaccgaatcaattcttgaagctgtgaatcggcgcagggattcggccgccgcgggtcacgaaggcctcgcagctggtctggttcaccggaatgatcggcgcatagcccatcaggccgccgaagttggccatctcccctacgcctttgccttccaccggaatcacgcgcacggcggtggtcttctggttgaccatgccgatggcggcctcgtcggcgatgatgccggaaatggtggctgcggtggtgtctcccggaatggcgatcatgtcgaggccgacggagcacacgcaggtcatggcctcaagcttttcgatcttcaggcagccattggttgccgcgtcgatcatgttcttgtcttcggagacggggatgaacgcgccggaaagtccgccgacgtaggaggacgccatgatgccgcccttcttgacctggtcgttgagcatggcgagcgccgcggtagtgcccggtgcgccaacctgttcgaggccgatcttctcaagcacttcgccgacggagtcgcccacggccggggtcggcgcgagggaaaggtcgatgatgccgaatggaatgccaaggcgacgggatgcctcctgtgccaccagctggccgacgcgcgtgatcttgaacgcggtgcgcttgatggtttcgcacaggaactcgaaatccttgcccttggcctcgtccaatgcacgggagaccacacccgggccggaaacgccgacattaatcaccgcgtcgccttcggtcacgccatggaagccgcctgccatgaacgggttgtcgtcaggcacgttgcagaaggccacgaacttgacgcagccgtaggagtcgttgtcggcggtgcgctcggcaacgtccttgatgatgtggccgagcagttcgaccgcgttcatgtcgatgccggtcttggtggaaccgacgttcacggacgagcagacgatgtcggtctcggaaagggcttgcggcagggagcggatgagcaactcctcggccggggtcatggacttggagacgagtgcggagtagccgccgatcaggtcgacgccgacctccttggccgccttgtcaagcgcgtgggcgatcttgacgaagtcctcgctcgtcttgcaggagctggcaccgaccagcgagatcggggtgacggtgatgcgcttgttgacgatcgggatgccgtagtcgcgttcgatggccttgccggtggaaacgaggtccttggcataggtagtgatcttgcggtagatgttgtcgcaggtcttgtcgacatcgtccgaggcgcagtcgagcaacgagatgcccatggtgatggtgcggacgtcgagcttctcctgctcgatcatctgattggtctcgtggacctccatgatgttcagcatggtttgttccttacaggatatttaaagactagtttggcggtcaccctcatcagagggataaggatggctccgtcagcggaaagcccaccgggctttccgcctcctcgcgtgcggcggcctgctgagcgggccgcctcaaatacggtgcatcttggtgaagatttcctcacgctggcagcggatgcgcacaccgatgtcgtcgccgaggtcctcaaggttgccgaccatcgcgccgaagtccttgtccgcgttggcgtagtcgacaatcatcatcatgttgaagtaaccgtcgatgatggtctgggaaatgtcaagcacgttgacctgatgttcggaaaggtatgtgcagacgcgtgcgatgatgccgacagtatcctgaccgacgacggtgatgattgccttgttcatggaactccctaaacgtgaggtgtgaatatccagttaccgtcttggcgaattgccggacgtgccctcaagtatagggaaggcacgtgccaaaacacgtgcctttcgtctgttttgccttacatactgagatgactgccggttaccacctaccgctgcagcaactgtatgtcaccgccagatgccgtcaagcacacgcacatccacgcaatcgaccttgccgtcagcaacaaaacggaactcgccatcgccgtccgcaccttggaacagcatactgccggccgcttcgccgttgttaaggaagacttccaccacattacggtcgaagaagatttcgacgcgacgcacatcggcgatgccgctatcgaaatcgatgtcgtccacgactgttcccttcgtgaccagtcgggtcacgccgtcgcgacgctgcagctgcaattccatcgaattaccattggcggaattggtaccagtcgcgatgagcattgtgaaatcgtcatcgtcagccagatgcatgtctgtgtaatacgcgttgttcggcacaataaagaaggtcccgttttcgtctgcatgcgcttccaaacgatcgcctagcagctgctcgtacgcttccttgacaggacggctggtcaagcggccgtcacgcacgtgcagttcacgtggcagcgacatcatgccgttagcgatgcacggcttttccacacgcatcgcgggaaagtcggtataccagccgaacacgatacgacgcccgtcgtcggcagcaaagctttgtgtcgcgtagtagccggtaccgaaatcgcaccaatcgctgttccctacctgcaaacgtgggccatcggcggtgtccttgagatcaccaacataccaacgcacctgctggaaacgaccttgcttgtcacggtagtgcatcaaagctccgatggcgaccgtcttgccgtcgagctggaacaggtcaggacattcgtaggtacgtgacagctggtggccgaagtcggcgagcaccggtccttcatactgccacgtcacgttgcgcttgagcggtttcttcgcggagaagagcgccatggcaggcaccgtatccatattgggcttgtcggtgccgggcatgccttgcggaccgcacgtaaaccagccgtctgtaccctgtacgctgatgccaggcgccgcggaggacacagcatcagtatcgaattcggcgaccggcagattcgtggcggtcaccatgtaagcgcgttccggatcgatcgcctcgccgcccatgccggtttccaccttcggatcacggaaatcgaagccaaaaccatcgttaacgcgcaacgcgaccggagattcgacactcacatgcacgccatcctcacacaagcaggtggtctggtattcagtaacagacgattcgtctccgcgagtctccaggtgccgggttagatacaggcgaatagcggccgcatcatcacccttgcagggattgtcacacgcatccaccgtcaccgcggatccggagaacgcgccgccaacgatgcgttcgtcgatatgcagctccggctgcggttcgaggaagattggcagatgcgtccaatgcaccagatcgcggctcactgcatggccccagtgcatattgtcccagccaaaaccatacggattgaattggtagaacagatggtagcgtccttggaaacgacacaggccgttaggatcattcatccagcgagcgaatggctcgaaatgcgccgcagggcgagcgaaacgatcatagatctgatccagcgtcggctgcgtatcccattcattgtcatatggattcatgctgatgaaacgcacgccttcatcaagaagattctcacactcggacaagtaggcgaaccgcacggtcagttggcgcgctctcaccgtgagacacacgtttgtcggcaccggaatcaagaaacggtggcgacgctcggccaccggcatggcatggctggcgatttgatggccgtccccgtctgtaatggtgacggcagcgtcatcgccgcatctttcggcgaacaattccagcaagcggtagccgccggtttcgatggcaacggaatagttgtcaggcataataatttcctccacagcgccacatgatcagatatcatgtggctacgcattgaaaaacagataattagaaaaacaaatacggaaaaaggaaacgtccgtcacgacacgatggaatcgcgttcgatgatgcggcagcgcaatgctgttttgctgccatcacgttgcctctgcaccgccatgccacgatcggactcaagatcggctacggccttgtcgccgtcaagtatggtgacaagttgccgaaccgcttcaaaacccatctcataatggggtagttccagcgtagtcagtgatggtttgatcacattagtgatgaacggctggttatcgatgctgatcaccgacacgtcagcgccgatgcgcactccgcgttcgcgtgcggcttcgtagatgaaagtggcgcgcacatcgttgaaacaaaagatgccgtccggcttgatttcgtcgaacacccgcgccgcttcatcgtccgcgttagtaaattccgatacttcgacgaccaaagcgtcatcgaatggaatgcccgcttccgcaagcgcacgtcggtaaccagtcagacgttgctcttgcgcgacgatggatgttgcggaaccgtagtagacgatgcgtctgcatccagcttggatcagacggttggtggcgtcataccccgccagttcatcatcggggtagaccgagggaactcgccccgctgcatcctcactgtccaccaccacggtcgggctgccttccaagacttcgggaatgtccactttgcggtggaacatcatggcgtataggaagccatccacgttatatcggagcagggcggatatttcttggttctcgagttcggcgtcattattggtgttcgtggtaagcagtatgtatccgagcttgctcgcggcatcctgcgcaccttcgagtaccttgctcgcatacggagtcgtggctatctcatcggtgacgaatcccagagtattggatttgctggtgcgtaaggtgcgcgccacggaattaggcttgtaccccatgttctcggcagtcgcacggattttctgcgcaaccgccttgctgacgcgattgtgatccttgttgttcataaccaaagacacagtgcatacggaaacacccgtttccttagctatgtctttgatagacaccaatcgtttggacctgttcactcgttgacttaccgacgattgtaccattttatcacccccttttttcgaacatgtcacgatgtctggtttcgggcgcggcccgtgctctgttccatgcggtcatgaatgtccattccaggcagacggccgaatgaataaacaatccaagctgtgcagaacatcggcagcgacaagccgaacaccatgagaattccagaccattgcacccatacaagcacagtgagaatcagcagcccgacctgcagaaggctgcacaacgggcgtgccacaatcatcgccagtgttgtacgaacaatccagacgggacgctccgcatagttcgcgcgtaccacccaaaccaaggacgagaacactgccaaaactacgatgatgagcagcagcacgccggaaaccatgatgtcgaaatcgccgcgagcatgccagttcatcacgtagtagtcgacgatgaccacggcccagagaataatcaaaggccaaccgaaaagattcgcactcttgacttcgcttttccagaagccgtggaacgtcgtccaaacctccttggcccgcattgaacggtcctcagaaagcacccacgcacggaacgtagcctgcgcagccgcgaacgaggggaaaactcccagcacgacggctcccatcagagtgtgcgcgagtatggccacgttgaccacgaaaatcgcgactagcagacggcagaaccgctcgtaggccacagagaagcgggcaagcatagcgaatcctttctatcggctggcttttggattggttgtctctcgtcggattgcgtttgactcaacccttgaccgcgccgagcatcacacccttgttgaagtacttctgcaagaacggatagagcacaagcagaggcagggtagagacgatgatgatgccgaacttgatctgatcggcggcctgctgctgcgcagccgcgttgacattggttccagtaccctgcgccaccagcagcaactgctgcaacaccacctgcaatggctgcttcgtgtcgtcggtgatgtagataaggcccgtcatgaagtcgttccagtggccgacaaagtagtacagaccaattacagccagaatcgcggagcttaacggcagcacaatcttgaagaagtagccaaagtagctcagcccgtcgatctgggccgcgtcgaagagctcttcggggatagaggtctcgaagaaggagcgggccacgatcacgttgtacacggaaaccgcgccaggcaggatgaacacccacatgctgttgttgatgccgaggctcttgtacagcaggtagttcggaatcaggccgccggcgatgaacatggtcacggtgaacaggaacatgatcacgcgtcgcggcttgaactcgcgacgggatagcgcgaaagcgcagggaatggtcactgccatgttgaccgcggtgccgaccaccgaatagatgatggtgttgagatagccctgccagatgcgctggttggcgaacaccttagcatagccagcgaaggtcacacccttgggtagcagcagcacttcaccgccggccacggcgttcggatttgaaaatgatgcgatgaccacgaaccacagcgggtagagcaccgccacaatggtcaggagcagcagcacattgatgatgcccgacaccgcccagtcacccggcttctgcttctgacgcacgtgcttgttccagggaatgtcgttcttgttctgggtaacagcctcaattgttgcagacatgataaaacccttctagaaaatgctcgtatcggaaacgcgcttggcgattgcattcgcggtgatcaggaagatgaagttgaccaaggtgttgaacagaccgattgccgtcgagtacgagtactggccgttgataataccgattttgtaggtgtatgtggcgatgacttcggtggccggcatgttcagcgagttctgcatcaggtagatcttgtcgaagcccacgttgagcacggagcccatgttcatgatgagcaggatcgcacatgtcggcatgatcgcaggaatatcgacgtagcgaatcaactgcaaacggcctgcaccgtcgatcttcgccgcctcgtacagcgatgtgtccacgccggcgagcgcagctaggtagatgatggagttccaaccaacatgctgccagacttcggaaatccaatagaccgcggtgatggcgctggtggaacccatcagtgattcgtcgccgaagaagcgaccgagaattccggtgccaggagtcaggaagatgttgagcatggagacgatgaccaccacggagatgaagtgcggcatgtaggtaatcgtctgcacgaaacctttgattttcttagaaccgatctggttgatcagcagggccaggataatcgggaagatgaagcccataaccaatgtccacagggaaatgcggatggtgttggtcataatctcaccaaacagcgggttgtggaagaattccaggaagtatttgaaaccgacgaatttgccgccggtcaggcctttggtcggatcgaactcgcggaaggcgagctggatgccccacatcggcacgtaggagaacagtcccacgaagaacaatgccggagcggaaagaatccacaactgccagtagcga

SEQ ID NO: 1007 - DNA, 3350 bp, Unknown
  R117_24m  MAG No. k141_34891
ccagcgcgcccgatgccatacctgtcacgctaatcgttcaatgcttcaccgtagcgagcgaccaacccctgatttgcacgctcaaactcggggatgtaatcagcgatgatggcgtccacaagacgccgagctcgttcttcatcatagatatgagcagaatcattgcgatcgcgcagcatgcgcagccacaacgattcgtccatgaaatcatagtattgaaaagcggttttgagcacatctcgcggagagccggaagcggaaacagggtctccctcataagccagcagcgccttgaacagtttccaaccaagctcgaactgcaacccgaacttgtcaataatgccgctctggatgaaatcattgccgagatcctgttcgggagccttgcgcagcgaattcaatgcggaaacgtaattctcatactttttcatacaacacctttccgctacgctcaatctccgccctcagcgatgaagaaatcggctcatccagattgatgacatcaactttaagcagtgaccacagattgtcctgaaggttctgctccaagcgattgaaatcgggacaaccggccacggcaagatcgatatcgcttttaggccggttcacgccctttgcgcgagaaccgaacagcacgaccttgcgagcgccggcatcagcggcaaacgcgcgaatctggtcgtacacgtgctcgataggaaccatgacacctcccgccgcatccaacagtcccggaccaatcccggaccacccgcgcttccatcatacggccgcgtcccactcaccgcacggagcccgaaccacccgaacgcggcgacgtagttgcgggaggcgggctggcgctgtagggcgtgcgggaagttcctgacgtctacttttcaggaggtgaatcctcatgttcaccacgctttctctggccatcattctcgactgcaccgtacgcattgtgctcggcacggcattgggcgcgctgatagggctcgaacgccagttgcgcgcccgaagtgctcggcgtgcgctgggatgtggagcacatcaccacgtccgactgaaacgtccgactgacgctgaccagcaacatcgcaacagtacaacaagccaacaagtgggatggggcatcgagcctcatcccactttgttattatccggcgattgtcagactcactcacgccacggtgaacgtggtgcgcttcaggtcctcacggcgcgaggaggggccgatgagcagttcgaattcgccgggctcgacgatgcggttggcgtccgggtccacgatcgtgcagttcgccaccgggatctcgaaggtgacggtcttggtctcgccgggttccagtgcgacgcgctggaacgccttcaattcgcggtcggtccagctgtaggaggtcacgatgtcgccgatgtaggcctgcacgatctccacgccggcgcgctcgccggtgttggtgagggtgatttcggcacgtacggtgtcggtttcggcgaatgtgccgtcggcgttgcttgcgccgcccgtaatggtcggttcgccgtatgcgaacgtcgtgtagctcaggccttcgccgaacgcgaacgccggatcctgggtgaggtcggcgtaccggtcgccgtgctggccgcgaatctggttgtagtagactggcagctggcccgcgtggcgcgggaaggtgatcggcagtcggcccgacgggctggtcaggcccaggattatttcggcgatggcctgaccgccgcgcatgcccgggttcggcgcccacaggatggagccggtgccggtttcagggtcgctgacgcgcttggcgaacacgccgtactcccccacgatggaggcgggcaacacctgcggcttggagctgatgagcacggtgaccatcggcttgccggtttcgcgcgagacggcggcgagcgcgtcgagcagggcgttctggccaccgagcagttcgagcgtggcggtggagcaggtttcgccgaccagctggaccacgtcgccgaccacggccacgatcagatcggactggcgggcgttggccacggcttcgtcgatcattgctcgatcgacggcggcggaaacgccgattttcgggcgaggctggccgtccgggtagaactcgccggcagggtcaggcacgaggtcgatgacgttcgcgccgcgcgagtagaccacttcgcaatcgtcggaggtgagctgggtcaggccgtcgagcacggtggtaatcatgcctcgaggctggccatccggcatccaagagacctgaccggagttgccggtccagtcgccgagctggttctgggcgtcgtcggcaagcgggcctaccacagcgatgcgcttggccttgtttgcggcgaacggcagggcgccgtcgttgcgcagcagggcgacggattcgcgggcgagctccaggttgatttgctggtgttcggccgaaccgatgaccgccttgatacgttcggcgtccggcagacgcgggtcttcgaacaagccgaggcggaatttcagagctaggatgcgagctactgcgtcatcgatcagggattcgtcgagcagaccggtttttacggcttcgatggctccctcatagaactgtggggtggtcatgaccaggtcgttgccggccttgaccgcgtcggctgcggcgtgcacgtaatcgggcttgacatgctgctcccataccgagcggccgacgttgtcccaatcggtgatcagcgtgccgttgtattgccatgcgccgcgcagcttgtcggtcagcagccatttgttgaacgtgaccggcacgccttcgatggactcgtagccgagcatgaacgtgccgcaaccttctttggccacgcgctcgaacggcggcaggaaccaggattcgagcttgcggtgggagaggtcggcttcggaggcgtcacggccgccttgggtttcggaatagccggcgaaatgtttggcgcaggccaggatcgcgttcttcggcagggcctcgccggccttggcgccgccttgatagcccttgaccatggcggaggcgagttcgccgatcagcatcgggtcttcgccgaaagtctcatccacacgcccccaacgggtgtcgcgggcgatgcacagcaccggggagaacgtccagtgcacgccggtgcaggagacctcttcggcggtggcgcggccagcggcttcgactttggcggcgtcccagctgacggccatgccgagctgggaggggaagatcgtggcgcccggccagaaggagtatccatggatgcagtcatctccgataatcaacgggatgcccagacgcgtcttctcattgacggtcttggcggcacgagataaatcctcggggctggtatgcagaatggatccgacatgc

SEQ ID NO: 1008 - DNA, 27217 bp, Unknown
  R117_24m  MAG No. k141_37671
actggatgtggaaggtgtgctgaactagcaccttttgtttccgactaagaccccttagaatgtcaacaattccaaggggtcttggcgtattggaaatgttcctggctagagaggtacagatggatttagcaacatttcgcaacaaataatatgatttaggtcttctgcacgttgcgggggttggttatggttcatccagatgagaacaggagcaaacctatgagcaagatgagtgacatgacggaatactatgcttcagcctaccgtttgccgtcaggcttcgagcattgctcgaaactgaagccggtggcagaggcagcgacggcgttgcgtcggtggtgagacaagacatgagcttctggcgacgctgggggatgttcaatgtcagtaatggttcaaggtttggactgctgacgtcgctgagacaccttagcgtcgttaacgggtcaagttctggcgatcaaacgacggtaaaaaggggcttagcgtcgttagctgtacataagttggcacggcaacgacactggagcgcgtgatcgtcggtgccgtgccaaactttggccaacctccgacaaatgagaaggactaacgtcggtggctgctcaaagtttggcgcgctggcgacgctgtaagaaaaaagtgtggagtcgaaccggcaatagcatttattcggtttgttctctagtccaattgcgtcaggcaaggcctgttgtaggctcgggtacgacgggctgtagcgccgaataaggatgaacgggaacagaacgaagacggactgagacgaaccgaagcggtaccagaggggagcggctcatgcaggtggtgttggagaacaacatcgtttttgtggtcatcgagtatttagcaatcctgtgttggggattgtcgggcggacttgccgccattcgcaagggctacgacatcttcaccatcatgctgtgcggatggcttaccgcactcggcggcggtcttgtgcgcgacgtgatgctcggtgccctgccgccggtcggcatcaccgacaaaggctatgtgctcaccacgctgttctctggcgtcatcgcggtggtggcccacccggagatcaccaaactcaaatggacgatgactgtcatcgatgctctgggcctcggactattcgcagtcagcggcaccgcaaaagctctggcctacggttcctcaggcatgacagccgtattccttggcatgttcacagcactggccggcggcctcattcgtgacatcttcatcggcgatgtgccaatgattattcgagacaaacacctctatgccgtgccctcgttcatcggttgcattctgaccgtgcttgtatggcgtggtgtgcactacggttggttcgacatgtgctcggaaatgctgctcgacgtgctgatcgtcatcatcgtggtggcgctgcgcctgctctcggtcggcttcaacgtcaccttgcccggagccgtcgagcgtcatcgcgtctacctgcccagcgaaagccgatatctcaagcgcccggtcatccatccgcacgccgataccgtcgatcccggcgataccaccaaggacgaagaagacaagcctcaggatgattcaagaccgcctcagggctaactgccttcaaagaggtacatttggccttctgcaaaatgacaactgctttcaaagaggtgcctgaagcacgaaacgtcgagtataagcgttgcaatgacggcgtttatacttgggctttctcggattcggtacctttctgaacggagatgtcatttcgcaagaccgccaatgtacctctttgaacggagatataaaaagtcccgcaagccagatgacttgcgggacttgctaaaaccttaagaggcttatgctcacagagcgttgatcgcaacagcgaggccggacttgcggttggcggcctggttcttgtggatcacgccagcgccagcagccttgtcgagcttctgggcggcaaccttgtaggcggcctcggcggcagccttgtcaccggcggcgatggcttcgcgggtggcgcggatggcggtcttcaggccggacttcacagccacgttgcgaaggtgcgccttctcattggtgagcacgcgcttcttctgcgacttaatgtttgccacgtttactccaaacgatgtgtgttataaggacatacaaaaggtagaggatagcatgagccccggaaaaacccgcgcaatgccacgccgaatacagtccctcggctacactaggtgaagtttgagtatatgccaagaggaggaatgcgttggtcgtccaacacaatcagccgggttccacggatcagtcggtgattcgcaacttctgtatcatcgcgcacatcgaccacggcaagtcgaccgtggccgaccgcatcctgcagttaagcggcattgtgcccgagcgcgagatgcgcgatcgcttcctcgaccgtatggatatcgagcaggagcgcggcatcaccatcaaatcccaggccgtgcgcgtgccatggacctttgacggcaccgaatacacgctcggtatgatcgacacccccggccacgtggacttcacctatgaggtgtcccgcgcactggccgcctgcgaaggcgcggtgctgctcgtcgacgctacccagggcatcgaggcgcagaccctgtctaacctgtacatggccatcgaccatgatctggccatcattcccgtgctcaacaagatcgacctgccgtccgccgagccggacaagcatgccgaggagatcgcaggtctgatcggctgcgagccgagcgacgtgctgcgcgtctccggcaaaaccggcgaaggcgtggccgacctgctcgaccagatcgtcatggacgtgcccgccccgcacggcgaccccgaggcccctgcccgcgcgctgatcttcgactccgtctacgatccctaccgcggcatcgtcacctacatccgtatggaggacggcgaactgcacgaccgcgaaaaggtccacatgatgggcattggcatgacccacgatcccatcgagatcggtgtgatcagccccgatatgacccgtaccaaggcactcggtgccggtgaggtcggctacatcatcaccggtgcgaaagatgtgagtcagtccaaggtgggcgacaccctgacctcggccgtccgcccggccaccgagccgctgcccggctaccgcgaccccaagccgatggtctacgccggtttgttcccgatcgacaacgcgcaattccccgaactgcgtgatgcactcgacaagctcaagctcaacgacgccgccctgatctacacgccggaaacctccgtggccctaggcttcggcttccgctgcggcttcctgggtctgctgcacatggaaatcgtcaacgagcgactctcccgcgagttcggcctcgacctgatccagaccgccccgaacgtcacctacgacgtgaccgccgaggatggcagtcagcatcatgtgaccaacccgagcgaattcccggacggcaagatcaagaagatcgtcgagccgatggttgccgccgacatcatcacacccaaggaatttatcggtgcggtgatggatctgtgccaggaccaccgcggcattatgggcacgatggagtacatctccaccgatcgtgtcgagatgcactaccgcattccactggccgaaatcgtgttcgacttcttcgaccagctcaagtcccgcaccaagggctacgcttccctcgattaccatgaggatggcgagcagtccgccgatttggtcaaggtggacatccttattcagggcgagaaggtcgatgcgttcagtgccatcgttcaccgcgataaggcgtattcgtacggtgtgatgatgaccaagaaattgcgtagtctgattcctcgccaacagtttgagattccgattcaggccgcaatcggttcgcgtatcatcgcgcgtgagaacattcgtgcgttgcgcaaggacgtgctcgccaagtgctatggcggcgacatcacccgtaagcgtaagctgctcgaaaagcagaaggccggcaagaagcgtatgaagatgctcggccatgtggaggtaccgcaggaggcgttcatcgccgccctgtccaccggcgaggactccaacgaccgcgacaccaaagacaagatccgcgccgctcagaagaccgagggctagtgttcgaggtctacatccacgtcccgttctgcttgcggcgctgcggttactgcgacttcaacacctacacggctacggatcttggtgcgggggcctcgcgcggcaactatgccaatatggtcattcgtgaaatggccctgaccaagcagtggcagctcgaccacggcatcgaggagccaccggtctccaccgtgttcttcgggggtggtacacccacgattctcgccgcccgcgatctggtcgccatgctcgatgccatccgcaagatctggagcatcgcgcccgacgccgaaatcaccaccgaagccaacccggacacggtcaacgaatattacatcaatgagctcgctgccggcggcttcacccgcgtttccttcggcatgcaatctgccgtgccgcacgtgctcaaaaccctcgaccgcacgcatacgccggccaacgtggccgcaggcgttaatgccgccaataaggccggcctgcgctccagcgtggatctgatttacggcgcaccgggggagagccttgacgattggcgcacctcggtcacgaccgccatcgacctcggcgtgaaccacatctccgcctacgcactgaccgtggaacccaccacgaaaatgggtcgtcaaatcgcggccggcactctgcccaaacccaatgacgatgacgaagcagccaaatacgaaatcgccgacgacctgttcgccgccgccggcctcgaatggtatgaggtctccaactgggcccgccccggatacgagagccagcacaacctcggctattggcgcaacgtcgattgggccggtctagggccaggtgcccactcccactacaacgcggtgaccgaggctgaccacccccagtcggcttcgctgacagcccccgccagcgggggcaagtccgaagccattgcctctgcctcagctgatggacaggccaacgccgaacttggagaaaccaacgccgaactaggtatgatcaacgcgcatgggaacaactcccaagaaattcatgcccccgctggcgggggctgtccggcggatgccggactgggggtggtttctgtctcacacggtctgcgcagctgggacatcgcgcacccgcgtttgtggggcacggccatcaacgagaaccgtgtgccgtgggccgatagcgagacgatcactcccgaggaaaacctcgaagagctcatcatgctcgggctgcgcctgcacgagggccttggcctcgaccgcatcaaccgcgccatcaacgatgcaggtatgagcagcacgccccagactctccgaaccgtttcggttgaccaactcgcccccatgatcagcgaaggcctgattaccgtatccgataatcatcgagtggtgcccactcgtcgtggccggttgctcaatgactcggtaatcgaacagttcttcgattacgtcggtgtatgagtcggtggtatggtgcgcggcagtcgccattacccgttcgctagttgtggttacaccgtcagagggagcttttttgttttaccggcgggggagggaaccgcgtaggactacgtccggggcgctttgcacgtagatcaggcggttggcagtgccgccggtggcctccgcgtcatcgcggttggacaggatgctgtccacggcggcctggcccatttcggccagcggcagatgcacggtggtcagtggtgggaacacgtcggcggagtaggggatgtcgccgaaaccggtgacgccgatttcctgacccggctcgatgccgttggtgcgcaacgcggtcatcgcaccgatggccatcacgtcgttgagcgcgatgattgaatcgatgcctttgccgtcgtacagtgcgccttcgcccggcttcagcagtccggatcgggccatttgcatgacggccgcatagccgtcggtgcggctgaacttaccgtttgccacggctttcgggtccacggtgatgcctgcctcgtccaacacttccatcacaccggccagtcgttctttggaggagcggtgtgcgtcatcgcccttgagaatcgcagggcgcgtatacccggaatcgacgataagctttgcgatggcacgcgcgccgacgtcgttcgccacgtccacggccgggaagggcaggttgcggttgagtacgaacacggcatgtccgccggacgattcgtactggatgagttccgtctgcaacgcctggcgttccggcgcgtcggtgtattcgctttcggagatgatgatgccgcgcggcctggtggatacggacttacgcaccgcctccaactcctcgtgcggggtggctgccacgccgatggtcacggagatgccgcgttcggccgccgccttgaccacgccttgcgacacggatgcgaagtagggatcggagatatcggagaccagcagcacgatgttcggtgcagtgcctttggccactgcctgagcataggcgttgggacgatagttgagcttggtggctgcttccatcaccttgacatacgattggttgcgtaccttgcgggtgctgccgttgagcacacgggatgcggtggcgatggagacctgggcttctttggcgacgtccatcaatgtcgctggcgattgcgccttatcgttctgtacagccacgatcgaatcggtccttttcttccctgaaacggaaagcatgtctaaacgcttaccgcaatgataccgcagttttgcttgcaatagtagcattgtggattggaaagcctgaattttgaacaaaaaataatcacgcgaattacggaaagcgattaccgttccgcgtatcgtgcggtatgctcgaagcatgacgcgatacttatgtgcccctgactccttcaaagagagcctgaccgccatggaggcggcccgggcgatggctcaggggattgagaatgccgaccacgatgccgaggtccgttgcctccccatggccgacggcggtgaaggcaccgcacgtgcgcttgtcgacgccactggcggatcgatgcacgccgtgccggtccacgacccgctcggccgacctgtcgaaggccacttcggcctgctcgccgacggcacgaccgccgtggtcgagacagccgaagccagcggcctcgcactgcttgaagccaaaaaacgcaacccgttgattgcctcctcctacggcaccggcgaactcatactcgccgccgttcgttccggagccaagcgcatcatcgtcgggctcggcggcagcgccaccaacgacgccggtgccggacttctgcaggccctcggcgttcgtcttctggacgggaacggcaacgaccttaagcacgggggagcggccctcgctgatctggccaccatcgacatcagcacgatggacccggctctcaagaacgtctccatcaccgccgcctgcgacgtgaccaacccgctgaccggtcccaccggcgccagcgccgtgttcggaccgcagaaaggtgcctcccaggccgacgtcgccacactggacgccgcgttggcgcacttcgcgcaggtcatcgaaagccggctcggcgtcgctgtgaacgacgtgccgggcgcgggcgccgccggcggtatcggcgccgcgctgaaaggcttccttgacgccgaattccgtccgggcaccgccatcgtcatcgaacaatccggacttgatgcggccgcgcaatgggctgacgtggtgttcaccggcgaaggctccatcgacttccagaccaagttcggcaaaaccccggccggcgtggccgaaaccgccaagcgccacggcaagcccgtaatcgccgtcgccggacacatcggcacgggcatcgacgaactgcatgaggtcggcatcgacgcggtattcggcatcgcccccggtgccgccagcctcagcgaactgctggccgacgcggccgccaacgtgacccgcaccaccgaacaagtcgtacgaaccctacaactgaagcagcttcacaagctccctctgatgggccgagccgtgaaggaaacgccggaggcgtttccaggcgagggcttgacgacagtcaagccagccgaaggctccataattgcgggacgagctgccgcggcaaagccgtgactgagggggagacttgtggcgcagccgcaaaaaatggcatcggctttcagccgatacagtcattcgtctgcttctctccctcagtcagctgcgctgacggctccctcgtcagagggagccacacaattcggaaaggaagatatgcgcaccatgctgtacaccaaggtgaccagcatgctgagcaccacgggcatcgccagcgagaaatacgccttcggaatcggcgccttttcgaagagttcgttatccatttccgtcccttggtgttttcgttcttcagtcactgcgcgggatgccgttcggcgtgcatcacaggcattgcagaggcaacagtgtggacaacgggcggggggagtatctcatgatgcggtgagggcgttgatgatgacgcatcgtgtattggtggccgtgtgcatcgtatgtgaacctgtgctggcacggcgtacacacgatgggaaaagaaagaatatatggaccccgttgtcccggttattgttcagttattactgtgttgaattattgcgttattcaattattgtggtgtgccggccgattgcggcctgcgggggattgccttcgtatgtgtcgtgcaatctcatgaatgggatcgttcgctagattcagcgagcgtccttgttggcggcgttgatgatgtcggcgaacatcttggagtcggcgtagccggcgcgggcgatggcgtccataccggagagggtgaaaccgcgaatcatggaatccatgaatgacataatgtgttccttgtcttgacttgcaaagccgtgggctttgcgatgtgttgttgtttacgttatgagacgggccgtgtgtgagcggcgagtcagggaagaggctcagcgagcgttcttatcggtgtcgttgatgatgtcgagaatcatctgggagttggcgtgaccggactgggccagggaagtggcaccgtacatagccagaccgcgaatcatggaatccttgagagacatcatgtttcctttcgttggtcaaaaccttgtggctttgagttttgtttatcggtttctttctgaaaccggtttcagaataacgcagtccgatgacaaacgcaaggggactattccgctctcggcgtttctggcggaatatcgccgttctatagataccgttcggtagttaagaggctgtctagtcgactttctgacggtcttgttctgggcgcatggttttcacgaaatggcctcatgtcgcggaaatcgtacgctgagtcgtcgtaagcgtacggtcttcacgaaatggggtctcatctcgtgaagaacgtacactgagtcgttctgggcgtacggttttcacgaaatggggcctatcttcaccggattttgggcacaccggccttgagcagcttggtctcaagattgatggggcgtagcagatcctcatagaacacatggacgatttcggtgacgccctgttcccggagatgccgatcacgtctgcggtcgtactccattttcgcctggaggcttgcgcgattcttgttgctggtgtcggcgtatttggccatgccgtcgtattctgccacgatgatgcggccgtctgcgagcttccaacagaaatcgacgcgatatggcattgcgggattgtcgggattcatgaactgcacctgcagcaggggaatgccgaaagacaattcggtgatctggccacgcatcaatgattcgccgccgttttcgctcaggggatccgcgtacttcagcagcttggtcacggagacctcgtcgcagacgctttgaatcatcagcgactgcacctcttcgatggtcgtcagggactttctcagagccgaatcgtatatgggcagcgcctgtgggaatgggaatgccgcgcagtcgagcagcgttcgcgccggagtcgtcaagagaatgccattatgcttccgcgtcggaatccgattgatatagatgcggttgagacgcgcctcgtctccgccgccgatgccggacttcgaggcgatgtgcactgtgccgtcgtgcagggaatagttgtgctgcagtccgtatacgcacgccgcactcaaccccgcaaatacccactgagggtggattgcggacagcgcacgtatgacctgcaatgactgttgctctctggtcatggtgttccaaagtattcggtcggcgtacaggttcttatacggtgacaccagctccccggcatgcaggcgacgtttcagggcgcgccgttgcgcatcactggtgccatagcagcagcgacgctcctgcttcgcctgctgcagcagtgcagaaacttccttgtgttctttcatatctcgacgctaagggtgattttgattgttgcacaagctcaaccggcaaatgtgaatactatgtcacgcgaattgttggtgtggataacttgaatcgacgtcgacggctttgccgacggtcttgtcggaggcgatattagcctaggacaccttgctgcgccgccttccataccgagaacagtcatcagtgacaccgagggcatcttcagcgtatgttcttcacgaaatcagctgccatttcgtgaaaaccgtacgctcagaatgactcagtgtacgttcttcacgagatgaggccccatttcgtgaaaaccgtacgttgacgacgattcagtgtacgttcttcacgaaattagggatgatttcgcggaaaccgtacactcaccgcaactcagcgtacggttttcgcgaagttattgatttggatataggttccccgtcatgaactacaatgaatcgcggcgaaaaacggggaaccgaagtcggagcgcggctgaacggatatgggtgtgactggatgactgccatggtgatgccggttctccttgacgtacgcaataacaacaactgacaacaacaggggagacaaggatggcgagaagtgcgggccgcacccgaccggtgatcaaggacgtggccagactggccggagtctcggcaccgaccgtctcccggtatctcaacggcaccgtcaatgtcaccgaagacaagcgtgaacgcatcgccaaggccatcaaggagctgggctatgagccgagcattgtggcgcgcgccctgtcgaaccgggagatggactccgtggtggtgttcgcggccaatccttccgccttctccacgtccgaaacgaaccatggggtcgaggccgccgcccgtaaacgtcggttcctgctcaatatcgtttctttggatgagtccgacatggactccgtcaaggctcgtgtgcgcatgggtttgtcgatcaggccggcgggcgtgatcgtctacgagtacgaccgggccggcatcgccgcactggaatacattcccaaagatatgccgatggtcgtggtgggtggcagcttcggcgacggcgaataccagatcatcaacgccgaaagggatggtggccgttggatgaccatgcatctgctggatctcggccatcgcaccgtgttccatgtggggcgcccggaaggaccgaccgataacacccgcaccaatgggtggcgtgacgcgctcaaggagcgcggcgtcacggtacctgacccaatcatcgtgcccgacgatgatttggaggagtcggtcaaggctgggcgcaccttgggccgtcgtggtgatgtgactgcgattttcgccgacaacgacgagaccgccatcgctgtgatccgaggtctaagggaggttggtcgccgcgtgcctgctgacgtgagcgtcgtaggctttgacgaccgcaacttcggtgccatgtggaatccggcgctgaccagttacacccagaacttcctggacatgggggagcggtccttccggatgctgttcgaacagattcaggccaagcgtgccggcgatgacgcgccgccctcgcaggtcgaagtggtgcaaggcaagccgtgtctgcgtgcctccgaacgcgcgtacggcgacggcgaaatcgcgtagtcgatggggcgtgcgtatcaatcgatagtgactgtagcgcattcatatcgtgacgaggagtctcccatgccgaactgtaagcgcttaccttaaatagttcataatgtgatttacgtcatactaatagatgttctgaatcatagtgttctgcaaggattccttgcagaaaatcactatttatcaacagttttcgaaaagtccgcatgatgggcgactgtgagcacgctttatggtaatcgctttccgtagtgttattgttacagtgtgacttttgaacaatcggtaactctgaagactcagccccagacctcgggcactatctcagcggcagacgccgcgatgcaatcggcccgcgacgaacgcatccccggcaaactcatctgcgcgatcgtggccgtcggctcactcgcattcttcggcatcctgaccgaaaccgtgatgaatgtgctgttcccgcagctgatgggcgtgctccacatcagcgaggccaccatccaatggctcaccaccggctatccgctggtcgtgtcgattactgtgccgctcagcgcatggctgcgccgtcgcttccgccagcgcagcatcttcctggcggcaacgcgatgttctccacgctgcagcagttcacgggtgcggccggcaccactgtggtgggctaccgtgatctccgtgttccagtccggctcgggcaaggtgggttccgccggctatgccgccgccaccgtgaccggcgcatagattgactacgcgatcatggctgtggtcatcgttatcgtgttcgtcgccatgctccacgccctgcgtaaccggaagtagatggtaagtcgagtggcaccatgctaccgcgcaatggctgggcatggagttttggctaggaatcgttcgacaggcgttggcgcggccgctgagagcattcgcgtcgaaaggtttgccggagctcgttcggcgtggaatgggccgattcaccggtgattgttggtcaaacagccaatgctgacccttctgccaatggttagcgaggttcctatcataagcatttcggagagcgatctcgaaaaaggcgacatccttcacgaggatttgaccaaggtcaacattccactcgtataaagtaaggctgtaagcgcatcttggtggcaagcgtcaaggtatgtacggaatcgcggggcggaaagccactcctcaatccactgcggattggtaataacggatgattgtaacgcatgaatcacgaggcccccttacctcgtattgcaatgccccggtgacatgaaaaacggcggtcaacacggggcttgtacattaaggatacaggaagggtagttataagttgctgatatgccgtgttttttacgatagtcatcggcctctcccatacggcggaacaggaactgacggatgccgagatgccgtgattcggcgggaggacctgtactggcccagtccttctgctcggtagcggtaccgctacgccgactcttcccgacgctccagtgccgccgatatcagtgaatgcccagcctgatgtcggtagagttaaggctattggcttggtctcgacggtgagacttctccaatggccaatatgcactgttgcaaaggagtatgcggtatgcaaccaatcaaagccattcaatacggctgcggcaaaatggcgaagtacacgattcgctatatgcacgagaaaggcattcaaatcgtcggtgccatcgacgtgaatccggaagtcgtgggcatggatgccggtgtgtttgcaggcatcggccccatcaatgtgccgattcgcgccgatgccgaggctgtactcaacgagtgcgacgcggatatcgcggtagtcacgctattcagcttcgagaacgaaatcgccaccatgtgcgagcagtgcttggcccgcggcatcagcgtgatcaccacctgcgaggaatgcatctacccgtggaccaccgatccggccaccacgaaccgtctcgacatcatcgccaaggaagccggtgccaccatggtcggctccggcatgcaggacatctactgggtgaacatggtctccaccgtcgccgccggatgccacagcatcaagaagatcaccggtgcggtgagctacaacgtcgaggattacggcctggctttggccaaagcgcacggctgcggtctgaccgccgaggagttcgaggccgagcttgcgcatcccgaaaccgtggtgccctcgtatgtatggaattccaatgaagcgctggcccagaagcttgggcttaccatcgcatcgcagacccaggccagtgtgccgtatttcagcgatgtcgacgtgtattccgagacgatggacgagacgattccggtcggcaaatgcatcggcatgtccgccgtggtaaccaccgaaacgaatcagggcatcacgttggaaactgcctgtatcggcaaggtgtacgggccggatgatggcgatatgtgcgattggaagatcgagggtgaaccggacgtggagttccacgtggtcaagccggcgaccgtcgaacatacgtgcgccacaatcgtcaaccgcattccggacgtgctcaacgcgccagccggatatgtgacggtcgatcagctcgatgaaatttcatatctcacgtatcccgccgcgctgtacgtggcatagacccatattttcagggatgaaggccggcactcataagggtgccggccggtatcaggcggccagagtcgacgtgcgtggcatcacctggaactggatatggtcatgggtgatgtcatcgggccgttcatgccgtaggttcgactcgatcagcgtcaccatgcgatcgataaccgtacgagccattgcggggacgtctatcgccacagtgctaatgggtgggttggcgcagtcggagaaggggaggccgtcgaatcccatgagccgtacgtcgtcgggcacgcggatgccatgttcggtgagttcgcggagcgcgccgatcgctatggtgtcagacatgcacaggatgccacaatcgcccgggacaggcgtcaggaccgcaagcagcatcctgctcggcatcggcggcgacatcgccaacttcaaaagcgcggcccacctggccgcccacgccggcatcgctccggtcaccggccagtccggcaccagcatcaagggcgagaaaccctccagacggggcaacaaacgcttatagactttgcgccttgtataaatgcgaactgccagtcaaccttaccgttgactggcagtttgcatttatcgctcccgctggcgggagctgtcatgcgaagcatgactgagggtggtccacagccgccaatccgtaacatcacccaacgcagcatttcacgatacggacgtttccgtatcgtattttcgtgtggccaaatagacatttcgggcgaaaaagttcgaaatacccccataactggccataaaaacaattgcttgagaatcactattgacttttatggcgactcggtatatggacacgcgaaacgaaaatgacatggagcaacggtactgtgtcaacagcaatgaacgaagaggcacgattcccttacgtgcccacaagcaattgaggtgattccggtgacattcaaagccccgctcgatctcacggtccacgctccggacggtatgtatgatcccgccaacgagcatgacgcctgtggtgtgggtatggtcaccactttgaacaagcgtcctgaacgcaaaatcgtcactgacgccattgaggtactggtcaatctcgaccaccgcggtgccgtgggtgccgaggagaacacaggtgacggcgccggcattctgatgagcatgccggatgagttcatgcgtgccaccgtgcccgccgaactgcccgaagccggccactacgccgcaggcatcgccttcctcgaccgcgacatcgaaacctccggtcagcaggaacaggccattgccaagatcgtgcgcgaggagggccttgaagttctcgcatggcgcgtggtgcccaccaacccggacggcctcggcctgcaggcccttgccgccatgccgggattcaagactctcgtggtcgcctctccggacggtgctctggccggcgtggacttggatcgcaagaccttccgcatccgcaagcgcgtcgagcatgaggtaggcgtctacttcgcttccctgtccgcccgtaccatcacgtacaagggcatgctcaccaccatgcagctcacccacttcttcgaggatctgaacgacgagcgcatgaaggccaccatcgccatcgtccactcccgcttctccaccaacaccttcccgagctggccgctggcccagccgttccgtctgctggcccacaatggcgagatcaacaccattcagggcaaccgcaactggctctccgcccgtgaaggtcgtctgagcagcgaactgctcggcgagttcgagccgctgctgcccatcaccactccgggctactccgattctggcaccttcgacgagtgcctcgaactgctgcacctcgccggccgttccctgccgcacgccatctgcatgatgctgccgccggcttgggagaagaacccggatctcgatccggacgtgcgcgccttctacgagtacaacaacacgcttatcgagccgtgggatggcccggccgacatcgtcttcaccgacggcacccaggtcggcgccctgctcgaccgcaacggcttccgccccggccgctggcagctcaccgacgacggctacatcgtgctggcctccgaggccggcgttctgccggagatcgcgcaggagcacatcgtgtccaagggccgtcttgagcccggcaagatgttcctggtcgacaccgccgaaggccgcatcatccccgatgaagagatcaagaagaccctcgcctcccagcacccgtaccgcaagtgggtggaaggcaactcggtcgagatgagcgatctgccccgccgcgagcacgtgagccactccggacagtccgtccagcgccgtcagcgcgccttcggctacaccgaagaggatctgaagctgttgctcactccgatggccaacaccggtaaggaaccgctgggatccatgggtaacgatgcgcctatgcccgcactctccagccgcagccgcatgctgttcgactacttcacccagaagttcgcgcaggtcaccaacccgccgctggactgggagcgtgaggagatcgtcacctcgctcgaatccgccatcggccccgagcctaacctactggccgattccgagctgcacgccaagaagatcctcatcccgctgcccgtggtcaactctgatgagatggcccagctcaagcgccttgacaaggcccgcatcctcggcggctactatcgcccgtacgtggtcaagggcctctaccaggtcgccggcggcggcaaggccctcgaagagcgacttgacgagatctttgccgaaatcgacgaggccatcgccgacggcaagaacttcatcgtgctctccgaccgtgaatccaaccacacgtggggcccgatcccgtccctgctgctgacctccgccgtgcagcaccacctgctgcgccgccacacccgtacgcagatctccatggccgtcgaggccggcgacgtgcgcgagattcaccacgtcgcactgctgatcgcttatggtgccgcctgcgtgaacccgtacctggccttcgaatccgttgaggatttggcccgtaacggctacctcaaggtcgacgcggacaccgccgtgaagaacctcaccaaggcgctttccaccggtgtgctcaagatcatgtccaagatgggcgtctccaccatcatgagctaccgtggcgcacagctgttcgaggctgtgggcctgagccaggaagtcatcgacgaatacttcaccggcaccacctcccgtgtgggtggcgtgggccttgacgagatcgccgaagaagtggccatccgtcaccgcgtggcctacccgaaccagtggagcgcatccccgcaccgcaacctgcgcacgggcggcgactacaagtggcgtcgtaccggcgaggaccacctcaacgatcccgaggccatcttcctgctccagcagtcgacccaccgtggcgactaccagatgttcaagaagtattcgcaccacatcaacgacacgtcgaaccgactcatgaccctgcgtggcctgatgaagttcaacaacaaccgcaagccaatcgacatctccgaagtcgagccggcctccgagattgtcaagcgcttctccaccggtgccatgagctacggttccatctcacaggaagcgcacgagacgcttgccatcgccatgaattcgattggcgcacgctccaactccggtgagggcggcgaatccgacgatcgtatcaacgacccgcagcgctacagccgcatcaagcagatcgcgtccgctcgcttcggcgtgacctccgattacctcgtgcacgccaccgacctgcagatcaagctcgcccagggcgccaagcccggtgagggtggccacctgcccggtgccaaggtcccgccgtggatcgccaaggtccgtcacgccaccccgggcgtggagcttatctccccgccgccgcaccacgacatctactccatcgaggatctgaagcagctgatcaacgatgcgaagatggccaacccgaaggcacgtatccacgtcaagctcgtttccgagttcggcgtcggcaccatcgcggccggtgtggccaagtgccatgccgacgtggtgcttatctccggctatgacggcggtacgggtgcagccccgctcaacgccatcaagcacgccggcaccccgtgggagatcggcctgtccgaaacccagcagacgctgatcctgaacggcctgcgctcccgcatcgtcgtacagtgcgacggcgagctcaagaccggtcgtgacgtggtcatcgccgccctgcttggtgccgaggaattcggcttcgctactgcggccctgatcgtggaaggctgcgtcatgatgcgcgcctgccagaagaacacctgcccgcagggcattgccacccaggatcctgagctgcgcgcccgctttaagggcaagcccgagtacgtggtcaacttcttcatgttcatcgctgaggaggtgcgcgagatcctcgcccagctcggcttcaggactcttgaggaggccatcggccacgttgagtgtttggatcaggacgaggccatcaagcgctggaagtccggcggcatcgacctgaccaacgtgctcaagcaggccggcccggtacccggcacgatcctgcaccagaccatcgagcagaaccacgagctggagaaggcactggacaacaagctcatcgaacttgcccagccggccctcgaacacaaggaacccgtgcgcatcgaaatgccgattcgcaacgtcaaccgtacggtcggcaccatggtcggctacgagatcacccgccgttacggcgaggaaggtctgccggacgacaccatcgacatgaccctgcacggttccggaggccagtccatcggtgcgttcatcccgcgcggcgagaccatgcgcatctacggtgaagtcaacgactacgccggcaagggcctgtccggcggtcgcatgatcgtgcgcccggaagacaccgtcaccttcgacaagcacagcaacgtcatcgccggcaatgtcaccggtttcggcgccacttccggccagatgttcgtggccggtcgcgccggcgaacgtttcggcgttcgtaacggcggtgccacgttcgtggtcgaaggcgtgggcgaccacggctgcgagtacatgaccggcggcactgttgtggtgctcggccccaccggacgcaacttcggtgcaggcttctccggcggtaacacttatgtgcttgacctcgatatgaagaaggtcaacccgggtgccatcaagtccggtgcactgctcttcaagtcgcttgatgccgaaacctccaagctggtgtacgcactggtcaagcagcatgccgaagagaccggttcccagttcgccgcggccctgctggaggactggaacgaaaccgtcaagcggttcactcacgtggtgccgaagcagttcgtggccatgacgaaggccatggaagaagccaaggccaacaatgtagatttcaatgcgcccggcacctgggaaaaggtgtacgagcaggttatggaaggagcgcgctgacatgggcgacccgagaggattcctgaaggtccgtacccgccgagagttggctgaacgccccgttgaggagcgtatcaaggactggttcgacgttcacgccgaaaccggcctgcaaccgtggacccaaacgcaggcggcccgctgcatggattgtggcaccccgttctgcatgaccggatgcccgctgggtaacctgattcccgagtggaacgacttggtccgtcagggcaagtgggaagacgcctacaaccgtctgtccatgaccaacaacttccccgaagtcaccggccgcatctgcccggccctgtgcgagcaggcctgcgtgctcggcatccaccagccgccgaccatgatcaagcttgacgagcagaccatcatcgaccaggcatgggatttggactacgtcaagccgctgccgccgcagcgtctgaccgaccagacggtcgccatcgtcggctccggccctgccggcctcgccgccgcacagcagctcacccgcgccggccacaccgtcgtcgtctacgagaaggacgacgccatcggtggtctgatgcgttacggcatcccgaacttcaagcttgagaagggtctgcttgaccgccgtgtcaagcagatggaggccgaaggcacccgcttccgcaccaacgtggaaatcggcaaggacatcacgtgggatgacctgcgtgaccgttacgacgccgtcgtagtggccatcggctcccgcgtgccgcgcgatatgaagattccgggccgcgagctcgacggcatccacttcgccctcgacttcctgcccgacgccacgcgccgtatcttcggcgtcaagccggtgcacgacatcaccgccaaggacaagcacgtcatcgtcatcggcggtggcgacaccggttccgactgcctcggcacctcgatccgtcagggtgcgaaggacgtcaccgtgctacagatcatgccgaaagagccgtcaagccgtccggacaacagcccgtggccgaccttcgcccgcacctaccagaagacctcctccatggaagagggcggcgagtacatctactccaccgactccgtgaacttcgagggcaccgaagaggagaaggccaaggtcaccattgataactcgaccaccgccgaaggcttcgtggccgatgagcgtggtcatgtcaccggcttgaaggtcgtctccgtggctcccggcgaaaatggtccgttcactcgccagcctggcactgagcgcgtgctgcccgccgatctggtcctcatctccgtgggcttcctgcatccggacaccgagaccatcctcgaccagctgcccgtcgaactcgacaagcgtggcaacatcgctcgcaatgacaagttcgccacctcccaggatggcgtgttcgtgtgcggcgatgccggccgtggccagagcctcgtggtctgggccatcgccgaaggccgctcctgcgccgcagccgtggacgagtacctctccaaggaaaagagcgagctgccggccccgatcaaggccagccagcgtccgatgatgctgcctcgctgaatactgttccaaacagaaacatgaaaatcccttcttcatgaggggatttttgcgtttctgggattaattactgccttgagtcttcagtaatgtttatatttcgagaatattgcatacatggttaacatgaagctcctatggtgtctttcgtcgccaaaaagacgacgccagaatatttgggagagattcatgaacacacgtcatgtcacttcactggtcgcggccggtgcggcaatcgtcatgctgctcagcggctgcggatcgaccggtacctccaattccagcaatgcttcagattccaatatcatttccgtgtacggcagtgagccggcacacccactattccccggcaacaccactgaggccggtggcggcaaggttgtagaccagctgttcgcaggtctggtgacctacgatgcgaagggcggcatccacaacgaggtagcagacagcatcacctccagcgacaacgccacgcattacgtcatcaagctcaagagcggatggaagttcaccgacggcactccggtgaccgcgcactccttcgtaaacgcatggaattacaccgccaacagtgccaacaagcaggccagcgccagcttcttcagcacaatcgaaggctatgatgatctgcaaaagccggacgtggaccccaaggccacgctgagcggcctgaccgtcgttgacgacaacaccatcgatgtcaagctcagccagcccgactcggcattcccggtcaaggccggcagccacgcctacatgccgttgcccgaatccgcgttcaaggacccgaagaagttcggtcagcacccagtgagcaacggcccatacaagttcgtgtcctggcagcacaaccacagcatcgaaatggtgaagaaccctgactacaagggcaatcgtgtcgccaagaacgatggcctgaacttcaagatctatacctcgcccgattcggcatacgccgacctacgcggtggcaacctggacttcacgaacacgattcctgacaccgcacttacctccttccaatccgacaagtcgctgaaggcatacaacgagcccggtggcaatacgctcaccttcaccattcctgaatggctggaacacttcggccagaacgaggaaggcaacctgcgtcgtcaggccatttccatgtccatcgaccgcaagaccgtcgccgagaagatcttccacggcaccgccacgcccgccgtcgacttccttgcagccccaatcagcgcctactccaaggaactcaagggaaatgaagtactgaagtacaacccgtccaaggccaaggaactgtgggccaaggccaacgccatctccccgtggagcggtgagttcggcattgcatacaatgctgatggcactgcgaagaactgggttgaggcaatctgcaactacatcaagaacacgctggatatcgatgccaagagcatcccgatgtccacttccgacgaattcctgtccaatgtggattcaggcaagatgacctccgcataccgcagcggttggggccctgattatccatccgcggacaactatctggtacagctgtacgattccagttcggccgacggcaagggcggcaacagcggcaactacaagaaccccgagttcgatgccatgatggacaaggctctttccgccccgtccaccgaggaagccgacaagtattatcagcaaggtgaggagattctgctgcaggaccttccggctatcccgttgtggaaccagaatgccaccgcagccagcacctccgcagtctccggcgtcgcattcgactacggcggcggcccagtgttcaccgcactgaccaagaagcagtaagcagtaagtaataaacagacagcgctagccccccgctggcgggggctgtcggcaaagccgactgggggtggtctcaaacagcagaccacccctaatcttgttatatgagcgagctcccgtaagcgggagcaatcgagaacatacaggagcacattaactatggaattcaccgtatccggcactaccgtgcgattcgatgaacgaacaatgcagttcgcttttacgcgcgacggtgccgaatggaatacctgcgctgatttcaagccgaccctgcaatgcgcgcaaggcaccttcgcgttcgcggatgccacttccatcacccatgagcagcgtgaaaccggcacgggaaccggcattcgcagcatcttcaccggctttgggcacagcgcatactcctttgaaacctatgtatgggtggagcgtgcctcaggcgatgtgctcttcgaatggattccgctcaatgagcaaggcctgaacatcaccaatgtgacgtggcccgcagccatggacttcgattgcgccgacgaccatgacacgacactcatcacccatgagcaaggtgtgatgatccccaacacatggcctaccgccgtgagcaccaaagatatcgccttcgacggtcgcttcgaaacggctggcggttacatgccgtggttcgcgcagctccgcgcagacggacacgggtatatcgccatctgcgaaactccatggaatgccggttacggcatcgaccatcccagcgatggcccgtacacccatatcaatacttggtttgagccaagcctcggcacaatgaattatcgccgcgtggtacgctaccagttcctcgaccacgccgatcacacggcggtgtgcaaggcctatcgttcgtacgtcaacgaacgaggtcgcctgcgtacgctcgccgaaaaggcggcgcgcaatccctccgtgcgtgacctgattggtcgttcatgggtgcacatcggcatcaaaaccaaagtacagcccgactcgtactactacgataaggaccaccccgagaaaaacgattcattggtcacctttgcgcagcgcgaaaagcaaatgcgaacattgcacagcatgggtgcaggccgactgtacatgcacttggatggttgggcacagcccggatacgacaacgcacaccccgactatctgccggcttgtcaggaggcaggcggctgggaaggcatgaagtcgctggtcgacgcctgccatgagcaaggcgatattttcggcacgcatgaccagtaccgcgattactacttcaccgcgcaaacctttgatgccaacaatgcgattcggctggcagacggtacgatgcccgaacacgcacgctgggcgggcggccgccagacctacctgtgcgccgagctcgcaccggactacgtacgccgcaatttcgccgaaatcgccgcgcatggcatcaagctcgactgtgcatacttggatgtcttcacctgcaacgaaggcgacgaatgctcgaaccccgaacaccgcatgacccgccgcgaatgctttgaccgccgcgccgaatgcttcgaatatctgctctcgcacggcatcctctcctcgtccgaagaggtatcggactgggcagtgccaagcctgatattctgccattacgcgccatacgacttccagatgcgctcacccaacgagccgcgccaaggtgtgccggtgccgctgtataacctcgtctaccatgattgcgttatcgagccgtggatgatggagcgtgtggtggacggcgacgattacatgctgtacgccttgctcaatggcggagctccatacctgattcgcgatgccgcatacatcggcgttgacggcgacatggacgacgaacagcgcgctcgcacggaaaacgacatcgaacgctgccatacggtcgctgcattccatgagcgggtcggcatgcaggaactggttcgtcacgagttcgtggatgatgatccgctggtgcagcgttcggtattcgcggacggcactgcggtcacttgcgacttccatacgcaaacctatcgcatcaccgattgaccgcatcactgactgaaaaaacaatgacacacagtgggttccgatggactggtggcaaattgccgccgataagcgggtaatatagccaacagtgtcaccgtcgaaacaggagtagtgaaatgccgaatcgtgcagaacgccgtgcccaagccaaagcaggccgcaggggagtgccgtcgcagtatgaccagacccgtggccgtggccgttcgggaatgattgacgaatatcagctgcagcagaagtcccagcgtctgcaggacggcaccgacggcaccgaatggaagcccagcggcggtacgattgcggaccccgaaaccctgctgaccactaacccgaactacacgaatccgaagatgttcaaggcaccgcattcgctgcgtcagtggttccgtgtgggcagctggacgctgatcgctatcgcgattatcgcgttcttcgtggttatgtggctgccaagccatccgatgtggctggtcatcaccgtttccgcggtgttcattgtgggtgtgctgagcctgttcttcaccgctggcgattccaagcacaatccgaatttggatcagaacggcacggcagtctgatcttttgcccggtaaatccggcttgaaaagcaaaacgcacgacggaagttgtgcgttttcttgtatgcggtgccctaaagtaagaagtgcttgagtttctttctgacgcacgaaggagaggcagtccgatgaaagttgatattctaacccgcgaatacccgccgcatgtgtatggcggtgccggcgtacacgccgaggagctgtccaaggttttggccgagcgcattgacgtgaccgtgcgtgcgtttgatggcaagcgcactgaggctgatatccccgcgattcccaatgccgctaatgccaagggcagtctgaaggttgtcggatacgatacgccgtccgagcttgccgatgccaatccggcattgaagaccttcggcgtggatctgcagattgccaacgacgttgacgccgatatcatccacgcacatacatggtacgcctgcctggccggctacctggccaagatgctgcacggtacgccgctggtcatcaccgcccactccctggagccgttccgcccatggaagcgcgaacagcttggtggcggctacaacctgagctcctgggccgagaaggacgcctacgagcacgccgaccgtgtgatcgccgtttccggtggcatgcgcaaggatattctgaccgcctatccgaatcttgatccagacaaggtggttgtggtctacaacggcatcaccatggccgacttcgctaccccggcaccagacgatccgggttggaaggtgttcgagcgttaccacatcgaccgttcgaagcccaccctgctgttcgtgggccgtatcacccgccagaagggcctgccatacctgctcaaggctttgcacctgatttccaaggatattcaggtggtgctgtgcgccggtgcgcccgacaccccggagattgccgaggaagtcaagaacgcgttcgccaagctggacgaggagcgcgg

SEQ ID NO: 1009 - DNA, 8239 bp, Unknown
  R117_24m  MAG No. k141_38005
aacaagtgcgacatggtcgacgatgaagagctcatcgagctcgtcgaagaagaggtccgtgacctcctcgacgagaacggcttcgatcgcgactgcccggtcatccacacctccgcctacggcgccctgcacgacgacgctccggaccacgagaagtgggtccagtccgtcaaggacctcatggccgccgtcgatgactacatcccgaccccggttcacgacctggacaagccgttcctgatgccgatcgaggacgtcttcaccatctctggccgtggtaccgttgtcaccggtcgtgtcgagcgtggccagctggccgtcaacaccccggtcgagatcgttggtatccgtccgacccagcagaccaccgtcacctccatcgagaccttccacaagaccatggacgcctgcgaggctggcgacaacaccggtctgctgctgcgtggcctcggccgtgaggatgtcgagcgtggccaggtcgtggccaagccgggctccgtcaccccgcacaccaagttcgagggcgaagtctacgtgctgaccaaggacgaaggcggccgtcactcgccgttcttctccaactaccgtccgcagttctacttccgcaccaccgacgtcaccggcgtcatcgagctgccggaaggcgtcgagatggttcagccgggcgaccacgctaccttcaccgttgagctgattcagcccatcgccatggaggagggcctgaccttcgctgtgcgtgaaggcggccacaccgttggctccggtcgtgtgaccaagatcctcgcctgattatcatcagacaagaatcttcgcttgaactagcgacttaagaaatccccttcgaggaaactcggaggggatttcctataaccgcagcaggatatggatatgtaccacgacttccggcctggatgcgctagtgttgctttccaatagataaacggactgctgcactgcgagggtatgacactgatggcaggccgggaaagaaggtcgatgatgactggttcgcaagccgcacactgtggttctgtatccgcgctttcactgggactgcccgtctccacggcgattcccgaagccaaaggcacactgccgaaagccttgttcgtgggcaaggcaccgatttcaggcaaactcaagcagcgattggtgaacgaaatcgaatccattaccatgctggcgttggtccggtcgattaacactgggcttgcggacggcaaactggttccggaagtgctggtcatcggactgaagcttacggccaaagccactggcataccgaacgaggtcatcgatttgattgccgggcagcgtaaatcgggcatcgtgttcgtgtgcgtacgcgacgtgccgttcgagggcagcacacgtgaggaatgtgcgttcgccgtgcgtcgggcgataccggggcgtgccggccacacgccgatctatcgggtatatgccggcgattggcagccggcgggggaggcccagctggagctggccggctctactattgatgagctgtgggcctcgctgtgctcacagaccattctgggcacgccggagatcgaaaatctggatgcgcgcatcattcgccatactgaaattgctcggctcgaatccgaagtggacaagctcacccgcgaccatcagcgcgtcaagaatcctgttcagcgcaatgaaatctatgccaagctccacaaggccaaaacacagctcgcaaaactgcgcgaagcatagtgatatgaaaaccattggggtcccgctggcgggagctggctcgcaaagcgagactgagggtggtccaggtccgtggcctagggctacgcccaagctaattgaaatattcgtgcatcatacagcgtacagttaaaccatgttccctctgctcgaaaccctggtcgccgtatacgaggtgggccagttcacgctggctgccgacgaactgaaggtgtcgcagtcgacggtgtcgtcgcgtatcgcccaattggagcagatggtcggcgcgccgctgttcgtgcgcaatgcgaaaagcgacgtgacgcccacacaggccgggcggatgctgtaccagaccgccatcggcatcgacggattatggcgggatacgcgtgagcagatcgcccgcgtgcaggaggcgcgtgagccgctggccgtttcgttctcgcacacgaccgcggcgattctgctgccgaaggcgttgccggtgatggctcggaacatggacagtttcgacttcgccgtacacgtgatgaactcggatgcgattctcgaacgggtcagcatgaaggccgtgcagctcggcgtggtggaaaagccgatcgtgaacgattcggtggaccgcgtcaccctgtgcgaggaccggctggtgctggcgggggagcccgacggcgtgtggatggtgcgcgagcacggttccggcgtgcggtattacacggatttgtatttcaagaccgctcaggttgtgcctgcacgcacgatggaagtgtccagtaatgcggcgattgtggcggcgctgtccgccgggttcgggcagtcgttgatttcggaagccgccgtgccggcgggcgtgccggtgcagcgggagcttggcgatgagtttgtgcggcggttctatgcgctggtgccgagatccggtctgacgcacgatcagcgggagttggcggagatgattattgctgcgctgcgcgggtagtcagatagtcgactgaggggaggtcgcgaacgttgtttctctctctccgtccgcctgcggcggccacctctctcatcagagggagatcaattaggtatcgacaaaatcgatgatatgtattggttgcaatgatttgaccgatgtaaatgcttgagcttcaatagacaccgtgagagagttctgtacaaaatggtggaagcgcattaccaccgttgacatgttgttcattggcgttctgactctgctggcctcgctgttcgcctcctggctcaagcagttccccggattcagcctgttcggcgcgcttatcatcgcgctgctcatcggtatgatcatccagttcccgatccgcagtgcctacgtcggttccaatgatggccgcaaggcaggcgtcaaggacgccgctggcctgatttccaacaagctgctgcgcctcggcatcatcctgctcggtttcaagctcaacctcgccgtgctgttcacgcagggcatcaagtgtctgccgatcgcagctgtggtcgtcacgctgaccatcatcgtgtgctatgccatcgcccgcaagctcggtgtcgacccgatgctcgccatcctgaccgccggtggcaccggcatctgcggtgcggccgccgtcatgggcctagccggttccatcaaggtgcctgaggacaagcaggacgagaaggacaacgacgtgaccatggccgtggccatcgtagccattatgggtactgtgttcgcgttgctggagatcgcgctcggcccgctggccggcatgaccaaggaccagctgggcatcaccgccggtgcttccctgcacgaaatcgcccacgcggtcgccgccggcgacgctttcggcgcggtggacatcgccaccatcatgaagctttcccgcgtgctcatgctcgtgttcgcggccatcatcatcgctatctggtgggagaagaagcactccgaggtggagaacaccggcaagaagactgtggccttcccgtggttcatgctcggcttcatcggcgcttcgatcatcggcaccttcgtgccgctcatcgcctccatcaccccgcagctcgtggactttgcgtacatcgtgctcggcatggccatggccgcgctcggcatcaacgtgaacttcaaggccatcgcttccaagggcaagaagccgatgctcgccagcttcctgacatcgattctgctcatgtgcttcgccgcaggtgttgcgatgctgttcttctgataagcgctccaaatacaaataggcgaaggcgaacgacagtgatcaattggaatgcgtcacctaaaaatcacgtacttgcacaacggataaccccagccgaactggcaggccatcgcaatgaacttcaccacatacgggctcaggtccgtcgcgcccggcatccagccgatcagcagtgtgctgaacgtgaagttccagatccacagcagcacgaaaagcatcacggaacgggtgaagttgcttgacgatttgaacgtcacgttgcggttcatcacgaagttgtaggtcgccgaacacaccacggcgataccgttggagatctgcgagggcacgccgatcaagtgcaggatggcgaacgtcgcatactccacaatggtctgcgtggcggaaacacccatatacttgcccaacacggcgagtccattttgcttcggggttgccgtgcccacggtattttccgcagtgttcgttgtggccgaggcattcgtgacgtccgcgccctgattgtgcttcacatccgctccattgttcgccatgcccatatacctcccggatgtacctgtgacgttcgacctcgcgatgataccgctgaccgcgtcgggaatcgtcgtggcggtcagacgagaaaaccgcaggccgcagcaacgaccggcacacccagcgacagcaccagataggccgttgccgtggggtagcggcgtttgcggaagagcgtcaccatttcgttgatcgcggtcgagaacgtggagaatccgccgaggaaaccggtggccagcaccagccgccacggttcatcaagtgtcccgcccagtgccagcgccgcaaccagaccggtcaggaatccggcgatgagattgatggtgaatgtggacagcgggaatgcgtgttgccaatacgttttgatggtcgcgtcaagcagatagcggcaggaggcgcctacgccgccgcacaggcagaccaagattggtaggaatacggtcatcacgccttacctcccttgctggtcgtagcggcattcgtatcagcggacgcttcggcggatgcgttcgaggagccggccagatgcgttcctgcccacacgccggcagacgcacaaaccagacccagcgcgaacgtcaccagtagataggcaatgccggccgccacctgaccgtcgcgaatcgcggtgaagccttccaatgccaacgtcgacatcgtagacaaaccgccgcatacgcccatgccgagcccacggctggtgagctccttggcacgcgtgtcgaaccgggaagagccggccaaataggcggtcagacccgcatagcagaagcaggccagcatgttggccacaaacgtgccggtatggaagctgccggctgcgggaatctgcgcgaacgcatagcgaatcgcggtgccgatggcaccgccgcagaagacgaccaacacaatatcaagatggatatcggggagtttgtgcgccggaggagtggccgtgcgcgtgcccggccgggcatctgcggatggggattgcgagcccataatagcctttcctgaaaccgctgaatcctgctgaagacacaacgattccatgcaatgtcaaatcgtgtgtaggaactatcagcagtgtgcggttcgaaacaagttcaggcgggtcccatcgccggttctccagattactcatggcgacgaatcgaacagtgagcgtatctcggatattggcctatcgcagtgaattgctcggttgttgccatacctcatgggtatggcgaaacatggtttatggctattggttaatgcaaggcgattattgtctaatagaacacgaggataacgggccttaagcgctcgatgccggaaaacaaggagttatgaacgtatgtctgaaaccatgaaagctgcgattttcgtggagcctggcaagatggccgtggaagaagtgccgaaggcgacgcttgaacaggatgatgacatcgtgatccgcgtggtgcgcacgtgcgtgtgtggctctgatttgtggttcttccgtgggctgagcggacaggccgcgcacagccaggtgggtcacgagtccatcggtgtggtcgaagaggttggcgcggcggtcgaatccgttaagccaggtgatttcgtggtcgtgccattcccgtacagctgcggcaagtgcccggtatgcaaggccggcttcgaatccgtatgccctcacggcggctacttctccgcctgtcaggccgaacacctgcgcgtaccggaggcggacggcaccgtggtcaaggtgcccggttcgccggaagactacgatgacgcgacgctcgcttcgctgctgaccgtttccgatgtgatgtccaccggttatcacgcggcggtttctgccgaggtcaagcccggtgacaccgccgtggtcatgggcgatggtgcagtcggcctgtgcggtgtgattgctgctaagatgcgcggtgccacgcgcattattgccatgagccgtcacgaggatcgcgcggcgctcgcccgcgaatttggtgcgactgatatcgtgcccgagcgtggccaagaggctattgacaaggtgctggagatgaccggtggctatggtgcggacgcagttctcgaatgcgtgggctccaagcagtccttcgacacggcgattggcctgattcgccgcggtggcgtgattggtcgtgtgggcctgccgcacgacgtggagatcagcgccgaaggcacgttctacggcaacatcggcatcaagggcggcccggctcccgtgcgccactatgacctcgatgacggtctgctggatgcggtgctcaagggcgaaatcaaccccggtcgcgtgttcaccgccgagtacgacctcgaccatatccaggacgcctacgaggcgatggaccagcgcaaggtcatcaaggcgctgatccggttctagggtcaggtacgcagcgaacggttctcaccaagaaccgtgtgagccattcgcacaaaatcgcacaatcaaacagggcgccggtgtgatgggggggggattgggggtgagccggttcggcttgcgtccttataccgttgttttcgtgtagaatcggctacctctatacttctgttttcgtgtaaaatagcatatgcccatactgttgttttcgtgtaatgaggtgattgctcatgttgaagcgcaagatgctggataagctgatcgcatggaaacaaaaagcgggtgggcgtgaggctcttctcatcgaaggcgctcgccgcgtgggcaaaagtaccattgtcgaggaattcggccgcactcagtacaagtcatatattctcatcgatttcgcgcgtttgccgcgtgacgttcgcgacatcttcgaaaaccagcgtgatgactttgacacatttttcatgctgttgtctgcgtattaccgcaagcgactgtacgagcgtgaatcgttgattattttcgacgaggtgcagcggtatccggcggcgagggagctcatcaaatatctggttgcggatggccggtatgactatgtggaaactggttcgctgatctccatcaagaggaatgtggcgaatatcgtcattccctccgaggaacggaaaatggatatggggccgctcgattttgaggagttctgctgggccatgggggaggagctgcttgctgaaacgattcgcaaatcgttcgagtgtctggtcccgttgcctgatgctctgcataaacgggggatgaggctgtggcgcgaatatctgctggtgggcggtatgccgcaggcggttgccgattatgtcgagcagcgcgattttggcgatgtggatttgatcaagcgtggcatcctgcagctgtacagtgatgatatcggcaagttcgccaatggcgatgccggccgtgtgcggggcattttcgctcagattccagggcagctgtccaagcatgagaaacgattcactctggcatcggtcgacaaggatgctcgatctcgtgaatacgattcggcgttcttctggttggaagacgcccgcttggtgaacctgtgccgtaattcgactgaccctttggtggggctgggattgtacgaagataataattcgttcaaatgctatatggcggataccggtttgctggtgtcgcaggcgtttgccgatcgagagacaacgccggatgatgtgtaccgggatattctgttcgataaactctcgctcaacgaaggaatgctggtggagaatgcggtggctcagcaattccgggcgaatgggcgcaaactgtatttcttctcgcgctcggatagggcggatgccacgaaaaccatggaaatagacttcctcatcgttcgggaatacgataatgccgcgatgaagcctcgcat

SEQ ID NO: 1010 - DNA, 12561 bp, Unknown
  R117_24m  MAG No. k141_38457
caggaagccgtggacgccttggtggcggccgcgctcgatgcgggcggaaccgacaatatcactgtgattgtggccgatatgccactgaccgaacccgaacatcacgcgttcagcgcttttaaactggacgagggcgaggacattggcgccattgaagacgcaacactacaaacactacggaccatacgttcggcataaccgagcgaacataaggaggtaatcccatggttgattatgatgctgcggtcgctgccgtacaggatccgaacgcggacccgattctgttggcaaaaatcgcctacgagaatccggaattcggcgcaaacgtcgccgtaaatccgcgttgctaccccggcttgaagcgttggatcgccgaattcggcgatgagcgcgcccgcgagaccctggcgcaatacgggttcaccgccgaggcattcggcggcccggtccaggatcaggaagccccgtcacaggcggccctgcaggctgccgagcagcagcctgcagacgcttacgccgccgaccagtacgccgcagctcagcccgccgccgaccagtacgcagcccagcagcccgcaactgaccagtatgctgccgctgcccagcccgctgccgaccagtacgcagcccagcagcccgcggctcaggcggcattcgaggagcctgtggccaccaatccttatggcttcaccgccgaacaggccctgaccaccaccgaccagatgcaaatcgcccagattgcccaatacgcgcctgaactacgcgcctgcatcgcccgtaatcccaacacctatccggcactgatcgaatggctgggccagctcggcgacccggcgatcaacgccgctttggcttcccgtcagtgaaaggacggcatcatcatggccaaacttccctaccctccagcacctgaactgggttggtattctgacgatccggtggaaggcaccccggattccgcagttggcacagccgaaccgcagaatgactacgggcagcccagcaccgcggaagcggcaaccaatgccgcttttaccgcagagcccgccgccactgccgccgctgagcccactgccgctccggtagacaccacaccgcacgccgccgaaaacgacatcgaggattgggacagcaccgtgctctcctcctcgttcacgtccaaggcaccgaagaagacgtacctgctgcataacgatgtcaccggccagaccattgtgatcgacaagagcacgttgctgggccgcaagccttccatggatgtgccgcagggtgccaaggcggagcgtatcgaagacccgacccgcaccacgtcccgcaaccatgccgccatcagcatcgacaccgatggcgcgctgtggatcgaggactacggctcgttgaacggtacctacatcatcaccaatggccaggagacacaagtcaccaagggcacaccgctcaagctcagcgcgcctgccacggtgcgtatcggagaccagttcttccagttctccgaacagcagtgaccgctggactgtacaggccagcgaatactccagatatcaataaaccgcaggtaacgtaccaagcaagctgtgagaacaacttgtacccgtacggtacctgcggtttattgttgccgttggcgggcggtcagtgacggttgctcggctatgcctataccgggctgggcggtcactgaccgctgagcgcagtagttacttgttcgagtccgacttgttatcgctggatgagctcgacgaacttgacgagtccgactccgagtccgacgaatccgaatcactctcgctttgcgacgaactgttgctcagatccggtgcggggtcgcccggggcctgaccgatggtcacaatcacgtctccgctggattccgggctccacgccatccattccataacggaatggtcgcataccatggaatcatcatccaatggcaattgcgtgtacttgcccacggacttgccttgcgcatcaacgataatctgctcatccgtggtcttcacgtatatggtcttggtcagatagttgatgcccttgaaactgccgtcggtcagcaacagacgaccccactgcggcccatccaacacttccgtgggcttcagatcggacgacagcaggaacacgcgtttgctttcgttgccgttaccatccgtctgcacgtagagggtgccgtcggagaattggtcaacggctctgacgtcttcatccttgctcagtcccagcacgtctttcaacgattgccgtttgccggtcgtgctatcgatgacaaacttgccgctatacgaatcatcggtcacatacatgttcttgccgagataccgcattcggctcaaatcacaacttgagtagtccgtatcgcagtaattcaacgggaaactcatgatttccttgttgtcttcgaccgaatacaggtggtacgaattgtctctcaccatatatgcgtcgtacaagctcacaccgctcgcggaggcattgacctgtttcgcatactggtacccgccagaatcagtggtaagcacgattttgtcttggaaggtctgcaataccttggcggtatcactgtcatgagttacgcccatcacctgcgtgtggttgatggtcgctgagcgctcgtccttgttagcggtgtatttttcatcgctatgccacgttttcttgatggccaccatgttgcgggactcggcgagcaacgagtattcgtaaccctgctcatagtcgataaggttgtcttcctcggttcgcaggtcgatgcggtcagacagttcgccggtatcgagatcgacctcgtgagcgaacagatgcacgctttccggcgtggtgcccactgccttggttttcaccgcatagaacacgaataccgccggattatcgccgtacgtggcggcgacctggggctcggaatactccttctcccccgattcgagcatggatacgtggatttccttcgattcatccagcgccggcgtccagacgccgaaggcatactcgccgctgccgtccagggaatcacttgaggatttggacgacgaatccgaatcgaccgaggaatccccatcccagcagtggatgacgttcgagaccatcgcgccgccagtccacttccagtcactggcggagttgccgtcgcatgagaaatcggtcatcgtcacttcggtggctgccggcttggcgggctcggacttggtcttctgctggtctttggttgttgtcttagtctttgtcttaggtttcgatttggtggtgctggaggtagttgttggcttggcctcggccttctgatgcgcgttacgccagaatataaagcccgtgatgccgccggctatcagcgccactaccacaataatcgctatgatgattggcacgattttacggggctttttgccgttgttgccggcaccattgccgttgttgggcacgcctgcaccagttggcatgccattgttcgaggtcgggattcctgccggaggaacggcaccggcggcaccggcatacgctccgggtaccgggctgcccggcacctggccgccgggcattggaccgttcggactggaaatgcccggttgcggaatattcgtttgaggcgcattcggccgaggtacgctcggctgcggctgcggcacacccggctgcggaatcccgcgcgatgccactaccgtagcgtccgccggtaccggggctccgcaccgcgtgcagaacatcatattgtcaggaaccgcattgccgcattgtgcacatcgtttcatagttcttctcccccgctatcagcgtcatcgcttcggttcttctctgccttctattgtaggagagagatcacgaatgtgtcgtcggccagcgtgaaatcgccgccagatgccgcatattcgcatccgccgcttgccagttcgcggccacctaccgcagtgccgttggccgaatgattgtcggtgatgcaaaaacgtccgtcatccagcatgtcaatcaccgcatggatacggctgacgttggtattgccgcccatgtgaatgtccgcggttttcgatcgcccgatggtggctcgtgtggcgtgcactgttattgctttaccgtcgcgcaatcgtgtgacggtaaagcctctggacttgtccgtgtagaggcgcagcatcgtctcgccttcgctgtcgttctcatcggcgcgcagtgctgtgctgacggcgctgacagggaggatagggcgaacgacgttgctagtggcgggaacgcgagcagcatcaacgttgttgacggtgtgagcaacgtgagcggcggcagcagcgttacccgtgttagtctcggccacggcagcagtagcggtatcacccgcggcagcggcagccgccacattggatgccacaccgcgggcggaatcttcacggatatattgttcgcgaacgagattctcacgagcgggctgcgtttcctgcttgcggggaagatttacggcaatcggcattgcaggagccggctgtgtcacgggcgaggccgacgttacaggagtcggctgtgccggtgccgcgtgtgctgccggcattgcaggagccgccggcgttgcatgcgttgacggtgccgcggaagtcgtcggcattgcggcctgttgcggcgtcgtctgaagtttaggcttggagctcaatactgtggcgccaaatcgcgtggcaccgaccatggtgccgtcagacactacggtcgcgccgaattgcgtctccgaaccattatcttcatgagtcgactgcgctgactgcgcttgacgcggctgaacagtgccgggcagcaaatacgccataaaatcatgcagagcatctgcattaaccagtgaattgcgccccaggaactcggcgagcgcacgctgatagccttgcacaacggcatcctcaagccgggtccggcgtgcatcggccaatgtctgcagcaaagtggtggcggtgttgcgatcgggttccagtcccagcgccggcaccaccacgaacagcggatacccctgtgcggagatatacacgcttttggggtcccactgcacgtacgacagcggcacgcgatgctcctcgcattgctccataacggacaataccgccacgagtatgcccacatattggccgccaggcactaccgatctcaacacgccatgcatggtctcgcaatgagtcacgtcgtaatagaagaggatttccgcgccattactttcaaaccggaacggcagcatataccaatggccttcagcaagccattgtgcctgcccaagatccaacgactcgcctcgcgtggtatgtatggtcagcgtctgagcccccgtacgccgatccttaacagtcttcgctctcatagcacttaagtctagtcctgtaccaaggccaacgctttgcggagacgcaaaactcgtcaacacagtaacacaactccggctaagtaactttaccaaaaaactaaaaattggtaagataaggttaccagttttcctcaatattggtaaggtagcattaccgttttcttgaaaggcacattatggcgaatccgatcatcgccgaaaagctgcgcgattttagaatcgaagatttccacccgattgtgccgcgcgacttggatctaggtaagccactgaccccgagagtaggcaatctggtgaaggtcatcgtaggcatgcgccgcagcgggaaaagctaccgcctattccaagagatagaggccctacatacatccggtgtcagctggaaccaaatctgctatatcaattttgaagatgacaggctcggcgacatcactccaagtgtgggcgatgaagtaatcgaaaccttttgctccatgcatcccgaaagcctagacaccggcttgtacctgttttttgacgaattacaggaaatgcagaactggggcgcttggctacgtcgcatcgtagacaccacaaaagcaacgatctatgtcaccggctcttcctcgaaaatgctctcaaaagaaatttccaccgaatttcgaggccgagcattggacttcgagcttttgcctttctcattccgtgagtttgtccgcgcgcgaggtatcgccgaatcagaattgctcagccggaacgaagcagctggatattccaccaaagaacgattaatgctgtcggccgcattgatctcctacctggaagagggcggattcccagcaatcgagggactgccaacgcctcaacgtgtgaccctgctccagtcatatgtgcagcgtgtcgtatcccgcgatgtagtggaacgttatgacatcgcgcgtccaagagttgcctccgcattggcacgacgcttgcttggcagcaacggcaagccattgtctattcgcaagatagaaaacgaattgcgttcagccggactagccaccagccgtgtgctactgggagatttattggaatattttgaagacgcctatctggtgtttcgaatgaaagacttctctatgtcgctcaaagagagcaccacttccacatcaaaaatatacgccatagatcccgggctggccgcagcctcaagcatggcaagcgccagagatgatggccaacgattggaaaacgccgtttatctcgaactacgccgccgaaccgcaggttatcgtcgcgacggcatatcgtcatgccataccaaggaacatggctatgaagttgattttgtgatgggcgatgcactcgaacatgaacaatatgagctatatcaggtcacggcacgcatggatgataatcggaccatcgagagagaaacccgcgcgctctgggaactcatggccgaacaaaagctccatgaaggaaccatcatcgtcggcgatggaatcgagcgcgaataccgcaacagcaattatgtcatcaaacaagtgcccgcttggaaatggttcgttgcgcatgagccccggtaagcttcaccggccatgtcagattcctgagatggcaaccatgatggcaaggaatatgaacagagtctcgacccagatgagttcggcggaataccacatccagaacggttcgacccgcttgctggcgcattgacgggcaatcgccacttcgcttggcagcaccgcccaagccataaacagggcgaccaacaacagcacaaaagaaatgggcacccaaccgcattccaccagcactatcgaaaagcccacccaataagccacacctgccacttgctcttagccctccattgacctgacgcccatctccgcggaaccattcaagaactggtcggcgagacgcacgtatccgggcatatcaccactgagcaacgccaatcccatgttgcgagccgccttcacgtccgcgatccatgtcaacgccaccaccgcagccgccgcactcatatccagcgcctccggcgacgaaccatcgtcacgccggccaccacgacgagccgtcatatcctgccccatgccggccagcatgatgggcaacgccggaaccccgtacccacgcacgcaatcccgacaatccgacaacacccccaacgcctcatgcagcgcctccccatcacgctcgtccaccgcacgcatcaacaacgacgccaaacgcgcgccaacaagcccacgcgccttggaatccacgaaattcctatccagccacggaccggccacaacgttagaacacgcatccccggattccacaccagccagaaccccgcacgccgcttccacatgctcgctatcgaacacatactggcgggacgcacgcaccactccggcatctaatccgatcgccgcatccgacagagcggcatcccatgcagcatcagcaacatccgcatccacagaatccgtggaaacaccaacaacatcggcaaccgaaacagaagaacccgatgacgagccaagaccagcaccggattcacggaaggccagcacctccttcatccgctccacaccccgcgaatcgaacgacaccgacacatacggcatcatgccatccaacacctccagataccgcccctgcaacaacaaatccgcccacacccgcgtcacatcatcatcaagagaccaacgcaacaacacccacgcacccatacggcacaccgcatcaacatacccctccaactcgtcagcactctcctcacccggcaacggcatccgcccctcggcaacacgaccatacgcatccaacaacgaaccatccgcccgccacaacacacgaaacagccaaccgaccattccgcttttccccacgacggatatcaccccatcaagaaaacgcatcgcctccgcacgcgctgcgcccgcccctggcgagaccgtacaggataacgcgaccatatccccgaacgccccctgcccgaacacgtcatagccacgcgccacaaccccatgagccgcacgactcgacggcaacaagccaaccacaacaggcaaaccagccaacgcatccctcaaaccacggacacacccgacaaaaccctcaccgtcaacaaccacagcaacaccctccataccaacatccgaacagcaaacacgccgcacccacatcacacacccgtggcggccgcgtaggcaagcagcatcaacatgacgaaatcaagcaccaggaaaccagcagccacaggctgccacgaggcatcacgcccctccaagacacaacgccggatcgcacgaagctcaccgggaatccagaacaacaccatgccgaccgccatcacggaattcacccagaacaactgattcgcatcggccgggccgacccacaacatgcccattaatcccaaaccggcaaccacattgccacccacacgcacacgcggggaaacacccaccccacgcaacaccacaagcaccacggcaaccaccacggcaaccccagccacaaccaaaccaggcaccaccacagcaggagaactgtcgtaatacagtctgtccggacgtccagtcgtggagtcaatcaaactttcgacatggggaccatacatcgcatacataacggtctttccaatctccgcgcccacggcaccggcgacacactgaacaatcagaacgtccccggcaacagcaatccacggcttgcgcataacatgagcagccagccacagcaatagtcccggaacaacacccacgtcgaaaaagaccgccacaggccaccaatcgctcgacaacgagataccggccatctgcaggaaccacacaccacctctagcggaatcacgttcgaagaacgcataccgggcttgcaaacctacctgcgcaaggaacagcacaaaccacatgatagtccacaaggcaacccccaaacgagtgaacatacgcctgccacccacaggaatgcacatgtcgatgaactcgcccaacgcgccattcgccagaacacgattctcaccgccgacatcagaaccgccagcctcggcatcaccgcccacaccagcggctccacgctcccacggtggccgaccaccacttctcaccatatcaatcacctctccaccataaaggaacgaatcgcggaacccgcataaacaaatccttcaccggcattgttcaccgcatccgccgcatcattcaactgggcaagccccggaatgaacattttcgccacatcccatggacccgatgtctgccgcccgtaccactctcataggccaagcggatatcacgtacacgacgtttcgcatctgcccactcatcgcccgcggtctcgacatggtcgctgtacccgtccagcatctgctgtgcggcttccttcgcctcacgcgcattcctgcgctgcacatccgtggcggcatcgggcaactcgtcaaacaccgcccccgcctgcgccaatgccgagcgcgccccacaagacagccgctcataccgctccttctcgtcgcgtgcggcgatggcacgttccaactgggttttggcatccgactggaacccgtccaaagactgcatccagccacgcagctgacaggacacctcaccaaagctgtcagcaaatcggccgaaatccctaggaagatcctgcagcttctcctcgaacttgacaacccactcgccctgcatgccggcctttgtgtccagattcttcaatgcggacgccatttcggagaaatcccgcgacaaacacttgtacttccatgccatacgcgcgattccctcggtatcacccgacaccggattgtccggctggcccactacggcccagtccaaataatcgagattcttcataattccccaactcccctattgatccgattcgtccgattcggtttccaccgagactcgcaatgtcgccgtaattctggtaaacagctcgaacaacgtgtcagacaattccacctgaggcgtaatgccggtagcaagaattacctttcccgcacaggggatgaacgtacgcaacatcgccaacctacctacgggcttaccttgttggccatgaacggtttctacagaagatgcctgtaccgcaggaccgagtttattgaatgacgttttgctcatgtgcagttcatcaccttcgggcaggccttcccgctccgtgagcagcgactccacgatggcatccaattcctcatccgctgtaccatacggcacagcggatggaagcactgagaccatgaatgtagccattaccaatatgggggctggcatcatcaagttccgtggttatggcgtatcgtacaccagctttccatgattgctcgtaagagttcgccagatatttgcgtaatgccggataaacttctcgccagtcggcgatgacgtgtttcatcggttcaagagcctgccgaatctgccgttcccggtcagcaggatccaacaggatttctctccatccctgtggaggtatcaatgaaatatgtaagaattcagccaacggattctccccatcgccggtcgataatgctcatagcaggcagtcaagattggtgcacggcatcgaaaatggccttggcaatcgcctcatcggcctcatcggacccggttttcacgttttccaagaagccacgaagattctccgtcttcttcttgtacttgttcttcgtatcgctgacctgatggttgaatgcgaaaaccgcatcgaccagctcggaacagccgacattgtcagaactcggctcggtaatctgctcatccagatttagccgatcacgaatactgttgaaacccctgcatcagcgtgcttactgattcttccacaatcgtcaggttttcggccacccagcaacctccttgttgttcgtgcaatccttcatacagtttcctcggcaacaccaatcaaaccgattctattggcatccaacccgatacggcaagaccttccgaagcgaatgctcacgactcggctagctcgcgaacatgccgcacatacgactccatatcggcgttcaggagatccatggccagtctgcggctccatgaggggtcgggaatgcgcgcgagcagcatggccgccatgctcgagcacaggtcacgcgaggactccaggtaccgcatacgttggtcgagatccgcatcgggccgcagcccgtccgaatcccgcaacgtgcgcgcggcgatgatgggcaacgccagtatgccgtcatcacaaacgattccccggtatatggtaagcagattcaacgcagcctcgagccggtctccatcaccctgctccaacgcggtggaaaccaaaggctccacgattcccgctcccgccaaggtcagcagcttgtcctgcacgaaatccggcctgcgccagggattgccatcatcaagctcgccatcaccatccgcatcgacaccggcatggtcgaggaaataacgatacgcctcgatgacgtggtccgcatcgaacaggtacagtacatcggattgcgggaacggacggccatcatccgcgacgtcaagcccctccccgtcgtcagacgcggtagaatcctcgcctgacgaataatgaggaccgtcttccgccttatgcagcttcatctccatcgcggcggtctcgccacgccgcatcgccgcggctatggcgcgatcgcgcaaatccgacaccaccaattcggattcgttcgtgttcaacgacacattggagtacggaagaatgcaattgagcgcgtcatcgtactgttcaatgaggaacaacctcgcgatatacgcgctggaggtatccccttcgccccagccaagaaggacatgggccgccaaccgacatgccgaagtcaggaaatcaaaagtggcgtccagattctccacatccgcatcggctatctgctggcgaagctgcaactccttgccccaaatcatgcggaacagccagccgaacacatcctcatcatcaatcatggaaactgaatcagatataaatccctcgccctgggcaaccaaatcctcatcatgggtgcggacggccaaagcgatgatatcggcgggattcgtctgcccgaacacacgataggacctccacgccagatcgtcctcgaagccatccggcaacggaaccagcggattcttccacatccggaaatccgcaaccagccacttcaactcctcgacataccgtcgctcatccaaccgaatggacatccccactcaccctcctttgcactaccatcccagcacacaaccagccgtcacgccatgggcagcgccgtacacacgccaatgacgaacaacgcctcg

SEQ ID NO: 1011 - DNA, 10358 bp, Unknown
  R117_24m  MAG No. k141_38516
cgcggcatgtccgggtagaagtagttcttgcgggcgaactggctccactcggcgatttcgcagtgcagggccaggcccagcttgatcgcgtaatcgacggcggtcttgttgatcaccggcagggagcccggcaggccaaggctcaccggggtcagctcggtgttcggctcgccgccgaactcgatgtgggccgggcagaacagcttggtgttcgtggacagctccacatgggtttccagaccgaagaccacatcgtacttcttggtggcatcggcgtacttcatcagtttttcagccatgatgttgtttctttccttccgatgctcacttgcccaggccgtcaagccacggggtcttgaggtcgttccagatcgggccgttccagctgtcttccagcgcggcttcgagggccgcagccggcttgtacatgacttcgtcgcgctgctgcggggcgatgaactggaagccgacgggcaggccgtcgtcggacaggccggccgggatggacatggcaggcacgccggcgaggttggccggaatggtggcgatgtcgttcatgtacatggccagcgggtcgtccatcttctcgccgaacttgaaggcggtggacgggctggtgggggccacgagtacgtcggccttctcgaaggcgttgtggaagtcccggatgatcagcgtgcggaccttctgggccgaaccgtaccaggcgtcgtagtagccggcggacagggcgtaggtaccgaggatgatacggcgcttgacctcgtcgccgaagccggcctcacgggtgtaggccatcatgttggcggcggtctgaggcacgccggtcggcggcatcacgcgcaggccgtagcgcatgccatcgtaacgggccaggttggagctgacctcggacggcatgatgatgtagtaggcgcccagcgagtagccgatgtgcggaaccgagacctcaacgacctcggcacccatctccttgagcttgtcgacggcctcgttgaagcgggcctcgacgccgggctggaagccgtcgccgccgagttccttgatgaggccgaccttcatacccttcagatcgcgcttggcgccttcgcgggcggcggcgaccatcgggcgcgggccttcggggatggaggtggagtcacgcttgtcgtggccaccgatgatctcctgcagcagtgcggagtcgagcacggtgcgggagaccgggccgatctggtcgagcgaggaggccatggcgatggctccgaaacgggagacgccgccgtaggtgggtttgacgcccacggtgccggtcagggcgccgggctggcgaatcgagccaccggtgtcggtgccgagggcgatcggtgcctcgaatgcggcgactgcggaggcggagccgccaccggaaccgccgggcacgcgctcggtatcccacgggttgtgggtggtctggtaggcggagtgctcggtggaggagccctgggcgaattcgtcgaggttggtcttgccgagaatcggcatgccggcggccttgagcttttcgatgacggtggcgtcgtacggcggcacccagccttcgaggatcttggaggcggcggtggtctcaatgcccttggtgacgatcatgtccttgatggcgatcggcacaccagccagctcaggcagggcggccttgtcttcggcggacttggcgtcgaaggcgtcggcctgctcgagagccacatcgccggaaaccttcaggaaggccttgatggacggctcggcggcttcgatcaccttgaggtgggcttcgacgagctcacgagaggtgacgtcgcccttcttgatggcagcggcctgctcggcagcagacagtttgacgagagttgcggtttcgttgctcatcgattactcctcgcttcccaggattcgcggtgccacgaacatgccggcctcggtcttcgggccaccggcgagcgcctcttcctgcgtgagcggggtttcggcgacgtccgggcgcaggtaggcttccagaggaaccgggttggcggtcggcggcacatcgtcggaggcgacttcctggaccttgttgatggagtctgcgatgacgttcagttcgccctgcagacgggtgatttcctcatcggtgagcgcgattcgggccagatcgcccaaatgcacgatttcttcacgtgaaaatgttggcatggccataactatatgagccgtatgtgacacgcagttgtcgggaagcctcattttcccgcctactggagcccttcagcgaatcagaagctcaagccggtcgagcatttgccccgctgctggcttcttcggcggggcaaaaccgttgccagaccgcaagttcaccttactgagacgactcgcagcagagcaaaaccgcgagctgaccgatgaaacgccccgctcagccatcccagcaaaacaaaaccgcggtccaaccaataaaacgccccgctgagacgccccgcagcgaggcaacgccacggcccaaccgcaaatgtgccccactgaagtatctgcatggccaccctaataagctcacaatgagcccaaacacacctacatcgaacatatgaacgacaatcgccctgcgcacctcgacagttatccacattttgcatacccacccaaaagaatccacataatcagtccaatacggtcagatgcctgatgatcaggcaaaaacacacatctaggcaccggagctagaaccacataaccccagacagatagacaccgtgttcaccattggcataccgtcgaatcatgaaacatcacaaagcagtggacatactcatcacgaaggctgaagcaacgcaacagtgcgcttatggaacaaccaaggcacaccgctcggcgctggctcggcgcgtgcaggcgcgcgaactcaaacgtgtattccccaacatgtacgccgcttcggaatactgggattcgctgcaacccgacgaacgtatcagacatattgcacgaactcttcataacagacatccggattgggtgttcgccggggtcacggcagcggccatccacgattttgaacaccaatggcatcttcatgctggcaccatcactctcgccacaacatcacgaggccccaacgccagcagtgcaaaggtcaaacgcatcttcacgtcaagcagcacgccagaatatgccaatggactcccggtgaccagcaaagccagaacggtggtggattgcgggctgtccgtcgacttccgatttgcactgcccattatcgattcggcgctgcgcaacggcgtcgccatcacggacattctgaatgtgtgcagcactatgcgacgtgattgcacgccgatattccgcctactgcattatgccaatccggcgagtgagaatggtggcgagtcacttggacgaggcaccatcatcgcaggcggcctattagccccagaactgcaacaaaacatcaccgacccgcaaaccggtgctctgtatcgcgtggatttcctctggcggctacctgagaatcggcttatcgtgggcgaattcgatggctatgaaaaatatgtgaacccggatatgaatgaccgcaagggtgttcgtggtgcagttcaggcggagaaagaacgggagacggcactgtaccgggccaaagtcgacaccattgtccgattcacctatgaggaggtgatgcaacaacatcctttactcaataagctgcgggcagccggcatacctcatgctggaacagtgatgggagctggttaagcgcagtgaaccacagtggtcaaatccatggggtcagagtcaccagaaccatggtcactgcagaaccgccaaagcagtaacccgcgttatttgatatccgatatccgcttttccggtgatgatgagaccgccgatccatgcggcggcagcccaggcgatgagaatcaggccggactgccaccattcgggaatccagtagtccggtttaacggcttcggccagtgtggactgcgcggagctgctgatgcctgcggcgagcaggatgccgacgatgccggcggcaaatgcgaattaatgccgcggcgatggatttggtggcgtagatcatgcctctaatgtggcccatattgggcagatgcggcaggattgtcgtcgcatggctacacgcctgatacggcgtgttgggcaatccatgcgtgcatggccacggccgccgcagcgcctgcattaatggagcgcacggaaccgaattgagagatgtagaccacatcgtcggccaattcgagggccttctcgctcaatccggggccttccgcaccgaagagcagcaggcaccgcttggggaaggtataggtttccatcggcactgcgccgggaatgatatcgagggcgatgacgcgggcggcttgaagctccttgatgcgcgcatcacaagcatcgatttcggccagcagctcatgaaggtgcttgttgtctccatccacagccacatcatgcgcatggatggcggcggcaccggccttggctcgttcataggcgatttcaccggcgatgcgatgatgccagctttccaccagttcggcgatagaggggtggtgttcgacgtgctggtacagttcggtcatcaacgcgcccttgcgattccacttatgtggaccgacaatgtgtacgcgcttggcctggaaggcgttggcggtgcggaccatggaaccgatgttgaaatcgtgggtccagttttccaccgcaacttcgaagtcatgacgccctcgagcgtcaagatcggccttaatggcagcgacggtccagtagcggtaacgatccaatacgttgcggcggtcgccgtcattcaacagcaccgagtcgaaacgaccgtcataattcggagaagtcggatcgtcgggacgaggctcgccgggatgggtctcagaccacggcccaaggccgatttcacggaattccggttcacctgaagctttggcagccaaagaaatctggttgggtgcgtgcaatctttctcctcgataacgctattcaccggttccccttagtcaacttcgcggctcagcccggctgactttatgcgagggaagtcaaaggtggatttaccgcagttcggattcgtcgaagacctggatgaaggggagcgtttgctcgtcgccggtggaggggttgaccacattgatgtctttggcaccgccaccgaccagcgaggcgatggccacgaccttggcacccagctgctccactatgccaaagtcgaggctcagctcattgccgttgcgcagggtgaccagcgagctggtctgcacgtacgacttttcggacagccaagcatccaacagcaccacacggcggccttcgatggaggggcccttgatggacgggtagacgaagtccatcacgaatccgtctaggtcctcgccacgagaggcggcggcctggatcatggcggacaccatgggcacagatgctgcggtcaaggcaccaacagcatcgaagtcatcaaccgaatagcccgcatcttccaaagcgtcaatcagtacatggcccatgacggtggcggcacggtggtcaaaagtcaccgcggcaagttcggagaacggacggcccaccacatgctccctcagcaaggtggctagctgttcacgcggctccagcatggcaaagtcattgcggttcttcgcgacggcgaggtccggggtaccagtggggcggaatccagattcagtcatgactccagactatcgcctgaggcagtcagatgagtatcaccttcatcggccggcaccacttcaggggcggacagttcgctcacattgcctttgtctgattcgatgatcggtacttcctcgatgatcttggtcggttcgattttttgcagcttgcgagcggtgggcaacacacggcgttccaaactggacgcgaacttgttgtaagcgctgactgtcttggtgatctgggtgcccaatttgatggcataatcacccaacgtggagaaccgttcgtaaagttctcgggacaaatcgaacagctgcttggcgtcatcggtgagcgactgctgctgccaggcataggccacggatttcagcacggcccacagcgtgaccggcgaggtgagcgccactttgcgagagaacgcatcatccatcagtgtggggtcggcttcgagcgcggcctgcaacagcgcctcattggggatgaaggccaccacaaaatcgggtgccacatcaaaggcattccaataggccttttcgccgagagcacgtacatgctcgcgcaacgccttggcatgggctcgtaacaaatcatcgcggcgggcaatatcctcggggctggcggtgtccgggatctcgcaggcacgctggtaatcggcataaggcactttggcatcaatcggaatggtcttgcctcccggcagatgcacgatcatatccgggcgcaacgtacgtccatcggcatccgtgaccaccacctgaatgtcgaaatcgacatgttccagcaatccggcggactcgacaatgttcttgagctgggcctcgccccacgcgccacgcaccttgttgttgcgcaatgcggcggacagggaactggtttccttgtccaaacgggcttgctggtcgttgagccccttgagttgggctcccaatgcgcccatttccctcttgcgaccctcttcgatctgcgtgaccttgttctgcaaggtatcaagattcttggccactggcgcaagcgcctcgagcaccttgctctgttctttcaaacgtgcttcctgttcagcacgcttggcctcggcggcctgagcatccgcctgacgcttccgttccgcctccgcagctgcacgctcacgttcctgctgaatgcgaatctgctcagcctgctgcgcctgggcaagttgtgacttggcgaaagccaattgctggttcacgccttcaatctgagcctgtgcggcagcattgcgagcactgagctcagcattctcgaatcgcgcattctccagcgaggtcttggcctcctccagctcctcgcttttgacgcctcgagccatctcctgacccttatggcgccccagcacgaagccggcgaagaggccaagccctgcaccaaccactagcacgacgatgacgataaccacggttcctatttgctcaaacatggtacccagtatgtcatcgatggtgaatgacggtaaatttttaccgaactcgacgatttcaagccgttaaacggacgctcagcagcccacattggacgcttggccttatcacagtcgagcatcaaccgttattatgctgtgtcgtatccgagcgtcagacggcctttcatgatttgccagcgcgcgtcatcatgcggcagaactcgtcacgatttgacgagacgcgcaatggccgcggaagcctccgcaagtttttcatcggccacctcgccgccctggaccgacgcctgccgcacgcaatggttgagatgatcgtccagcagcaataacgccacggatttcagcgccgaattcgacgccgaaatctgcgtcagaatatcgatgcagtatttgtcatcctccaccatctgcgtgatggcgcgcacctgcccttcgatacggcgtaatcgtgcgatgaccttggccttgtcttcgtcataaccatgcatcgcaaaccccctgatacttatccgtcagctgaacacaccccattatataccctctaggggtatagggtatacactgttgttcagtacatcaggagtgggaaggaacagttatggagttcagcatcttctcgaccgtcgcggcgctgatagtggcggccgcattgacatggctggtcctgcgattcttcttcggaacgcagaaggcaacggccggggccatggacgcttccggcgaacgccaatccgcaacaatcactgtcaagggcgggtactcccccgccgtggtgagcatgcgtgcgggtacgccgatcacactagccttcgaccggcaggagaccggcgaatgcacctcgcatgtggtgtttgctgatctgggacttgacgccatgctgccgggcaacgccaccaccgacgtggaactgccggcgttgccgccgggcgagtatccgtttgcgtgcggcatgaatatggtgcatgggatgttgaaggttgagggagaggacggctcggatgagaacacgccccttcctcatcctgatgcttcgtatacggcacctaccgccgtggatgcggcggaggccgatcggcgagaggcggctgaacgcgccaatgagatcaaggcgctgacgaagctggtgattgtgggcgcggtactgacgttgccggtattcgccgtcaccatgctgcatatggccaatcccacgctggtgccgcattggatggtgaacccgtggttgcaggccatcctgatcacgccggtgatgttctactgcgggcgtccgatccacacggtcggcttccccgcgttggcgcatcgttcccccgacatgaactcgctggtctcactgggcacttcggccgcctacctgtattcgctggtgacctgcatcgccccgtgggtgttcccggaaggctcgcgcgaaccgtatttcgaatcggttggcgtggtcatcaccttggtgctggtcggccgccttctggaaaccaaggcccgcgaaggcaccggcaaggcggtgcagtcgctcatcaaactgcgcccgcgcaccgcgcacaaactcaacgccacttccgcagacaatgtggacggcatcgaatggcgcaatccggcgtatttcacggacaccgacatcgacgccatcgccaccggcgacctgctggtcgtcaagaacggcgagcgcgtgcccacagacggcatcatcgtggccggcgaggcacgcatcgacgaatcgatgatcaccggcgaatccaagccggtttccaaaaccgcaggcgacccggtgaccggggccaccgtgctgctcaagggcgactgcgtgatgcgcgccacccaggtcggcgcggacacggtactctcgcagatcgcggcgatggtggcccgcgcccaggcgaccaaggcgccggtgcagcagctggccgataagatcgcccggtatttcgtgccggcggtgatgatcatcgccatctggacgttcgccatctgggtgtcactgggcccggtgccgcaactggcgcatgcgctggtcaccgcggtcagcgtgctgatcatcgcctgcccgtgcgcgctgggactggccacgccgctgtcggtgacggtctcactgggcttaggcgccaccaacggcgtgctggtcaccagcgccaaggcgctggaacaggcgcgtcgcatcggcaccgtggtgttcgacaagaccggcaccatcacgcgcggcgtggtggacgcggccgccgactgggacaagccgagctacgagcaggacacagtcaaggaaggctcgcgcgaggccatcgcggcgttgcgcgcacgcggcatccgcacggtgatgctatcgggcgacaaggccgaggtagccgggcgcatcgcccgcgaagtcggcatcgacacggtgatctgcgaggtcaagccggacggcaaggcctactggatcgccaaactgcagcgcgaacgcgacgaggccgccgccaagtccgcggacggcacctcccgcacggccgcgcaatcccgcactctgattgcgatggtgggcgacggcatcaacgacgcccccgcgctggcccaggcggatctcggcatcgccatcggcaccggcacggacgtggcgatgcagtcggcggacgtgaccttgatgagcggcgatttgcgcggcgtcatcaagaccatcaacctgtccaacgccacgatgcgcaacattcgggagaatctgggctgggcgttcggttacaacgtcatcggcattccggtggccgccggcgtgctctacccgttcaccggctggctgttgagcccgatgatcgcgggtctggcgatggcgttgagctcagtgtgcctggtgctgaacgcgaacaggctgcatggggcgaatatcaacgtgggtgctgccgatagcaccgctggctcgggcaacagcacggcggatatcgaatcagccggatcggccgaatcagccaacgccgccaacatcaccggctccaccacatccaacgcgcctcacgagccgaccatcatcatcgacgatcgcaccacgctgaatcacaccaatcacgcatctgaccaatccaataatccaaccaacaaggagaacactatggatatgggaatgcacatgcaccacaccgcccccgcggacggcgaaaccgccaccgacccggtgtgcggcatgaccgtggcggtgaacgccgacgcgatcacgcgcgagtatgagggcaagtcctattacttctgcggcgaacactgtgccacgaacttcatgaaggccccgcaggtgttcctggagcagtag

SEQ ID NO: 1012 - DNA, 33891 bp, Unknown
  R117_24m  MAG No. k141_38969
gccgatcgatcatcgaatgtcatgagtggctcccttcagacatagagtggtgcaccgatttggcctaccggatgcaccacgtaacgtgccaccgatatcgtcgggccgaacaccctctgaagacactacaaggaaactattgtccaagccgttcggaatcgttgaaaggaagctgtttcggcaaaagaaaagggctttcgaatttcttcgaaagccctgctagcggaggatacgagattcgaactcgtgaggctgttacaccaacacgctttccaagcgtgcgccatagaccactaggcgaatcctccatgctttgcagcgcgcagttgaactgtgttccgcaggcaactcgaataagttaccacaggtttcggataagtgcacgcttcggcgtggcgcgtgtcgcgacgcggatgtgaagaatgatcactgcgagtgaaagactcactggaaagtcccgcgcaacacccgcacaaggaccgcatgcttgtgcagggcccacacacccgcgcgcacctacacaacccccggtaaagaaatcaccgtgtccaggtgaattttcgatgttcgcccggcgcgcgcccgcaatcgcgcctaggctgtggagtcatgaacgaggggacagcgaccgacgtaaccgcagcacatggcggccggtcgcgccaatcgaagaaacactcaaagacgtaccgcagcatatccgcgatccttagttggctcacggcccgccgtccgaccacgttatccacatcgctgcgcgcgcgattcctcccttacctgctcacgctcgctatcgcctggctgccgtggctcatactcacctggccgggttcgatgcgcgacgatacgcttgcccaatatctgcaatcgtccggtctgcaccactactacacccagcatccgctgtttgatacgctcacgttcggcctgttctggcatatcggcagcgcactcggctcccctctgatcgggcaggccctgtacaccgtgacccaagcggttctactcgccgccgggtgcgcgcttctgctgtgctacatccgcaaaatcggctcgccgcgctggctcatcggtctcggccttgtctatcttgccaccaactatgtggtggtcggcgcaatcaccacgatgggcaaggactcgttgcatgccgtgttctatctgccgttggccgtgctgttcgtggaggcttgtctgacgcgcggctcggtactggctcgccgcccggtggcattcgcgttcgtcatcctgttgttcgccaccatcgtctccaagcggacggcgctcataatcgtgctatgcgccggctgctgtttgctcgccgtctgcacgcccaaaggcgcgcggcgtcgtgcgttcgcgtgtcttgcggttgccatcgttgtggcgcagggcgtgtggacgccattaagcgcggccgccacgcatgcgaatcgatcgcccggacgtgaggtgtggggcctggtcacccagcccgtggcccggctcgcgcacgatgatcccagtgcgatagacaagattcagcggcggcgactgaacgcgatcatggatctcgactgggccgccgccggcatcaacccgcaccgcaccgatgagaccttccgcactctgcgcgagcaccctaggccaaccgcggcgcaacaactcgcggccctgcaggtctgggtgcagctcggcctcgcgcatccgactgaatatgccacggcctatgccggggtgactcgcggatggtgggacccgcgcgtcaatttcgcgtaccccactgattccgactacctgttcacgcctagctatctcaggcaatgggcgtctttcctgactgaaggtgcttggaagcatacttccgacggagatgccgataccgtggcggccggacggcttgccgccatcgaacatgaccttgcgccgctgaggggtacctccgacaagccgcaatggcagaaaaacatattgcgggcgattcatcggtgggtgcgttcggatggtcatgtcggtgttcgcaaaggcaatccgctgacttcgatggccctgtacgtcacgtggattccgctggctgctggtcttgcgctggcggtgcggcctgcgcgacgacgctacggccccgcactggccgcttacggcttgctggcattcacggtgctgtcgctgtatgcctcacccgtggcactattttggtatccgattccggtattcctcacgttgccgctttttgtggtgttgccgttcacattccgggaaagccatcctctctgagcatagttatctcagatagtgaaataattgcggggttgaaaagcactaaaacgccttctattacctcgcacccgtcaaaaaatcaagactgttgttcaagaatttttttctatagagttcatagttgtttttggaccattcgagtacttgaagtgagaggaattcagcatggttcgtcgcgcctgcgcgcagtccgctgaaatgaacacgatgcgggaacgtgatacgcgcgttgccgtttctcgcgtgcgcgcgaagtcgggcagcaccggtcgtctgcagtcggccacggtctcggctcgtgcatttgcggtcatcgtttttctgtttgcgatgatcgccgcgaccttcctcccctccgccatcattccgcagtccgcgttcgccgtgacgccggcaaccactgccactgctgccaccgtcaagagcgacgacaccaccagcgtcgattacgcgacctgggccgacgttgccaaggccgtcgaagcgcagttgcaggaaggccttaaggaatacaaggacggcaacccaatgggtgccaagtccgatttcggggctgcatacaccaccgtctacgtgacgtccaacttcaacaaagtggtgagcgacaccatcggcgcagacaagcagaccgcgcagcagcaggccttccaggacctgcaaagccaggtgttcacgtcagaccaggccgatcagcttacccagaaggtcaacgacctgaccgccgacctcgacgccacggcccagcagctcgacgccaacaccagcctcgccaacccgaagcagtactccgaagacctccagaagcagatcgccaaggagcgcaaggagctcgacgccaagaagaagcgcaccgaggaaacggccaagacttggaaggaagtcgcggatgcgatgcttccgatcctggacaacgcctacaaggcctatgagggtggcgacgccgccaagggcgccacgctcgtgaacgacgcctactaccagcactacgagaagctcggcttcgagaagaccgtgctgagcgccatcagcggcaaccgcgtctcccaggtggaataccagttcaagctgtgccgctcctcgatgaacaccggcaagcctgcttccgaagtcaagaagtacatcgacgacctgaagaacatgctggccaccgatgccgccaagctcgacggcggcgcggccgatgaggagggtggcttcctcaagttcatcaccagctcggtcggccaggcgttcctgattctgatccgcgagggtctcgaggccctgctcgtggtcgccgctgtggtggcctacctcgtcaagtccggcaacaagcgcttcaccaagtggatctacgtgggcgtgctcgccggtctggccggcgcaggcatcgtggcggtcatcttcatgctcgcgttcggcggctccggcccgctgcaggagatcatggaaggcgtgtgcgcgctcgtcgccatgtgcatgctgctgtggaccagcaactggatgctcaacaagtcctcggtggaagcgtggaaccgctacatcagggaaaagaccgaagccgcggtggcctctgtctcctcgcaggtcgaatccggcgagaaggtggcttcccgcacggtgatttcgctcgccatgctgagcttcctcgccgtgttccgtgagggcgccgaaaccgtgatcttctaccagtccatctacacgatgagccaggatacgcatggcatggtggtcggcgcactcgccgccgccgtggtgctcgtgatcatcttcctggtgattcgcttcacctccgtaaagattccgattggcccgttcttcctggtcacctcgatcctcatgtccgtgctggtggttgtcttcgccggcggcggcgtgcacgcgctcatcgagggcgacctgctgcccgccaactacctgccgggcgttcccaccaacgactggctcggattctacccgtacgccgaatgcatcatcgcccaggtactggcagccatcgccgtcatcgcgctgttcgtggtcggctttgccaaacagcgtaaggccaaggcccggcttgcggccggtgcgagcaagtcggacgcgaaggctgacgaggagagcgcgcaggcgtagcacaacgcccggtgcgaccatctcgcgcaacacaacttgcgacatggcaatggaagcgattccagcccacgccgccacaactaaaaacagataagtcgtgaataatccattcaccacaacagaaggaataagagaaatgatgaagaacaagaagcttgccgctctgctcggcgtgctgctcgccggctccatggctgtttcgatggctgcttgcggttccaccaacaacgcttccgataccaagtcctcgaccagctcctccgacaccgccaagaaagacgactccaagaaggccgacgccccgactgagacctccggcttcgaagaggtcccggtcggcccctccggcaccgccaaggagcaggacaaggccgctggcccgctgaccgtgggcgccgtctacttccagcccatcgacatgtaccctgcttccatgggtctgaaggctgctgacgcttccttccacctggaagccgacatccacgcctcccaggaaggcaccgactacggctacggcaagggcgacttcgtccctgaccttactgtgaactacaccatcatcgacaagtccaccggcaaggaagtcgagggcggccaggccacctccggtaccttcatgcagatgaacgcctccgacggcccgcactacggcgccaacgtcaagctcgacaaggccggcacctaccaactcaagctctccatcgagtcccctgagaagaacggctggatgctccacgttgacccggagaccggtgtcaagaaccacaagttctggaccgagcccatcgaggtcaccttcgacaactgggactacaccccgcgtcagtggtgattgactaagcagacagccccctcgtcagagggggctttacgccgctttagggagataattcttaggacggtctaaaaactcccctcagtccgctttgcggacagctcccctcagggaggggagcctaagatgaacagagaaaggacgcgaatgcttgaacaattcgtggcagtgatgccgggcaccttggcccccgcattgctggtgatgagcctgagcgtgatgctcacggtcggcgaggggcgagataagccgataagctcgcattggcgtctcatcggcctgaccgtcggcctgatcgccgctatcacattcgccggcctgcgcgcctcggccgtgatcaaccagcgcacgttcgtcaactatccggtgctgtggtgcgcgatcattgccgacatcctcaccatcgtcgtggtggtgttcgcacgccgcatcaccaccaattggcagcagcacaaggtgttcatgcacattgcgaacgccgtggccgccatcgacatcgcgctcaccctgttctacgcgctgccggacgtgatcctgcagctgaccatctgggtggagcccggcgacccgatcttcacgtccgacatgttgctgcgcgcgctcggcttcgcgctgggcctggccatgtcgatcatcgtggccgtgatcttccgcacgatgcgttcgaccgcggtgcgtgcctcgttcaccgccgccgttctcgcggtgctggtgattctgttcgtccggcacctgaccggtgtcatgcagatcctgcaggcacgcggtttcccgatgggccacacgggattcgtggccctcgcctggtcgatcaaccacaacgactggatgatcatagcccaggcgttcgtgttcctgattccggccgtcgcctccgtggtggccggcttccgcatgccgctgaccggcgcgaacgaagccatcggccgcaagcacaaggcgttccgccgccgcgccgtggcctccgccgtctggagcctcgtggccatgatcggcgtcacgctgaccctcaccgtcggcgtcgccgcgacccatcagaccatcactctttcgccgccggaagcctactcgctcaaggacggcgtggccaccatccccttcagccaggtcgaggacggccacctgcaccgcttcgaatacaaggccaaggacggcaccgtcatgcgcttcatcatcatccgaaagaacggtggcgcgtacggcatcggcctggacgcctgcgagaactgcggtgacgccggctactacgagaaggacggcaagatcatctgcaagaagtgcgaggtggccatcaacctggcgaccatcggcttcaagggtggctgcaacccgataccattcccgtacaagaccggccacggcaagatcaccattcagactacggatctggacgcgctgagcgcccacttccagtgagtcaggcaggagacaagaatcatgttctttctgcgtatgattactcgctcgttcacccgacagctgcgccggcgcctgcttatcgcgctgaccgtatgcctgtcggcgaccgtgtccgtatcgatgctgggcgtcgtgttcgacgtgggcgacaagctcaacgccgagctgtccacctacggttcgaacatcaccgtgcagcccaaggcggacgcggtcgtttccgacctgtacaacaccgagtcgggcggcgcggcgtccaccagcgacccgaccgcttttctgaaggagtcggacgcggccaagatcaagacgatcttctggtcgttcaacatcaccaacttcgcgccgcagctcaacatccatgccacggtgaacggtgccaacgtgccggtcgtcggcacgtggttcaacaaggacctcaagatctccaccggcgagaccaccgtcgtgggcgtggaaggcatgcgctcgtggtggcagctggacggcaagtggcccaaggacgattccgaccagggcgtgatcggcaagacgctggcctccgaactcggtgtgaccaccggcgacaccatcaccctcaacaagaccaccgcctcgggcaagaagaacgagcagaaaatcaagctcaccggcgtctacgattccggcgacgaggacaacggctcgctctacatcgcctcctccacggcccaggtgctcgccgacctgcccgattcggtcgacaagatcgaggtcaaggccctgaccacgccggagaacgacctggcccgtaaggccgccgcgaacccggccgcgctgagccaggaggaatgggagacctggtactgcaccgcctacccgagctcgatcgcctaccagatcgaagaggtgattccgggcgcggtggccaagcaggtgcgtcaggtcgccgcgttgcagggcaatgtgctgcagaagacgcaggccgtgatgattctgatgaccgtgctgagcctgatcgccgcagccgtggccgtggccaacctgatggtcgcctcgatcggcgaacggtctggcgagctggcgctgctcaaggcgctcggtgccaccgatgccgcggtatcccgcctgatgctggccgaaacggcggcaatctcgctgctgggcgcgattgtgggcgcgttgcttggttccggcgtggcccagctgataggccgggtggtattcggttccggcatcacgatgcggccgatggtgttcgtgctggtgttcgtgctgctggctgtcaccgtgctgctggcgtccgcctcctcgattcgttcgattctgaatctcaagcccgcggaggtgctccatggccgctgagtttatctacgtaggtgtggaaggaggaaaccgatgaccaacaccggtatgttcttcagaatgctgttcagcgccgtgttccgccggcgttcgcgcgcggtgatggccgtggtggcgtcgctggtcggcgcggccacactgttctgcctggcgatgatctgcctcgccgtgccgcagcagatgaacgaggagatgcgtgcgtacggcgcgaacctgattgtcacacccaccgaatcgaccaatgccgacggcaaggccggcatcgacaaggcgatggtgcagcacaccactgaaatggtcaaggccaagggttccgcgaaatacgccacttaccgctacgagaacgtgcgcgtcaacgcctcgccgtacgtgatggccggcgtgaatgcggcgcaggtcaagaacctcaaccatcactgggtggtcgacggctcgtggccgaccgacggcaaggtgctggtcggacgtgacatcgccgacgccatcggtctgagaatcggctccgccatcaccatcggctaccgtgcatccgataacgccagcaccaacggcacttcgtcgaactcctcgatcgaccagcaaaccaaagacggccgtgtctccagtgacattatggacacctccggcaccgaattccgcgtggccggcatcgtggacaccggcggcagcgaagactcgatcatctacgccaccaacgccgacgtcaacaagctcaccggcatcacgcgcggcgtggacgtcatcgagtattcggccggctccagcgatctcgcgggcctggtgtccagcatcaacgacatgacctccatgcacgtcaaggcgcagcaggtcaccaagatcaccgcctccgacacccgcatcatcaccatgctgcagacgctgttctggatcgtctcgctggtggtgctggtgctgacgctcgtcggcgtcggcaccacaatcagctcgatcgtctcgcagcgacgcaacgagatcggcctgcgcaaggccctcggtgccagctcgcgcgccatcggcaccgagttctacatcgaatcatcgctctacggcctgatcggcggtcttatcggcaccgcaatcggctacggactcgccagttggctgtgcgtggcggtgttcgaacgctccatcggattcaactggtggctggcgctgatctccgtgctgttcagcgcgctggtcgccatcgtcgcctccatcccgcccgtccaccgcgccacccgcatcgaccccgccgtcgtgcttcgcgaagaataaagaaagagaaacgtcatgctacttgaactcgaccacatctcgaagatctacggcgacctgcatgccgtggacgacctcaatttgaccgtgccggaaggcgaatggctcgccatcgtcggctcctccggctcaggcaagaccacgctgatgaacatgatcggctgcatggacacgccctccaagggctccgtgaagctggaaggccgcaagctggaggacctgaacgccacgcagctggccgacgtgcgcaagaacctcatcggactggtgttccagaagttctatctggtgccgcacctgaccgccgtggaaaacgtgatggtggcccagtactaccattcggtggtcgatgagaagcaggccatggaggcgctggaaaaggtcggcctgaaggaccgcgcccaccacctgcccggccagctctccggcggcgagcagcagcgcgtgtgcgtggcccgcgcgctgatcaacgacccgaagctgattctggccgatgagcccaccggcaacctcgacgagaagaacgagaaaatcgtgctcgacctgttccgcaagctgcacgagcagggcaccacgattatcgtggtcacccacgatgcgcttgtcgccagctgcgcgcagcgcgagatcatgctcaaccatggcgtgctcgtcggtgagaagtggaatgacgaggatgcgcgcaaggcctacgaggcggccggcggcaagcccgcctccacgggtgcacaggtcgagggcgcgcagaacggcgagaccgccattggtttcgctgaccccaccaaggccgcgaaaaccggcggcgaggagtaggaccgtcaggggcatcgagcagtatgtgaggaatacatggcaagctgatggtctctcccccagtcagcttcgctgacagccccctcgtcagagggggcttaaggagcgtgaatatgaccgaaaagaatacgttgaagaaatccgcgacattggcggcggccggactggtcgtggctggcgcgctgctggccgggtgcggcgaatccaaggccacgccgatggacgatgcgtacgccggcaactcgggcgagaccgagaagtcgcaggaagagcagtcgcaatcccagtcgaacggctccgatagctccgacggctccgattccggctcatcgcacaacgacccgtccaccaccacgtccgacaagaaggacaccggcaactacaaggacggcaactactcgatcaacggccagtacggcccggtcggcgaggattccatcgacgtccatctgaccatcaaggacggcaacgtcgagaccgtcaaaatcattgggcacccgttcaccacgatttccaagaaccatcaggacgacttcgccaaagccatcaacggcgtagtggacggcaagcccctgaagggactcaaagtggacaaggtcgccggtgccagctggacctccgacgccttcaacaaagccctcgaagtcgcccgccaggaggcttcgattcaggagtaagaccgctacttcagcaatgctggccacagcagatcggccatgcgcgaggcccaggcggtgtcgtcgtccatcgctttgccctcgatggcctcatacgccaccaaagacccgataatcgtggacaacagcaacttctcgtcaacgtcctcgcgaaacacgccctgcgcgactccctgcttgaggaacgcccccacacgctccagccacggggtcaccacctggtcgacgatgtgctggaagaactcggcctcactggacaatacaatgcccacgcgcttgacgtcgatgtcgttgtcgcgcacccaatcgaccaatcgctgcaatagttgcgtgaaatgctcacgcgtggggctgggcactgggccggaatccgggatggccagatacatcgcgctgatctcgcgcagcagctcgtcggcattatggtatcgacggtaaatcgtggttttggccacgccggagcgccgggccacctcctcgatggtcacgccgctgatgccgcggtccaccgcaatctgcagcgtggctcgcatgagcttgcgatccgtcgcctcgcgcgtgcgctcaccgcgcggtgtcgccgtcgtacctgtcatctccgtcatctcttctctccgaaatatgctcccgtacgctcccgttggcgggagctggctggcaaagccagactgagggtggtaagtccatgccgtttgtaggcaacccccggataatacctactagctcagcactttagtgctctcgactttggccacataccactggttgaaccgcaccagtggcttcctgagcaacagcccaagcaacagcagcggcggcacgaacgccagcagcattccggcggcccgccagtaatccatgtcgtagatgccggcgatggccgcacgcatcatcgtcaccgcatgggtgagcggcaagaacggactgactttggcgatgaagtcgggcaacatctgcaccgggtaggcagcgttcgcacccgaaatctgcacgatgagcataagcacgccgattgccttacccacattgccgaaactcaccaccatcgtataggtgaagaacgagaacaccagcgaggccagccatccggacaacataaacagcagcggatgcacggcctgcacgcgcaggaacagcagatcgccaccgagcgacaccgtggattgcagcagcgcaatcagcgcgaacaccccgtaatgcccaaggaagagccgatgcggccgcggctcgcccaatgctttgcgtgtccggcgagacacggtggttttcagcgtcaccaccatcagcagcgcgcccacccacaacggcagcagcgtgtagaacggcgccatcgacgaaccgaaattcgccaccgggaatacggccttgcgcctgagctgcaccggcgcggccaacgtactggccagcgtttcgggatcattgcccagcacctctttgaccatgctcatatcgccactgtttagtgcgtcgctcagtgtgctgttgaacgaagccagttcggcaccggcggaacgcagtttgccggacaccttgcccaaggtggtgcgagcgtcgctgagcatatcgctggcgtcgtcggaagtccttttcaggtcgccgagcgtggagtccaactgggtggcgccggaactcagtatgccggaggcgtcagagacggtggacgacagggagtcgatttgcggtttcaccgtggccgtgaaatccgacttgatattggcgatactgttctgcgcttgatcggccagatccttgacctgcgcatgctgatcctgcgcgtcctgattaccttggcgaatatcggtcgccgccgtattcagcgcttgccgcagcctgttctgccgtgcgattgaacggtcaatcgccgtgatgatggatgagtcgttgcccagtatgccggccaacgtgttgcgaatttcagtgtatttctccgtctgcttgccaatggccgtggcttgacggtccaattcgtcggcggccgtggtggcaccatcattcgcgtcggaatacagcttgtctatggaatcggacaccgcgccgaaactggaggcgctcgcgtccagtgagctgctcatcgcgtcagcggtggtgcccagggctccgaccacgtcggtgactccctgcttggcgctggcgagatccttgcctccttgtttggcggcagaggaaacctgcgtgatcagcgagttcgaggtgtcaagcaaggcgccggccgtatcggtcaatgcgctgtatgtgccaagcaaatccgccgtatcgtcaagccgtgtggcgaaatcggcgatattggcgttgaaggtattcagttgctctttggcttcgggcttggacagctgatcggccagcgaagacgcgatttccagccctgccgaagtgatggtcttggcgaacgtggtgttgatttccgccgccacctcgtccgtgccctcgttgagcagattcggtgccagcgcgttcttcttctcgttgcggtaataggtcagttcggcatgctgcacatcgtcggagaagaaggtcatcatgtctttgctgaacgacttcggaattacgatggccgcgtagtatttgccggatcgtgcgccctcgacggcatcggctttggacgtaatcgtccaatcgatctgactgttggcgcgcagcgcgttcaccacctgatcgccgaccgtgactttcaccgggatcaggtcggaacgatacccctcatccacattcgccaccgcgaatttcaggttcttcatattcgagaacgggtcccagcatgcggccacgttgaaccaggtgaacaggccgggaatcatcaccaagccgatcacgatgatgatggagaccacgttgctggtcaggcgtttgatgtcgccggtaaatagtttccacatggtgttcatcgtgcgtgcctgccttccttggtcggcggaatagtggggatgattgcggtaacggcggcgctcgggtccgcttcttcgtggcgttcggcggaggtgtcgcgacgcttggccttatgcccgtacagcatggcgcggatcgactcgtcggagaggttgccgagctcggtttggcggcggatggaatcgcgcatgaattccacgaccatcaggaagcccatgatgatgagcacccatgccagccatgtgcccatgaccacgattttctcgctggtggtcagcacaaacacgataatgagcgcggccggcaccacgaatccggcgataagcgcacccagcagcagccggggataacggtaggcgaatttggcggcccgacgttcgatggcatgacggtattcgtcgcggtcggccagtgccgcaatggcctgagtgacacggtattcgctgccaggcaggtgcaccggctcgccgataatcatgtcgctttccttgatttcccgcgcgaacaggcggttgagattggccagtttcggccgggcgccgaggccaagcgcaaaggccagaaccgcgaaaaccagcaatttgccgatataggcgaaccagtggccgtcgtagaagccgccgatggtttcacgcattgcgtcaatcgaataggtgaacggcagcagcgggtagatggcgcggaagaacgcgggcatcatttcaatcgggtacaggccggaggcgcccggcacctgcagaatgaccagcgccacgcacacgcctttgcccacgtgcatgaacgtggtggagagggcgaaaatcaccgacatatacaccagtgaggtgatgacgcaggtgagcagaaacaccggggcgctcgcgcattgaatgccgatgacaagatcgccgatggccgtgaccaggccttggacggcggccagcgtggccagcagcaggaaacggccgagatagccttgggttggcgtgagatcgtcgatgccctcgtcgtcggtttcgagtttgggaatgaccacgagcacgaacgcgcccacccacaaagacagggtggtgaacagcggtgccatgccggaaccataggaggcgaccgggtagacggcccgttcgctgataacagtgggggagagcatgaagtcggcgattgtggcggcatccagtttgccgtcggtgccgatcagggaactgagtgaactggagatgctcagggctttgatgtcggtggtcagcgtttcgagcttggtttgcacgccggccagcgccttatcggtgtcgtgcagggcggtcaccgtggtggaggcggctttgtcgagttggtcgagggtgctcttcgactgatcgatgagtgagccttgcgacgtgatgccggtcgacagagtgttggcggtcgagctgagggtgttgaggccggtgttgagctgaggaatggcgccggagatgatggtgccgcgagcggtattggcctcgcgtaccgtggtttgggtggcggtattgagatgctgcgccaatccggcggtgtctgtggaggcgttgccgatagtggtgttcaggctatcgaggttgcccagtgcgccggcaagctcgctattgtggctttccagtgtggcaatggcggattgcagcggttctcgatcggcgttcggcagccctttgagttggtcgatgatgtcggcgttcgcttggttgatgtcttccgccgtattgatcagtccgcctacctgctgattggcggcgctgatggttccggctaccgtgcccacgctttggttggcctgtgctgcggcctggctcagcaggcttgagccttggtcaagcgcttcggacgtggaggtgacgaagccgttcagactggcttgggtagtgccgatcagggtggagacgccggccaggccttccgcggtgtcgatgccaagtgcgcgcgcgtcgtccagcgcctgacgtgcggtgcgtgtctgctccggggtatcggtgagtttggtggtgagcttggcgatggtgctgcgtgtgtgctgcacgtcgccggaggcctcggcaagggccgtgagggccttggctttggtggtgtcttcggtgctgatggctttgccgccaaccgtattgatgacttcggtaagtacttcggatacggtggagacgaatgtggaattgaccgtgcggtccacagtggacgcgcctacgtcggtgactttgggggcgatggcgctggctttttcgttgacgtaatactccagagtgggccgactcttgccgccggtcaccacgccggcgagatcgtcggaaaagtctttggggatgatgatggctgcgtatgccttgccggattccacctggtccatggcctcggcttcggtgacgaaggtccagccgagctggtcgttgcttttcagctgcttgacgatttgatcgccgaggttttgcttgccgatgagcgcgttgtcggtgccgtcgtcattgttggcgatggcgacggtgatgcctttggtattgccgtacgggtcccagaagccgacgatgttgtaccacgaatacagtggcgggataaacaccatgccgaacaggatcacccatgcggccggcaccttgaacaggcgcaggaagtcgcgtttgaggaccttgaagatattgcccactgatacctccggagcttggtgttgcttgattgctacgttttccgtagcgatacgttaatcgtagcgctacggttgtagtagcgtaatacggctgccggagattattggggtgattgatgatggttttggcggaataacgccgctgcccagcggcttatcgtgtgtcgctgggcagtgtgcctaattttttgtggctggggtgctgtgtggccgggtgtgctgtgtgtgttggtgtgaggctgccctccatggggcggtaaaaccttcattgggtggtaagtggcccatggggcggtaaaattcccatggggcggtggcttaaaatggctttattccgcggaatgcggttttgggctaaccgccccatggggtaattaccgcctcatgagagagctaccgccccatgggtaaaccgttgtatcagctttcgatggtgccggattggccatcaatggccgactgctcgttctggctggatgactggtcggagttggagttaccggaagtatcagaacctgtgccggagctgctgccggtgccggactggccatcagtgccttggctggagcgaaaggcgttctggaacttattgacaagatttctggatggtttttggatgtttcctgaaagcgatagcgggctcggtgtccggcaatgtagacagacatgtaccggctatccatcaagttcggcaaaactgcaatcgggtgatagtgtaaggggacgctatgtggggaggaaaccatggttgaattcaaggacgatggcacggccactacccctggcaagccgcgggagaaccgtgacgccgagtccgcagtcgtggctgatctggtggccgtcgaactggacgacgccggcttgaacccgaacgccaagcgattaccgattctggcgcgcatctatggcgcggtcgtgctgctggacggactcgccacattgccgattatggtgatttccatcctctatgccgtgcgcgagattctggatggtcatgtgcacgtcgatgcgatgagcctgactttcatcctgtccgcgattcatgcggttgtgctggtagtcagtgccgcatgcctgattgtgttcggcgtgatgctgctgcgcaatcatcgccggtatgccgcgcgctggacctacgtgctgatgccgttgacgttggccgacggcatgctgtcgctggccctgaccggccttggcttcaacctgctgctgccgctgattcagatgattattctcgtcgtgatttcggtgaccgccgatccctccctgagcgaggaacgccgtttgcagcgcgcgctcaaacgcatggacgatcgcgatgattatgaatcggcggtggcggccggcatgctgggccgcgaccaatccggcaagggctatattgcactggacttcttcaatatcttctggctgtttaccatcgcttcggtgggtggcctgattatggagacgatctaccatatggcgctgtataacggtgaacttcaggaccgcgcgggtttgctgtggggcccgttctcgccgatttacggctgtggtgcggtattggtaaccgtgtgcctgaatcgcctgtggaaggcgaatccgttcttgatcttctgcgcttcggcggtgatcggcggcgcgttcgaatactgcaccagctggttcatggaagtggcgttcggtattaccgcgtgggattacaccggccgttggctgtccatcgacggacgtacttcgggccaattcatgttcttctggggactgattggtgtggtgtgggtcaagtggctgttgccgcgactgctggctctgattaatcgcattccatggaaagtacggtattcgctgactgcggtatgcacggtgctgatggtgatcgacattgccttcacgctgatggccttggattgctggtatgggcgcatggccggccagccgcaggattcaccggtcgcgatgtggttcagcgaacgctacagcgacgcttacatggccaatcgcttccagaccatgcatatcgacccttccaaggccgggcgtatgtgaatggctggcaagtaattacgcttcgcgggcagaaggtgcgtagaacctaagacagccttcgcgtgtgggtggtaagtgggatacactttcaagcgttgaaggaatgattccctctgctgatgtgctgttttgtgacgcgcgtgatgacgatgggacaatcaaacgaaaggcaaggcacatggccgaagctacagcaaacattggtgtgattggactggccacgatgggctccaatctggcgcgtaatctggcgcaccatggcaacacggtggcgttgttcaaccgtcactactcgcgtaccgagaagctcatgaacgagcatggcgccgaaggcaacttcgtgccggccgaaacgctcgaggaattcgccgcgtccctgaagcgtccgcgtaccgccatcatcatggtcaaggccggtgctccgaccgacgcaactatcgcgcagctggaagaggtgttcgaaccgggcgacatcatcgtcgacggtggcaactccttcttcaaggacaccatcaagcgtgagaaggaagtacgtgccaagggcttccacttcgtgggttgcggcgtgtccggtggtgaggaaggcgcgctcaacggcccgtctctgatgcctggtggcactgcggaatcctggaagaccttgggcccgattcttcagtccatcgccgccaaggtgaacggcgaaccgtgcgtgacccacatcggcaccgatggtgccggtcactttgtcaagatggtgcacaacggcatcgagtatgccgatatgcaggtgattggtgaggcgtatgacattctgcgccgtggactcggcatggataccgaggagattggcgacgtgttcgctgaatggaacaagggcgaccttgactcctacctgatcgagatcaccgctgagattctgcaccacaaggatgccgagaccggcaagccgttcgtggacgtggtcgtggatcatgccggcatgaagggtactggtacttggaccgtgcaggctggtctggaatttggttctcctgtggctgctatcggtgaagccgtgttcactcgtgcactgtcttcgcacggtgagctgcgtgaagacgctcagaaagaaggtctggctggcccgaacaagaccatcgatctggccggagaagacaaggccgcgttcgtcgaggacgtgcgcaaggccctgttcgcttccaaggtcgtggcctatgctcagggcctgaacgagattcaggacggtgctaaggaatacggctgggatatcaacctgtccgaagtggcccgcatttggcgtggcggctgcattattcgcgcccagttcctgctcgaccgcatcaccgaggccttcaagggcgataatttgccggcttccctgttgttcgatccgtacttcgagaagatcatcggcgaatcgcaggatgcatggcgtcgtgtagtcgtgcgtgccgtggaggccggtatcccgaccccggtgttctccagctccctggcgtactacgatggtctgcgctccaagcgtctgcccaccgccctgacccagtcccagcgtgacttcttcggtgcccacacctacggccgcgtcgacaagcccggcgtgttccacaccctctgggcgcaggaaggccagcccgaggaacagcaggcttgagcgtctgcgacaatctgtgggccgggcccctcattcagggtccggcccacaggaggcgccatcacaactcggtgacggtttcttcggtggagaaccaggtgaactcgtccactccgttggcgtaggaggacgggtaatccgggttgttgggccgctcgaagacatgggccagcgattcggctttgccggcaccggcggcgaagaaccatgtacggcgcgagcgggcaatcagcggcgcggtcaacgagacgcgcaacggcggcatcttgggggagtggttcacacccacggtgagcctatcggtaaccttgacctcatcatgacccgggaacagcgacgcatagtgaccgtccggtcccatgccgagaatcatcagatcgatgaccggttccggccccaattcattcaccaactcgcgctcatagtcgctcgcggcatcgtccagcagcgcatcattcgcggcatcggcggcggcgcgaacggaagcgtcatcactatcggcctgatccatcacatcggcgatgtcatcggctgaacgggtatcggccgccatctcatgaatattcgattcaggcagcttgccatccgccaccagctggtcaagcagcaggcgacgggcctccagagcattgcgatcggtgtcgtaagccggcacaaaacgttcgtcgctccaccagaaatgcacgcgcgaccaatcaaccgcatcagccagtggatcgttcagcgccaaacccaacggctgtgcggccgaaccgccagacagcgccacatccacacgtgtgcgatgcgtgccatcaggcaatcgttcggcgagcaaatcgagtagcgccaagacaaaacgttgcgcgccagcctgaatcatcagatctttattcggatacacaatgagttttcgagttgccatgtatggtccttatatggggtatgtgtcgtactttgcaatgtggattgtgttgtcagttgacaacgcataatacgggtggcatgccgggaatccagccatttgcagcaatgaaatgtgttgtcagttgacaacacaatgtacattgtgcgacatcgcatatgtcactttattactccgcggtcatgagcttcggcatcgcatgaggtaggaaacgatgagcaacggcgttggcatggctcgaccacaattgccgaactcatgccaacgccgctgtggcaacggttctaccgacttcagtgacgaatcagatcccagccttcgttgatgacctcggcgtagatctcatcgggatcgatgcggcgcagttcctcggtcagacagtcctcgatggtgcgcatcggcacggacacttcctgcggagtctggccgggcagcgagatcagcgcttggtcctcatacgggcgttccagtgagatcacaccgtcctcacgggtcaggtacacgccggtcacggcctgcgcgtcgggcacgaactcagtttcgactggtacgccgagtttcagacgcagccatgcgcacagcatttccagaggcaggaagtcggccttgccggtcaccttcacggcggtgatgggcaggtgcggcggctgatcgagcatcgaggcgagcattgcgcgccagacggtcagtcgtgtccaggacaagtcgatgtcttccggtgtccaattgcggcgcaaacgctcgatcgtggcctccggattattggagtgcagcgcgtcggtgatgcgactgcgggccatcgcacccatcagatccttggccgggttcgacggcggtgtggtcggccaccacgccactacaggcgcatccggcacaagcagcgggataaccagcgtatccgggtggttgataaggccaccgcgcggacgcaagatgataatctcaccggcaccggcgtccgcgccgaatcgcacttgggcgttcagattggaatcgttcggatcgttcgggccgtcggtcaaatcgacggccggattatcgcgattcgcgctcacctcggcggccacttcggtctcgttcggttcgccttcgccggactgatcggcaggattggtatccggtactacggcaatcacgcggcacgggtgctcacggctggccgagttcgcgatttccagcgcatgctctaggtccgcgtcctcggtggcgatgagtagcgtcaacacgcggccggtcgccgattcgccgcgctcctcgtgcagctgttcgattttgtgcgcaatctcgcgggtgcgggtgttcggcatatcgatgatcatggcatcctccagtggcggccgtcgcgcgccagcatttcgtcggcctgtgccggaccccacgtaccggcgcggtaggcctgcggctggccaagcgtggaccagaattgttcaatcggatcgaggatctcccagctgaggttcacctcttcggtggtcgggaacaacggcggatcaccgagcagcacgtccagaatcagtcgctcataggcttccggcgagttctcggtgaaggagcggccgtagctgaagtccatgttcacgtcacggacctccatggtggagccgcccggcaccttggctccgaagcgcatggtaacgccctcgtcgggctgcacgcgaatcacgatggcgttcttgccgagttcgcgcacggcggtctgctcgaacggcagatgcggggcgcgcttgaacgccacggcgatttcggttacacgcttgccgaggcgcttgccgcaacgcaggtagaacggcacgccagcccagcggcgggtgtcgatatcgaggcggatggcggcgtacgtttcagtggtgctcttggggtcgatgcctttttcttccaagtagccgaccacttcgtgcgagccctgccagcccttggcgtactgaccgcgcgcggtgttggcggcgaggtccttgggcaggcgcacggcggaaagcaccttggtcttttcggcggtcaggtccttggcggtgaagctcaccggctcctccatggcggtcagagccatgagctgaagcaggtggttctggatgacgtcgcgtgcggcgccgatgccgtcgtaatagccggcgcggccgccgatgccgatgtcctcggccatcgtgatctgcacgtggtccacatagttggcgttccagatcggctcgtacatggcgttggcgaaacgcagggccagcaggttctgcacggtttccttgccgaggtagtggtcgatgcggaacacggagctcgggtcgaacacttcggataccacgctgtcgagttccttggcgctggccagatcatggccgaacggcttctcgatgatcacgcggcgccatgcgccctcggacgagcgcgacaggccggaggcggccaactgcttggcaacctgcgggaaggcgcgcggcggcaccgacatgtagaaggcatggttaccctgcgtgccgcggtcgcggtcaagctcctgcacggtggcgctcagacgctcgaaggcctccggatcgtcgaacgtaccctgcacgaagcggatgccggcggccagattgcgccaagtcgactccttgaacggcgtacggcaatgcgcccggacggcggccttgacgaattcgatgaaccgctcctgtgtccagtctcggcgggcgaagccggtcaggccgaagctcggcggcagtaggccacggttcgccaggtcgtagacggccggcagcagtttcttttgtgccagatcgcccgtgacaccgaaaatgacgaggctgcacgggccggcgatacggggcagtctgaggtcgcgcgaatcgcgcaggggattgctccaattgggggattcactcataatgtacaagggtagccgccggcggctatctatcgctagaggcgatatgcgatttgggctgcgatttgggccacattgcgtgtgctgtgccgtgcgttgggccaatcgcgtacgcaaacgtgtacgcaacgccgtagttgaaatatcccaaaacggtgtgtattttagaagagttgcccctttagctcaacggttagagcagcgtccttttaagtcgtgggttgtgggttcgaatcccacagggggcacaacaaatccttggaatcgcaatggttccaaggattttttgtttcgaccagcctggctcctagagtggtgccccatgtcatgcaccacgattcttgtcggcaaaaatgccagttacgacggttccaccatcatcgcccgcgatgacgattcgggctcgggccgttacgatcccaagcgcttcgtcgccgtcgcccccgacgaccagccgcgccactaccgcagcgtgctgagccatgtcgaaatcgaactaccggacaatccttgccggtacaccatcgcaccgaacgtgctgaataatcgtggcattctggccgaagccggtgccaacgaacacaacgtggcgatgagcgccaccgaaaccatcgctgtcaacgagcgcgtgctcggtgcggacccgatggtcgagttgcggccggctgtcggcgggccggacagcaccgattatcaggccgagcagcccggcggtatcggtgaggaagacatcatcacccttgtgctgccgtacgtcaccaccgcgcgcgagggcgtcgcgcggttgggcgaactgctcgaaacctacggcacctacgaatcgaacggcgtgattatttcggatgcggacgagatctggtacgtcgagaccatcggcggccatcattggatcgcccgccgagtgcccgacgactgctatgccacgatccccaaccagctcggcatcgacgacttcgacctcgccgatgcgttcggcgagcagcgcgaatacctatgcagcgccgacctgcgcgagttcatggccacgcatcaccttgaccgcacaatgggaacgtcggtctcttccaacggccgtcacgtgcatagcgccggattcggaacaaccgttgcccttcccacccgcttcaacccgcgcaaggccttcggcaccgcgacgccgaaggaccatatctacaacacgccgcgtgcctggtacatgcaacgccgcctcaaccccagcgaggactgggattcgccggccgcccgctgcacgcccgaatccgacgacatcccgtggtgccgcgtgccggaagacaaggtgagcctcgaagacgttgatttcctgctgtcctcgcacttcgaaggcacgccgtacgacccgtacggcacgaccggcacggcggaatcgcgccaccgttaccgtccgatcggcgtgaaccgcaccggccatatggtggcgattcaggtccgcccgtatgtgccggcggccaatcgcacggtgatgtgggtatcgttcggctccggtccgttcaccgccgccgcgccgttctacgcgaacgtcaacgacacgcctgcctacctgcgcgacaccacgcccgaagtctccaccggcaacctgtattggacgaaccgcctgatcgccgtcgtggccgacgcgcattggtatgagacgaaccggttcatcgagggctatgcggaaggcgtgcgcgcgttcgggcaccggctcatcgagcgcacggatgagcagttgcttgctcgaagcgatgccgaatcgacgggtacgaatgcatggccgctcgatggcggccacggcgatgagaaggatgtgcagggcgtggcggatgtgctcgaagcggccaacgacgagatggccgactacctgcgcgagcatacaaccaagctgctgaacgacgtgctatacacctccagcaacctgatgcacaacagcttcgcaatgtccgaccgttgggccgagtagcaagacctcggctggggaggtaatagggatgccctgctgataacgcgtcagcagggcaaagccgcaatccgaatcagttgaagccgacgatgtgttcggcgatgagatagccgttgcgcacgatccagcggccggttttaccaggcagattgagcgcgcgggacatcagcttcgagcgcacatccttgccgatggccggagaataggcgtcaatcgcatcccacagctcggttttcttaacgtagttggccggatcgcgcgagagaatcaggaacgccgaggtaacgcatgattcgatcgtcaggaagtgaatcatgtaccggtacagcccctccggcaccgtaccacgttcgggcgtggcctcggtcatcagccgattgacgagccgcagctgatccacacgcttaatcatcacgtcggtctgcacgctctgaccctcgcgcccgatgaagtagtggtagaacggcacgtcgagatactggatgcgcttcacccacgggaacggctggtacgagtaatagaaatcgacgtagaacgtatgctccggcagcttcagcccggaatcgcgcaccacctgcgtgcggaaagtgagcgcatgcatgatgatgtactgcgccagaccgaacttgcccaggtcatcccagccgagcacgcggccggcctccatcacatgacggaagttcaccacgatcttgtggcgcttggtcactttgtcatacacatagttggtcaccagcatgtcgatcggctcgctggcctcacgttgcgcgcgcaacgtggccagaaccgtgtcgatggcctgcgggtcgacccaatcatccgcatccaccaccttgacatacatgccggtcgccgccgtgataccggtgttcaccgcgccgccgtggcctttgttctcctggtgaatcgcgcgcacgacacctggattggtgcgttccagtttgcgcgcgtactccagcgtgccgtctttcgaaccgtcgtccacaatcagtacctcgaggtcgctggtgtcgcttgccgaaagcagcgagttcacgcaacggtcgagataggactccatattgtatgcggggatcacaaaggtgagcgtctttgccgtgctggccatgaaagtcttacgtcctcacatatttagtcgttatgttcagtttcctgttcaaaccgtagcacttcgtctcccgactcggcagagtgttgcgcaacctgtgcccctgaactcgtgttctgcaaccctgaatcttccccgggggcgcgatcggaatccgattgggcggaacttgtctggtctgaatccggaccgccggaatcggactcgcgcttggctcggcgctcggcctccttccgcgccttggccccctcaaagaacaactggggcttggaatcgagccggctcaggccatgccatgccaggtccacgatgtacgcggccagctgctccttgctcaccttgggccggtcggcccagtactggccggtgaacacggtcatgcccaccagcatctgcgcatagtacggcacgcctttggtggagagtttctgccgtttgaacgtttcggaaaggatgtcttcgacgcgcacggcgatgtctcccagcagtgagctgaacgagccggacggttcggtgctgggcgagtcgcgcgccagcacctggaatccctcggcgtcctcttcgatataggtgagcagtgcgagtgcggtgcgttccacgatctggcgtgggtgcacggtcggatcgtcaagcgcggcggtgagcacactggtcaacgcgcgcatctcacggtccacaatgacggcgtacaggccctctttgccgccgaaatgctcatatacgatcggcttggacaccttggcgtgcgctgcgatctcctcgacgcttaccgcctcgaagcctttggcggcgaatagcgagcgtccgacttcaatcaactgctcgcggcgctgcagcgacgtcatacgtgaagaattagccatacacgtcagtttgtcacgaatacaggatgaattaggggcctatcttcagcagcttttcaagcgacaggtacattgtccgaaaaaacaggcatgaatgccgtatgtgtcatacaaatgtggtagaacataggtcatgagccggcaaagtgccagttcagcttgaaaggaggttggcatgatgagagcgcgtatttccatcatcggtgctagtcatgcttggggggggctcctcttctgagctgatacagtcggtcggccttcggagaaccacgaagaaggcaatctaatggcaaatacatacaagactgacattgctgtgttggacaatgattactccggtggagtaatcgcggcgtataacgctgcaaagcagcagttgtctcaggtgcataccgcgaatttggagggcacggatcgtgctttgccagatgatctgggcaatcaacttgatggtatgtacactaagttcactcaggaaaagcctcagaagctcgcagagctgacgcctaagcgtgacgatttgaagaagcgtcaccttatttttcttgcggtaaaactggctctgattattatcggcttggtaatcgccttctccaatagcgatgctgcaggattcggatgggttctgctgattgctggtgttgtatgccatttcgtgttctcctctatggatcagaaggctgcatcggctttgtctgatgaatggcaagcattctttgccgcatatcaaggtatcttcgggcacaaggagacgttgcactctccggcaacgggcttgtacaagaaggttgatgatttgtatcttcgcagccttgatgatcagcagcgtggttttgagcttcagaatcgtcagatgcagaagcagatggaagctcagaatgagcagcatcagcaggcaatggcgatgcaggctgctcaaatggcgcaaatgcaggaaatggtcaacgagcagcgttataccaattcgatgctgcatcgctgaatatcatgcctactgtcaacagtgagatggaatgccccggttgcggggcttccgtctctttgcaggataaagagtgtgcgttttgtgggcgcaaactcacttttacctcactgaacttcaaagaagtacgtcgtactacgttcaaggaatccgcaaaattcctaaatgcatataaaaatgcattgaagggttccccggacaatcctgaagtgcttgcttctttgggatacgtattgcttgatcgtggacaatacgaagaggctgccgacgctttggacaaggcgtgtagcaatggcgcagatgatccagatgtattgttccaggctgctcttgctcactttaaaaccaagaagccttttcaaatcaagctcaaggaagctgaatcgattatagccagacttgattcagccatcactatggaggcacggccacaatatctgtttgccaaggcgcagctcatcaatctgctattcgagcgtcgtttcgttcgatacagggaaagttcggcgagcatcttgcgccaagctgatgccgcaggacttactgatgccgatagaacagatatcgaatcgttgcttagggccaaatagacgctctgcggtggctcgtaagaaataaaggagactattgccatgacggcatatcgtattgaagacctgttggaataccgcaaggaattggccatgaacgcttgcggcatcttcgatgaagaggaagtcggccgtattgagccaatctcctacatcgagtatggtgccggccgtacattcgtcaccgtatggctgttcggcaacaagaaaatctactctgcgatgatagagctgttgccgggcgaatgggaggatcctacggttccgcatggcaaggccttctttgacgtgtaccgcttcaagaacattaacgacattcgcgtagacaactatggctgcgtgattacgttgaaaacgggcaagaaacttgagctcaaatcaaacagcctcgaaggcgcggattcattcctgttctccgcgcgaggattggtcagcctgtgggatgagtacgacgactgaaatatgtgtcgtgatgcgtgacaatacgcatttggtttttgccaattttgcaaagcagcaagtaccacaaccaaaacggtaaggagcgcaatcatggcgctattcgcaaagaacccaaatgaagtgaactatgccggtggcgagaaacatttcgttgacgttatcaaaaatcgatccgacaacgataccttgattttccgcaatccggaagaggatttcaatcatggcaccacgttggtggtgcagcccggtgagcaggcggtattcgtcaatgaaggtaacatcgagcaggtattcgattcaggtacgtatacactgactacttccaattacccatttatttcgcgtctgcgtaatgcgctgtcgggtggtatctcgtcattccattgcgtggtgtactttgtacgcattgcatcaagccgtgagatcacctggggcacggatactccggttaaagtcatggataaggcatatgccgaccagttcaccggcgtgggcatagagactgaggtcggagcgcgtggatcttaccgcgtcaaggtatccgacgcaggcgtgctcctgacgaatttgattggcggcaactatgacctgtcccagcaggagagcttgcgtgacttcttcaggaaccagttcctaagccatattgtggccctcctgacgcaggaactcaccaactggaatggcccattgattagcgctccggccaatgtgctgacttatgctcaggctattcaggggcaactggcgccaatcgtaggagaatatggccttgatttgttgaacttcaacatctcggggatgaagatattcgacaacgaagaacgccgccaagctcaggaactggccaccaagaatcgtgaacagtattacggcaacatggcagccggtgcaggtgaagcggctcgagcacaaggccagcagcaggcataccagacgcttggcacgaattaccaacaggccgagatgctgcgggcaatgaatgctaccgcggcaaatcccggttcagaaggcggctcattgatgggtgccggcatgggactgacgatgggtgcaggactgggacagatgttgccaggactgatgggccagactctacaagccgctgcaggcgcacagcccgcttcggattcgcagaccgcgggctcggctccagctggcaaagaagacccagtcgaaagactgacaaagctgaagaaactgtcggatgccggactcatcagtgctgaggaatttgagtccaaaaaggcagagatcctaaaggaactgtgagctataatgacgcgatatatttcttcgattattgtgacggtgttcttcgccgtcgcagctttggctttcggtttccaactgtccatattcgcattcgcgccgcttgcccagtacattgttctggtcttcatgctgctgtttgtcgttttgacgtgggtgtcggattggaacgctgcgaataatactatcggcgaaaatctgtattaccgagtaattgccgagaacggtgttttcccgattgccggatatgcgattcagtgcgtgttcgccatcctgtacggaatcgcgtggaacacggtgccgaacccaatatctacttggttgcgtttggtgttgcccaagggactgttcatccccttgattattgagctcatcatcaccgcggtagttgtggtgctgtggatgggcaacaatcgcgccaatggacatacggtgactcagcatgtcgagcaacacaacaagattgcgcagcgtgaccagttcaaggggcaggtattacttcttaagcagcgtgtggatgaaagcgacgcggataaggctgccgccatgaggattatcgaacagaaagtggcttcactgcctctgaatccaaatccatcgacgacattgttctatcagcaggctatgcagctggtaattaccgctaatcaatctccttctgatgtctcgctggagaccttggaagggattaaacatgcgataacgatgattcgataatcgcgaataacaatttgttcagccctaccgtggatttctaccaaatctgcagtggggctgtgtcatgcgtagacttggcaaatatggatatgaatactgtgctcgccgttgccggcgtgattgtagtggcgattgtggtaatcgccctgagtgtgtggttgggcaagtcccgcaagcgcgatttggatcgtgcgatgggcaaggttgcccccgacaataagaagacccgcgacgccaaggccgccgccgacgctcggctggccgccgaagccgaggaagccaaggctgtgactgccgcggccgccgccgagtcggccaagtcagccgaatcggtcaaagccgagtccgcgtcagccgcgcaggccgaacccgaaccggcagctgcgcccaagcccgagccccaacctgcctccaagcccactcccgccagatccgagccccccgaatcggtcggctctcgactgacccgactcaaggccaaactcgccaagtccggcaacccgttcggcaaggccctgttcgacatcctcgccaaagacaatctctccgaggccgattgggaagacgtcgaagacacactgctgcttgccgacgtcggtgcggatgcttccgcccaactggtcgatgacctgagaaccgacgcccgcatcactggtaaagccgacccagccgaagtacgcgccacgctcaaggagaagctgctcgatctggtcggtcgagatacggaccgccgactcaatgccgaaaagccgggtgccgccaagcccagcgtcatcatcatggtcggcgtcaacggcaccggcaagaccaccacggccggcaaactggctcgactgttcgtggccgaaaacaagcaggtcatgatgggcgcggccgataccttccgcgcggcggccgccgaccagttggaaacctggggcgccaaggtcggcgttcccgtcgtccgctccgacaaggacggtgccgacccggcatccgtcgccttcgaggcatccgccaaggccaaggaagcgaacgcggacgtgctcatcatcgacaccgccggccgactgcagaacaagtcgaacctgatggacgagctcggcaagattcgccgcgtcaccgaaaagaacctgccggtggacgaggtgctgctcgtgctcgacgccaccaccggccaaaacggcatggcccaggccaaggtgttcgccgaagccatcggcattaccggtgtggtgctctccaagcttgacggttccgccaagggcggcatcgtgatcagcgtgcagaaggagctcggcgtgccggtcaagctcgtcggtctgggcgaaggtccggacgatttggcacctttcgatcctgaaggtttcgtggacggcattctcgcgtagacggtcgagctctcctcagcgaggggagccctgcgtccgtccacgttgtgggcgcgggaaacgcccgcaacgcaccaaacccagccccgaatcatattcgaaacatgattcggggctttcccgtatacgttggaatcatgccggaatcagcccacccgacatcaacctaactgtcagccacgcttaacaatcgcgtaacttggcgtaacgaaaccaaaacgcggccggctttaactgacaaactgttagcccccataagggggacggcattgtagagacaaataagacgccggccgcacaaagcccccggtgccctgaacgaaagagagggaggtagacatgggagcgattgattccggtaacaccgcatggatcctgacatccgcgtccttggttttcctcatgacgcctggtgtggcgttcttctacggcggtatggttcgtgccaaggccgttttgaacatgctgatgcttgaggcggccgcgctgtcggtcaccatgattatttggactttgtggggttggtccatcgcatacgccggttccgacatcggcggtattttcggcgacccggccagcggcttcctgctcaaggattccatggtcgcgcaggacggcgtgttcaccgccaccggtctgaacggcaacaactacccggtttccgtggacgttgccttccaggtcgctttcgcgatgattaccgtcggcctgatctgcggcgccatcgccgagcgtgtgaagtacagcacctggatgatcttcgtggcgctgtgggttaccttcgactacgctcctatggcccacatggtctggaacggtggtctgctgtctgctgacggcgccatctccaaggccatcggcgcggccgcccacgatttcgcaggtggtaccgtggtgcacatcaacgccgcagtcgccgccctgattatcgtgctcatcatcggcaagcgtaagggcttcggcac

SEQ ID NO: 1013 - DNA, 3057 bp, Unknown
  R117_24m  MAG No. k141_41444
atcagacaacggggtcatctcgacggccaagtccagtatctggccgatctccacctcgcgctgcatggtaagaaacgcctcgttcaaggcatcggtgttgggaagacggctggcggaccggcgtgtgatttcaatgcaggcggtggccagaatatcgccaagcatcaggcccaagccacggcctatggcaccgctgtgtacggcctgttccaaggcacggtgtgcggaaggcttgccccggcgcagatcggattcgtcgatgatgtcgtcatgcaccagtgcggccgtctgaaacacttcaatggcacaggctaggtcgatcatggcgtcacgccgatcaggagtcacgtcgccggcaagaatatcgaaggcgtccaatgcgagcaacgcacgcagtcgtttgcctccttggctggaggaggaggcttggtccacaacctgttccatcaccggtttcagggcgtcggcaacctcatcggtggcgggagcggcagtcagttcccgcaccaactgaatgatgcgtggctcgatgatttcgcggttgttagcagttgtgcacatgcctaataacttatccacagggtttgaagaacacaagaacgttgggaatcaagggttttgaagctagaaccacaatggtcgttttttcctgcgtcatacggcgttttcagccatagtgggcacacaccccctcggcgcatgagctatccggctcggcgcgcaccacaacaccaatagattgcacaccattagtcaaggaggacatgatgaacaacaacacgccgcacaagccgcgtaagagccgacacgccaaacggcacgccgccgagcagacggagccctttggctttgacgagttggagacgagatcacaggaatttcgcaatgatcgccgacttcgaggcgcgcaacaggctaatgccgactgggtggccgaaccattggacgaatggctgtcttgtctcgatgccgggaacaccgatctaggccgagagacgatggccgcgtttgcggtgggcatgcgcgagaccttatcgattcgtgatgcgctgattctctcgttggttattgatgaaagccgttgtcccaagtcatggctcatggaattcgcggcgcgaccgcatctggcacgtacgagaacacgaatgggcgagctgctgacctgcgcattcgaggatgaaggcatgatgccggataaggagcgttgccatgccggcatcggtatgttgctcgatatcgccgaagcctcaccggtgccgtactgcatacaaccattggccgtgatcgcctacaccttatggtggctgggcgatccgcgagcaatggtgttcgccttgcgatgcctgctgcttgatgaggattgttcgctggcggcgatgatattctcagccgccgatcgaggcgtggcaccggcatggtgctcgggctgaatgaacagaaacggcggatttccgaggttttatgcgcgatgcgcggaaggaaagcgtgtggtgatcggcaacacgtcgggcaacgatgtgggaataatcgtccgtggagggtggtttactcacatagttgacgatttgcccttgccagaagtgggcccgtgtggtatatgcacttcacggcgagagatcagaaggagcagttttggccacgaaggaaacgacggcaaccaagcagacagccgagtccagcgaggagaccgagaccaagaagaaggccagctctacgaccaccgcgcgcaagacttctgccaagaagtccaagtccgcagagccctcgaaaaagaccacgcgcaagtccgccgcgaagaaaaccgcgaagaaggccaaggacgatgagctcgtcaaagacgaggacactcaggtcgatgacgagcttgatgacgatgccgaggtcaacgacgacgatttggatgttgacgacctcggcgaggatcttgacgacgttgacgaaggcgatgccgacgacgaagacctcgatgaggacgatgccgacgacgacgatgtggaagacgacgaggacgaggaagaagccaagtccaaggcacccgagcagcccaaggaaaagggtgcctacgtggtctccgacacggatgatgaggaagagaacatcatcccttcgggcaatccgaagcgtcgtgtgatcgcggccggcgcaaccgccgacccggtcaaggactacctgaagcagatcggccgtgtgagcctgctgaacgccgaacaggaagttgacctgtccgagcgcatcgaggccggcctgtacgcccagcacctgctcgacaccgaaagtgaaggcatggagttcaagcgcaagcgtgaactcaagtgggccgccgccgacggcaagaaggctaaggaccatctgctggaagccaacctgcgacttgtggtctcgctcgccaagcgttacacgggtcgtggcatgctcttccttgatttgatccaggaaggcaaccttggtctgattcgtgccgtcgagaagttcgattggaagaagggcttcaagttctccacctacgccacgtggtggattcgtcaggccatcacccgtgccatggctgatcaggcccgcaccattcgcgtgcctgtgcacatggttgaagtgattaacaagctgtcccgtgtacagcgccagatgctgcaggatctggggcgtgaacctacgccggacgagctggcccgcgagctggacatgccggttgagaaggtgcaggaagtgcagaagtacggccgcgaaccgatttccctgcacaccccgcttggcgaggatggcgattctgagttcggcgacctcattgaggataccgacgccatcgctccgtccgacgccgtggccttctccctgctgcaggaacagttcaaacaggtgctggaaaccctgtctccgcgtgaggccggcgtcatcaagatgcgctatggccttgaagacggccagccgaagacgctggacgacatcggccgtgtgtatggcgtgacccgtgaacgcatccgtcagatcgagtccaagaccatgtccaagctgcgccacccgtcccgttcgcagaccctgcgcgacttcctggatcaatga

SEQ ID NO: 1014 - DNA, 19186 bp, Unknown
  R117_24m  MAG No. k141_41843
aaaataggactgtatgcccaaagaagaatacggcgccaaggacctagctgttcttgagggcttggatgcggtgcgcaagcgtccgggcatgtacatcggcaccaccgactcgcagggtcttatgcactgcctgtgggagatcatcgataactccgtggatgaggccttggccggcttctgcaacgatatcgtggtcaccctgcacaccgacggttccgtggaagtcgcggacaatggccgaggcattccggtggataaggaaccgaaaaccggcctgtccggcgtggaggtcgtactgaccaaactgcatgccggtgccaagttcggcaactcgtcttataacgccgtcggtggcctgcacggcgtgggctcctccgtggtcaatgccctgagctcccgactggacgtcgaagtggatcgtgacggcaagacgcaccacatgaccttccaccaaggtcaccctggcgtatacacggatgccgacccggccaatccgtctcccgattccccgttcaagcgcactcgcaagaaccgacccaccgagctggaaatcatcggcaaggtatctcccaaaaccactggtacccgtattcgctactggtatgatccggagattttcaacaaaaccgccgaattctcatacgaacagctcatcgaccgcgtgcgccagaccagcttcctggtgcccggcctcaaaatcaccattgttgacgaaaacgtaccggaaacggcgactgacaccgccgaagccattgatgccgacgcagtcgaacctgcgcaagaccaggccccggctttggacgtctcgtccaacgatgccgaactcttcgacgactccaccgaggctcaagccgacagtaccgagagcctgtccgaggaggacttctcgctgacggccggcgaccaggtcgtcgatggcgcgttcggcgagcagcccgcgcacccgcgcgtcgtggaattcctgcacaccggcggcgtcaaggacttcgtcgacttcctatccaaaggcgagccgatctccgacatctggcgcatccaaggcgagggcacctataaggaggagacccaggccgtgggcgaaggcggtgaactgcacgcccaggaaatcgaacgcacctgcggcgtggacatcgccctgcgatgggtcaacggctacgacaccacaatcatgagcttcgtgaacatcgtggagacgcccggcggcggtactcacgtggacggtttcatgaacgccatcaccaagcagattcgcaaggcggtggaagacaacgcccgcaagctcaaggtgaacatgaaggactccgccatgaaggtggagcgcgacgacatccaagccggactcgtggccgtggtcaccgcacgcgtggccgaacctcagttccaaggccagaccaaggacgtgcttggcaccgcgcaggtcaagccgatcgtcacccggctcaccgacaagcaattcggcgagatgatcaccggctccaaacgcggatacaaggaacaatccggccgcgtgctggagaagatcgtcggcgaaatgcacgcacgcatccagtcgcgcaaggccaaggaggtcacgcgccgcaagaacgcgctcgaatccgcctcgatgccggccaaactctccgactgccagccgggcaatgacgacgtggccgaactgttcatcgtcgagggtgattccgcactcggtaccgccaaggccgcccgcaacgccggtttccaagcgctgctgccgattcgaggcaagattctgaacgtgcagaaggcgtcgattacgcagatgctctccaacaaggaatgcgcggccatcatccaggtggtgggcgccggctccggccagagctttgacatcgaacagtcgcgctaccacaagatcatcatgatgaccgatgccgatgtggacggcgcgcacatccgtatcctgttgctgacgctgttctaccggtacatgcggccgcttatcgaacacggctacgtgtatgccgcagtaccgccgctgcaccgcatcgcgttgaccggctcgcacaagggcgaatacatctacacgtattccgatgacgagctggccggcaaactggccgacctcgacaagaagcacatcggttacaacgacgacatccagcgatacaagggtctgggcgagatggatgccgaccagctggcggacaccaccatggacccgcgcacgcgcatgctgcgccgcatccgcatggaggacgccgcccaggcatccgagatcttcagcctgctgatgggcgacgacgtgccgccgcgcaagcagttcatcgtcgacaacgccgacgatttcgaccgctccaagatcgatacctgatcgaagacgtcgctgataatgacatcgtgcttaccgagaatttccgtaattggcgtttgaggtgagcacgttgtcatatgttttatgcgtgttgcccatgagtcattcgatagactgatgacatcgttatcacaaccggtgccgtactgtgaatgggagatggaacatggccagtctgttgcttgccgtcatctatgtggcgtttatcagtctggggttgccggattcgctactcgggtccgcatggcccaccatgagccaggatctgaacgtgccggtggcgtgggctggcggcatctccgcggtgatttccatgttcacgattgtctcggcgctgctttcggaccgaatgacattgaaattcggggcaggcaaggtcaccgccgtttcggtggcgttgactgcggcggccttggcaggtttctccgttgccccgaattactgggtgctgttggccatcgccataccgtacggccttggcgcgggtggcgtggatgcggcgctcaataactacgtagccattcactacgaaagccggcatatgagctggctgcactgcatgtggggcgtcggcgcatcggtcggcccctacatcatgggctatgcgctgtctcaaggccaaggctggccgtggggctatcggtacatcgcgatcctgcaggtgatgctgaccgtcatcctggtgctgagcctgccgctgtggaagaaacgtggcacgactgggggcggcgaatcgaccgatggtgccgcatcatctgacggcaatgccgagggatgtggtaatgctgaaggggcgtctgttgctgaacgcaaaccgctcggcgtggccggcgtgctcgccattcgcggtgccaaggaaatcctcgtgatgttcttctgctactgcgccattgaatccacggcgggtctgtgggcctccagctacatggtgatgcacagcggcatcgacaagatcaccgccgccagctgggccagcctattctatgtaggcatcaccgtggggcgtgcgctttccggctttctgaccatgcgattcaaggacccggtcatgattcgcctcggccaagtgctggtgctcgccggcatcctcaccatgttcatgccattgcctcaccaccttggcgtggtcgttgggctggtggtcatcggcttcgggtgcgcgccgatttatccgtgcgtcatccactcgacgccggcctacttcggcgaagacaaatcgcaggccgtcgtcggcgtgcagatggcctgtgcctatgtgggctcactgctcatgccgccactgttcggcatcatcgcgcaatatgtgacaatcagtctctacccgtggtatttgctggtgctcttggtgctgatggtggccatgcacgagcgtcttcgtaagttgcgcggctgatcatgcgcgcatttgggcccgccgcctactatgcttggagcccatggtgataagtgaagaagaacataaacagatgcccgagcccgtacgggaacgattggaagcgctgaaggatgcgccgggctcggtaatcgtggtcggctcgatgaacgccgattacaccgtgaccaccaaacgactgcccaagccaggcgaaaccgtcaatggtggtgccatgaaagtgttgccgggcggcaaaggcgcgaatcaggcgtctgccgctgctcgcctcggtgtcaatgtccagttgctgggcgcggtgggcgaggactccaacgcggacttcctattaggcaagctggatgaggccggcgtcgacaccgccgatatcctgcacgttgaaggccccagcggcaccacggtaatcaccgtgagcgctgagggcgagaataccatcgtctattcgccgggttccaatgccaaggcaagtgccggctatgtgcaatcacatcgcacgaccatcgccgaatgcgcggtattgggactgtgtttggagagcccgatctccaccgttatcgccgccgcacagaccgcgcatgacgctggcgtgaccgtgctgctcaacgactcgccatttatggacgagctgcctcacgaactggtggaagccacggatattctgctggtcaaccagcatgaagtggctcagttactgggtctgccggacggcgatgtggaatcactcgactggtatgaggtcgccgaacgattcaccgattacggattcgaccgggcgatagtgacgcttggtgcgtcggggtcggtggtgatcgagaacggacgttggcatcgcgtatccgccgcgcaagtcaatgcggtggacaccaccggttgcggcgactcgttcatgggaactgtgctggctggcttggccgctggccatacgctgctgcaatccgcgcaaatcggctcctatgtctccgcctatgcggccaccaagcttggtgcccaaagcgcctacggcaccgccgaagaagtcatcgcctacttcagctgacctataatcgtacatatgtacgaaaccctgagcctgttttccgaacccaccaaggtgtggttcgagcatgccttcggtcagccgaccgaggcacaggctcaggcatggccggcaatccattccggtcgtaatgtcttggtcatcgcacctaccggctccggcaaaacattggctgcgtttctctcggccattgaccggctgatgaccgtgccacgcacgcggcgtgccggtgtgcgtgtgctgtatatctcgccgttaaaggcgctcgcggccgatgtggccaagaacctagaacagcctttggagggcattgccgcacaatgcgaggcgcaagggctgcccgtgccgaagatcgcggtcgccactcgttcaggcgacaccaccgcacaggagcggcggcgcatagcctcccatccaccggatatcctcgttaccacgccagaatcgttgtatctgttgctcacttcgaaggcagggcggattctcggcactgtcgatacggtgatcgtcgatgagattcatgcagtggcgggcaccaagcgcggcgcacatctggcggtaagtctggaacggctggagaaccttgtcgcggaatcgcgcaagcgagatgcaatcgatgcggatgctgatgagggcagtgataccgccatcgatgctggcctcagtgaccttcatatgcagcgcattggtctatccgctacggtgaatccgcctgaagaggcggcgcgattcctgggcggcggacaaccggttaccatcgtgaatcccggtgggcggcctgcaatggatctgcgcatgattgagccgttggaaaacatgcgtgatttgcagtccgtgaatgccaagcagcgtgtcggtggcgtggaggctgaacggtccactccgcatatcagcggtgtcacgccggccatgcagcgacttgccgaacgcaggggcattgtgccggtggatgatagagatgtttcttccacttctggggacgattctgatgcgagtgatgcgttcgattcctccgcgttggttggagcggcgggcgaccgtacctccggttccatctggcccgtggtggaacgcagtattttggatgagattctcgcgcaccgcaccacattggtgttcgtcaattcgcgtggtgtggccgaaaagctcaccgcgcgcctcaatgatctctatgcacagacccggcatggcaccaatcccgacactgtgcgggatccgggctctccggaaggccgcgaagggttctccacacattacgatgctgtggtcggttccaccaccatgcttgtcggctcgcatgagggcgatgatgtcatcgccatggctcatcatgggtcggtctccaaagaccgtcgcaaaatgattgaggaacggctcaagcgtggtgaattgcgctgcgtggtggccacctccagtttggagctaggcattgatatgggctcggtcgacttgatgattcaagtcgatacaccgttgtcggtctcctccggattgcagcgtgtaggtcgtgccgatcatcaggtcggtggcgtctctcacgcattgttctacccgctcacccgtcagcaaatcgtcacgggggccgcaagtctggaagccatgattgccggcgatatagaaccattggccgtgccgcgcaatccgctcgatattctcgcccagcagaccgtggccgctgcctcgatgcacgatttgaacgctgatgactggtatgccacggtgctccgtgctgcgccgtttgccgaactgccacgtgacatgttcgatgccgtaatcggcatgatgtccggcgaatacaacagcgaggaattctcggccttccggccgcgactggtatggaatcgggataatggcctgatttccgcccgtcccggttcgcagaaagtggccgttacctctggcggtacgattcccgatcgagggctgtacaccgtggtcctgcctgaggcggacgccggcaaaggccagcgtcgcgtcggcgagttggatgaggagatggtctacgaatcgcgcgtgggcgatgtcattacgctcggcacctccacatggcagattcaggaaatcacccgtgatcgtgtggtcgtgactccggctccgggccgcaccgcccgtctgccgttctggcacggtgaaggcgctggccgtgactacggtttcagccgtaccatagcccgcttcacccgagaaatcgccgccggattagacgtgaagcggactggggggagttctgccgcagaaggtccagctgtcccaaccttcatcccaacaatcctcacccgtctccaccgagacggcctagaccccaacgctatcaccaacctggcccgcctactctccgagcaacaagccatcaccggcacagttcccagcgaccaaaccctcatcgtggaacggacctgcgatgaagacggcggctggcgcatcgtactgttaagccccttcggccgccgcgttcacgaaccgtggtccatggccatcagccgcagactgcgccaacgctacggtttcgatgggcaggtatatgccgccgatgacggtatcgtcattcagctaccggacggtgacggacatattcctgctcaagacctgttccttttcgacccagaagacctcaaagcagatgtagaacgtcaagtgggcgagtccgtgctattcgccgcacgattccgcgaatgcgccgcccgatcactgttcatgccgcgatccgacccgggccgtcgcgtgcccctatggcagcagcgactgcgcgccgcacagctcctgcaagccgcacgtatggtcaagaactttccgctgctgctggaaaccgcgcgcgaatgtttgcaagacgtatacgacatgcccgccctgaacgaggtgatgaccggattgcaagccggcaccattaccgtgaaggacgtggagaccgagccgccatcgccttttgccgagaacattctctttggcttcgtcggcgtggtgatgtaccagtatgaccaacctcaggccgagcgcagcgcgcaactgttgtctctcgatccgcacgtgctcgaacgcttgctcggcaccaccgacatggcacaagtgctcaacccggacgtgattcgcgaagtcgaacaggaactgggggagcgcactttctggaatgaacttgccgacgatgatgtgactggtcgcgtgacccgttacgccaaaacccatggtcctttcaccgccgatcagctcatggccgatctgcacctcgatgctacggatgccgtgcatactttggatgtactggctgccaaaggcgagttgctgcaaggccattttgtagatgatgacaagcaaggccaacagtggctccataaggacgtattccgccgcattcggtctcgctcattggccaaggcgcgtaaagcagtcaagccagtagaaccagaggcgttccagatgtttcttatcgaccgacaaggtatcgggccggtcggcggcgaacgatatgaaggtgccgacgggctcatgcgcgttatcgagcagctggagggcatagcactgcccactgcactctgggagtcggcggtattccccgcacgagtacgagactaccaacctgcattgctggatgagttgctgaccagcggcgatgtggtctgggtcggctcaaaaaccgggggaaccagtgcgatggaccccggtgaggttgctttctatccggcggattcaatattgctcagcggtgtggaacatggtacgacatcgaacgcttcagacgccaccatgccggaagcgattctgaccgcactggactcagggggagcgttccatgcccgtcaactggtggatgccgccaaacgtgtgtggaatgaggccgcggagccggacatcaatccaaacaccggtgaaatcattccgcaagagtggagcgaacagcagttcaaggatgccttgtggagcttggtctggcaaggtaaggtcaccaattccagcttcgcgccggtgcgtgcattaaccgcaggcgcagcaagcccgcgtaaatccactacatcacgtcgtcgtgggcgtgtcgctccgattcaccgagccactacggatatgacgttaggaggtttgtggtctgccgtaatcgggcaagctgaagccgaagacactgatcagaccgagcaggcgctcgcactggtcgagacgttgctggacaggtatggcgtcatcgcgcagccggtgatcgacaaggaaaatatcccgggtggctactcagcgttgtatccgatattgcagcgcatggaggagcatggtcgactggtacgaggcatgttcgtccgtggtttcggcgcggcccaatttgccgagcgcgacaccgtggatgcgttgcgtcatccgtcagagcatcgcggccagtccgtggtggcattgagtgtgctcgaccccgcaaatctcagtggctccgccatcgcgtggccggacgcgcctgccggtgcgggtaaaccggcacgccgtatcggagccacggtcgtgctcaatgcgcaaggtgcgctactatacgcggctgccaaagccaagcacttgacggcgttcgatcaatcggtcggccatgaacccgccgccaatgattccgacgaacaaatgcgcaaggccgccacagaactggcctacgctctcaaacgcaatggcaccggttccgtgacattcagcgacatcaatggcgaacccctcaacgcccgtcaccccttcgcccgcatcctccaccagtccggcttcacccccgttccccgaggcatgcggctgtactgattgagcccagctatcgaatgcggtagttggagccgcgttgggtcatgatgaggccggcgtgggtgagcttcttatccagtgtgtagagggcgttcctgaggagcccttgttgctcgaagaatgggccaccgacgagcttgaccaattcgctggtgttgacaaactggccatcagccttgaccagtgcttcaaacaaactgtattccagacgggacagtgaaattgcggtgtgtgtggatgcgtagtaggctttgcgattcgtggtgtccaacgtgagattgccacgaatgatcatggtgggggagtcggtggcaagcgagccgacgtatgagagcagttcgccatcggagaatggtttgctcagtacggcatccgggtgtcgtacattagctcgtgcgctagcggcagcattgtccgtgcactgttcggcttcggcatctgagttgtttgcgtgtgaatccgcgctgaaggagctgtagggcgtctcttcgatcggggcgtactcgtcaggcagcgctcgccagcggctgccttcgccgatggttttgctgagtggcgtcgaagtcagcagcagaatcttgacggaggcacgggcattgtgaagggattcgatgagttgctcggtggagatgccgagcagggattcatcgagaatcactgcgtcaaatagctccttggtgaccgcggcgagcgcgatactgccggtgcttgccaaggacacctcatgacgacaggcaagcagcgcaccacgaatggcgcgggccaacggttcattggatacggcaaccagtagtctcatcgccacctccttgatgcttagtgtaggtcgggtttagggtctcttctctatgtgtttggctcactatcgttcgctcctcgcctacaaacaccccactgggggtgtttgctttacggctcggcccatcagagggagcttaattgaggttacgcaatgaaggcgatgggggaggcgaggtccactccggagccgtctcggcgcatatcgggcttgggaagctcgaccggggagcctgcggatgtggaggcatgcaacgggtagagaccaacccaggcaagaatcagcgtgttctggcccttgaggaagcgctgggagcgtacgccaccggtagcgcggcccttggtggggtacatttccagcggggtgaccttggcggcgccgttttcggtgccgggtagtgcatcggagtcgccggccacggtgagcaccaccgcgccggagccggaagtcaaaccgttctcgccctcctcataggtccatgccaccttgccggcgggaaccacgttgaatgccgccacacgggcgccctcggccagcttgatgccggccataccgcccgcggtgcgaccctgcgggcgcacgttcttcgcctcaaaggtcagtagcgaggaatcggaggagatgaacaccagacggtcgtcatcctcggccacggcggcgaataccacttcgtcgccatctttcagatcaatgacgggccaggaatccatggtggtgggtgcctcacggttccaacgcttgatgacaccgttacgggtaccgatagccagcgacggcaacggcttggcctcggcggcaccatcctcgctctcgtcctcggcactggccttgccggacgtcggctgctccatggcgatcgccgtaatcacacgctcgccacgaatcggatcggtggattcggtcatgccgatcagttcgtcggcctgaactcctcccttcagcgacaatgtggcggcagcgggcaaggcaggcaaatcaaccacatgcgcgagcaccaggcggccggccgacgtgaccagcccgtacgtggcgcgcgtggaggtctcgaagattgtggtgatctgatcgtctcgcagacgttcatcggatgtggaccgtacattgaacacgtccatcgcgcttggcgtggtacgggcaatcaaaccggtggcgctcatcatcaccacgcacggctcgtcctcgatcttcaaggctccggtcagcgcggaccgctcgccggtcttcttggcggcggctgcggctgcggccacatcggcttcggcggaggaaatcgtggtggcggccttcaccgcttcgagcgcggacttggacacacccgaagccccggcgccctgcgccacgaccggcgtcagagtgccatccgggtcggcgtccagcagcacggtgcgacgcggcgagccccacttggcgaccgcctcgtccatctcgtcggtgaccacctggtcgagcgcttcggcggaggccagaatgcgggtcagctcctcgatgcgcttcttcaggtcatcgcgttcggcctcaagttcgatgcggttcatcttggtcagacggcgcagacgcaggtcgaggatgtactgggcctggacctcgtccaggtcgaacacaaccatcaaacggcttttcgcagcatccgcatcatctgaggtgcggattacctggatcacctcgtcgatgtccagcatggccagcagcaggccctcgaccaggtgcaggcgctccaacgccttcttcttgcgatattcgctgcggcggcggatcaccacacggcggtggtcaacccacacctgaagcatctccttcaggcccatcgtgtgcgggcggccctccaccagcgccacgttgttcatggcaaaattgtcctgcaacggcgtgtgcttgaacagctgcaccagcaccgcatgcgggtcgaaaccggtcttgatctcgatgacgatacgcgtgccgttatgacgatcggtcagatcgaacgcgccggaaatcccctccagcttgcggttcttcacgccgtcggaaatacgctcgatcaccttctccgggcccaccatgtacggcagctcggtgaccacgatggcctgcttgcgggccgtgacatgctcgatatgcgtggcggcgcgcgtggtgagcgtaccacggccgttggcataggcctcacggatgccgtcgcggccgatgatcgtgccgccggtgggccagtcggggccgggcacgtaacgcatcagttgttccagggtggcgtccgaatgcgccatgaggaacttggcggcgttcaccacctcgcccagattgtgggtggccaggttcgtggccatgcccacggcgatgcccgagccgccgttgaccagcagatttgggatggcggccggcagcacggtcggttccttgagcttgttgtcatagttcggcgtgaagtcgacggtgtcctcatcgatatccgcgttcatgccgagggccgccgggccaagcctggcctcggtgtagcgggaggccgcagggccgtcatccagcgagccgaagttgccgtggccgtctaccagcggcagacgcatcgcgaacggctgtgccaaacgcaccatggcctcgtagatcgcggaatcgccgtgcggatggagcttgcccatcacctcgcccaccacgcgggcggacttcatatacgggcggtcgggagtcaggttcatctcgcccatctggtagacgatacggcgctgcaccggcttcaagccatcgcgcgcatcgggcagtgcgcgtgcgtaaatcaccgaatacgcatactcgaggaaggatttgctcatctcctcgttcagcggcgtctcgacgatatgctccttgaccgtgcgcggatcgtaggtttgcgcggacggtttgcggtgtgatgccatgaaactccctttcgaacgcccccatattagcgggagggcgcgaaacagtgcgcagagaacggttctcgataacaactgtgcgctggtttcggtgcgccaatcgcacatgtttgccgataaaatggcgtgattccagcgtttcagccgatgtgcgtttgtttgattatgtgcgttggggcgcacagttgttattgagaaccgttctctgcgcactgagccaaggggaggggtgctacttgaatgggcaactatgagtgttgagacgccggatatggacgagttgctgcggctggtgcccactgtgggctatggggatgacgccccggccgatcggcgtgggggagcactgcacctgtccgccgtgctgcccgccttgtccgccgcgattgggcatccgactcccaccaaggtccacgccgatcccaaggcctgccagcgcgcgttgggactgcccgacgccgaatcggccatcgtggtgctcgtggacggcctgggcttctggaacctcgccatgcgcctcggccacgcgccctatctgcgttcgctgatgaacgaacgcgccaatcagcgtcccatcgccacctgcgctccaagcaccactgtggcggccatggccgcattcggtaccggaacctgcccgggactgaccgcaatggcgggctatacgcagctcgaacccgccagccataagctcatccaactcatccagttcaaagacgcgctggcacccaaaccagccaatccgcacattcctgtgccacccatggtcgatccgctcgaccagcagcgcgaggagacggtgttcgagaaacttgcggctcaagaggtgcgcgtcacaagctcggggttgcccaagttctccaaatcgccattgaccgaagccgcattgcgaggcaccgactatcaaggcaacgtcaccccacgcgatcgtgtgctggctgcctcacgtgcctcccgtacccccggcctgacctacctgtacatccgtgacgccgacaaagtcggccacaattacgggtgggattccgaacactgggtggccgcattcgaacatatcgacgcccagctcgcgctcctgaaacgcagcgcacccaaaggcacgctgatcgtcatcgtagccgaccacggcatggtgcaaaccgacatgggccagcggattgacatcgccgttgaaccgcagctcacccgaggcgtgtcactggtcgggggagagccgcgctcgctgatgctgtatgccgagccggatgaacgacctgaggatatagcttgccggtggcgcgattacctgcaagaccgagccttggtgcggaccagggatgaggccatcgcggacggattgtttggaccggtctgcgagcgagtccggccgatgctcggcgatgtggtcgtgcaggcagcgggagccgtgaccctcgtcgattcgcgtacgcaaggagacaaagccacccacctgccgagcgtgcatggctcccaaacggcattggaaatggatattccctgcctgatcgatatggcctgattcggaaattcagtctccgaacagaatctcgtcccagcttggtacggccgaacgtcctgatttacgcttggccggtttggctggtgcctcgtgtttggtggcggcggattcggccgcccgctcctgctcggtggctaccagctgtgcattggggccacgccgtacggtctcgtccgaaatattgtcagaaccctgctctggtgccgtggcaggcgattgctgcaatcctgcggcagatgacgaaacaggtccggcggtctgcgaagagaccgggctgggggccgtagcgtcatgagcctggttcgtggccggtgagatggacgtggataggtccaccgggggcatggaacctgtggaagtgacggagggccggatcgcggcaggccgtgcggccggaatcgaaggcgtaggcgccgcccaagcagacacggcgcgctcgatacgcgcggaacgtacggagtcgccgggcagttcaggaatcgtcggcttgagtttggaatccgtggctgattccggattctgttcgccgagcagttttcgagcggcattgttcaggctcatcacggaattgtcgtgcatattccacgtccattcggcatggatctcacggcccgcggaagtgaatatcgccacgatgcgccaaggctcaagtccgcgccgggtggatttccaggtcactgattccatgccgattccagcagaggccagcgtgcgttccaccagttcgctgatggtgcgcaccctgctgtctttgggtgccgccacggcaaggaattgttcgatggcgtactgtttctcggtctccacggccatggagaaacgacgtaccagcgtttcgctcagatgatatttctccgcgacacgggccggatcggcaccggcgcgaatcagcgactgtatctgggaaatcggcaaagtggactgctgatgcggctggggggcctgtcgcatctcgcttctgacctgcttggcctcaagaatcgcccgttcgagcgtgtcgtccacgctcacggccatttccctgccgccaatggagaatacgaggtcccccgtcttgctcacgcgtacgaaacgggctttttcaagccgatcatctggcatattcgcaccactttccgtcgcaaagacattacttcttttaagtatgccccacgtgtcgaactttacgagtatttcaaatcgtgtatcctatgggcgagtacggcgctgaccgtgctatatatatcgacttacgaaccaaagacgacgaaaggaccatgatggctcaggattatgattccccccgcaataaggatgaggacgaggaatcgctgcaggcgctggggaagtcctcgcagaacgcctcgagcgacatcgacgacgatgagaacgccatcgccgaagactacgaactgccgggcgccgatttgagcaacgaggattcctcggtgaccgtcatccccatgcagggtgacgagttcatctgctcgcagtgcttcctggtcaagcatcgtagccagctcgcctacacggacgaggatggccagccggtgtgtgaggagtgcgccgcctgatggcgttcgacgagacctacaacgagcccgaatccaccgaggtcctggtcaagagcctcgaccccgaacatccggcccagctgcactatgcccacgcgggcgatgctggtgccgacctcatcaccaccgtcgatgtgacgctgaagccttttgaacgggtactggtgcccaccggcgtggccatcgccctacctgcgggctacgtggcgttggtgcatccgcgttccgggctggccgccaagcagggcgtcaccgtgctcaacgcgcctggcaccgttgatgccggctaccgtggcgagatcaaggtgccgctgatcaacctcgatccggaacgcaccgccgtcttccatccgggcgatcgcatcgctcaattggtgattcagcggtatgttgaggcccggttcatcccggctgaaaccctgcccggatccgatcgcgccgaacgtgggttcggttcgacgggagtggcgtcctgaccggattgggccggttgaatgaccaaggtgatgacggcaacgacggttgcggaaccaatgatggcgaacaggtgcatgcataaggctccggttcgcggttacaatgaacttcatgacgagggaggtgactggcatggcagagattgatggcgagcagtacgccgcccgtaagttgggttgtgagatcagtgccgatccgctcaatccgctggatccaatcaagaaagtgtgcaagtcccaccatcccggtgaggatttgtccatcctcgaccgcgcgtaccggcgcgccgtcatccagcattgcacgcaacggcgcaagtcgggcgaaccatacatcatccatccgttggccgtttcccagattctcgcggatctgggcatggggccgattgtggtggcggccggtctgctgcatgatacggtggaggacaccgactacacgttggatcaatgccgtgccgagttcggcgacaccgtggccggtctggtcgatggcgtcaccaagctcagccagcttgaagtgggcgactccgcccaagccgaaaccattcgcaaacttgtggtggccatgagccgcgacgtgcgcaccttggtggtcaagctcgccgaccgtgtacacaacgcccgcacctggcgctatgtgaagaccacgtccgcccagaagaaggcgcgtgaaaccctcgacgtgtacgcgcctttggccaaccgactcggtatgaacgccatcaagacggagctcgaggaactgagcttcaaggtgctctacccgaagatctacaacgagatcgtggtgctggtggctcgccgagccggccagcgcgatgtgtacctgaagcagattctggcggagatcaacgaggatctcgacgagcagaacatcaaggcatacgtcaccggacgcccgaaggactacttctcgatttatcagaagatgatcgtgcgcggccatgatttcgcgaacatctacgatttggtcggtgtgcgcatcatcgtcgacaccattcaggattgctatgcggcgcttggtgccgtgcatgcgcggtggaacccggttcccggccggttcaaggactacatcgccatgccgaagctcaacatgtaccagtcgctgcacaccacggtggtgggccccggtggcaagccggtggaaatccagattcgcacctgggacatgcaccgccgcgccgagttcggcatcgccgcgcactggaaatacaaggaaaacggccaggccggccgcgccctgagctcgccggacaagtccgaccgcaggcgtgacgagaagaaccaggagctttccgaagccgacaatctcaaatggattcagcagcttgccgattggaccagcgaaacccccgactccaacgagtttctgggttcgctcaaggaggatctcggctcgtccgaagtctacgtgttcacgccgaaaggcaagatcgtatccctgcccgctcatgccacgcccgtcgacttcgcgtatgccgtgcacaccgaagtgggtcatcgcacgatgggcgcacgtgtcaacggacgtttggtgccgcttgacaccacgctcgacaacggcgacaccgtggagatcctgacttccaagtccgataccgccggtccttcgcgcgactggctgagcttcgtcaagagcccgaaggcacgaaacaagatccgccagtggttctcgaaggaacgtcgtaccgaggctattgaggaaggccgcgacgaactgacccgcgctatgcgcaaacgtaacttgccggtcaatgcgctgctgaccaccgaggcattgatcggtgtggccgacgacctcaatttcccgaacgccgacgctgtgttcgccgccatcggtgatgggcagatctccacgcagaacgtcatctcgcatctggtcaaggatgccggggccgacgaggtcgatgaggaggtcgagcaggaggctctgccgctcaagcccgtggagcgcaagacttccagcagctccaccggggtatccgtcaagggcgtgggcgatgtgtggatcaagctggcccgttgctgcatgccggtgcccggtgacaatatcatcggcttcatcacccgtaatcagggcgtatccgtgcaccgcaccgactgccagaacatgatcgatctgaaaaacaagcagcctgagcgtgtggtcgaagtcgaatggaccagcaccaagggcctgttcatggtcaagattcaggtcgaggcgctggatcgacgaaacctgctttcggacgtgacacgtgtgctttccgaccatggcgtgaacatcatttccggtacgatcgccaccggttccgatcgcgtggccaccagccagttcagcttcgaaatggccgatccgcagcatctcaactcgttgctggcagccgtgcgcaagattgatggcgtgttcgacgtgtaccgcatcaccggtgccaaggaatccgccgaacctcgactgcgcaagatgaagtagg

SEQ ID NO: 1015 - DNA, 2604 bp, Unknown
  R117_24m  MAG No. k141_42634
atagaaacggcttcataccaacgtcattccgccgtttttaagcgttgtctacttggacatcagccccttgaaacggaagtagatgtcccgaaaactcaaaatccgcccctcgaagtgcagaaacactcaaattagcggtcgttcgatatatcgaccgtcagaataacgcgtcctgggcgaagtcatcatcgggattgacaccgaattcgtccggctcggcgggtttgaacgcgcttgcaccttcatcggccaactggtcggaagccgaggccgaggcttcgcgcaggtcgccgtcgagcaccacggcatcgggcgagacgaggaacatgcgttcgttgacgccagtcaaatacagtccgcccagcgattcgacgcgggacaacgccacatatcccatgcccggcgcgaaggtgcgcttcagatccatgaccgcacgatcaagcgtcatgccttgcgacttgtggatggtgatgccccacgcgcaacgcaacggcacctgcgagacggaggcgagcacggtgtcgccgtccatcatttcccatgtggcctgtttcatggtgacgatgttgccgttttcgaattccacgatcggccagccgcccttgttctcctgcgcgaagccgcgcacggtgccgagcgagccgttgacgtactggcgatcggtgtcgttgcgcagggccatgacagccgcgccttccttgagtaccagtcgctcgggggccaacatgttcttcttgagtcggtcgaccaggttggcagggcctgctgtctcggcgtggaactcgtgcggctcaagcatgatctggttcaggcgcatgtcgttgagattgtcggcctgccggttcaccgggaataggtggacggcgacctggccgggctcgggcagtttgcccagacgggtgacgagcacgtcacggtcggactgggtcacgtcgccttcgcgaatgtcggtgagcacggtcagcagttcgccggtgtcctgacggtgctgttcggtcagatagcagatcaccgggttgagttcgggccataccagcgattcggtgatgaagccttcggggttcaagccggcacgggcataccgttcgcgactggcgatgaattcgggggtgggggcgatgaggtcgcggttgcgcccggacaccgaaaccggcggcagttggaagaagtcgccggacagcacgacctggatgcctccgaacgggcgtgggtcgcgacgcacttcgcggcagacttggtcgaccatgtcgaacagccatgcgtgcagcatggagacctcgtcgatgacgaggatgtccgtagcctgaatcttgcgtttgcgccgggatttgatgagtttgagcagactcgggctcagggcggtggccacgccgacgccgctccacgaatggatggtttggccgttgatatgcgtggaggcgatgcctgtggacgcggtgactgccacgctggcgccgtcggcccgagcctggcggatgaactcgttcaagacataggtcttaccggcaccgggcgcaccggtcagaaacacgttcgcgccggcgttcagaatggctagggcttcggtttggcgcatatcaacctctctagactcccctcagggaggggagccaagtacggcggactacttattgagaatgctggtggccacgatgtcggcggcgatggccttggaggcggcatcatccgggccggggacgggggccatgaaggccttacggtagtagcgcaactcgtccaaggactcgatgatgtcggcgagggcacggtggccgccgttcttcggcggacggttctcgtagacggccgggtaccagcggcgggcgagctccttcaaggtgctcacgtccacgctgcggtaatgcaggtggctcatgaggcccggcatgtagtggtcgaggaacttcttgtcggagccgatggtgttgccggccagcagcgggcgcacgccttccggcgtgaagcgcagcacgtattcggtgaccttctgctcggcctcggccaggctcaggccattctcccactcgttgatcaggccggaacgggtgtgcatctggcgcacgaaatcgttcatgtggttcacagccttctcggacggcttgatgacgtaatccacgccctcgtccagcacattcaggtcaaagtcggtgggaaccacagacacctcgacgagttcgtcgccgccgaagatgtcaagtccggtcatctcgcaatcgatccaaatcaggcgcgagtccttcgcgctgtacgtttccgcgtcatggctgtcgaccatggtgtgcctcttttcttcgctggtcatcgcttatgcagaacagttcagactataccccagcgcatacaagctatctcgagccacatacgcgaaaagggcctgcataagcagacccttttcacaaggaatcaacccctaactagcgcaagctagcgggcatcaaccgatcagttgttgtggaagccggagtagttcggggcttcggcggtcatcacgatatcgtgcgggtgcgattcgcgcagaccggcatcggtgatgcggatgaacttgccacgctccggcatctcggcgatgttgtgggcgccgatgtagaacatggactggtgcag

SEQ ID NO: 1016 - DNA, 3566 bp, Unknown
  R117_24m  MAG No. k141_44680
ccacgacggcttcgatgttattgccatccgggtccagcacgaatgcggagtaatagccgggatggtacgggcgcggaccgggagcgccgttgtctcggccgccggcggcgagcgcggctacatggaacgcctgcacggtttgctggctgtcagccaggaacgcgatgtgtgtgaccggcgtgaccggcgaagcctccgcctccggcccgtcaatcggtgacacgtagaaatcggagtgcagggttccatcatccacgccgaatccgagcgtgggctcatgatgcgccttgacgatatagccgagcggtgcgagcgcctgtttgtagaatgtgatgccacggtcgatgtctttcacgtgcaacgtcagatggtccagcatggtcttggtcgtcctcccctggttcttgtattcgattgctgcttgcagtgtaagcccgaacgtttccccacagggccgcgcatggctatgatgagagcaatcgcacgtcgagttcgagacaatattcaaaacgaatccaaggcaatagggggaatgacgatgaccaaggcactgattgtggtggatgtgcagccgacgttctgtgaaggcggcgaactgggagtcgaaggcggcaacgcggtcgccgagcggatcgccgattatgtgaacgcgcatcgcagtgagtacgcgtatatcgcaaccacgcaggactggcatatcgagccgggcgcgcactggtcggcggaaccggatttcgtggacacgtggccgaagcatggtgcggccggcacgccgaacgccgaattgcatccggcgatcaaggcgctgattatccatcatcatttcaagaagggccagtattcggcggcatattccggttttgagggcatcgaggacaataccgaccgtatccagacccgtgaggaggttgcggccgagcaatccgccggcaagacgctggccaatgcgctgaaggccgccggcgtgagtcgcgtggatgtggtgggcatcgccgaatcgcattgcgtcaaggacaccgcgctcgatgccaggaagttcggtttcgaggtcaccgtgttcgaggacctgaccgtaccggtcagcgaggagctcggtgtcgcggcccgcaaacagatgacggcggccggcatcacattggccgagtcccgctgatcaggccggatatacccagagcgagcgcacgaacacttccgtatattcaaggccgacactgccgcatagtcgcctagtcgatatgtgaagaaggcttttatggttacgatgctgctgacttcgatattccgcaacgcctcgtccgccgtgcatgaagtcgaaccgcatccgcaaggcaagcgggtcgcgttcatcccgacggcgagcgccgtggaaccgtgggggccggttcactcggcgttgagcaaacacgcgctgcaacgcctcggtttcgaggtggagcaactggatgtggaagatgtgccgagcgggtccgccgaacgcgtcacgcgtagcatcgccgaggccgactgcatctatgtgggcggcggcaacacgttctttctcctgcaggagttgcgccgcaccggtgccgaccgggccatcatcgagcaggtgcgcgccggcacgccgtacatcggcgagtccgcgggctcggtcatcacggcacctgacatcggctatatcaagctcatggaccgcacggacaaagcccccgatctcaccgattacgcaggattgggcttggctgatttccgcgtggtcccccaccatcatgcaacggccatgggccacgccgcacaacgcattctcgaccggtatggtgccgatctcagtctcaagcccctcaccaaccggcaggccctgcttgtcaaggatggcaaaacccggctgctgcgatgatgcgggtcgtcggcccgtcgcccattcggcatcgccgtggtgtgtccggcctgacatgcctatcgagcggcatcaatcacacagcaatgtggctgggaacctcgccgaacgtcaacacctgcatacatcagcacggcaaaatctgccgaaatcgtccggcgcacgagatgccagccggccccatccgtcacctcagtgccgtaccgggccaggcatggccttgagcaacgggatgaatccggcgcacagtaccagggccacgacggcgagtatctgccagtgggcggagccgagccagccgccccacgtgccgacggcaccgccgatcgcatacgcgaacctggcacggccgctgaatttggccaggtcaccaccgctcagcagcagttgtcgcgatacgatcacgccatgcgccagcaggccatagccgaggttgttgatgagccatccgacgcacaccgcggcaaactcgggaaccagtacggcggcaagggaaatcgccgtggcgattgccccgatggcggacacggcgcacatgccgagttttgcggagagccgcatgtagacaaacgatccgacgatgctgcccacgccgccgaatgcgtagaccacggtcagcatatcgctgccgtaccgggagccgatgcccagcaacgcatagcttgcccacagcgacggaatcagcgcaagcagcagcgatgcgatcagcagtctgacccgggtcgagcgggtgaccggagtgcgctgcggcgcgtgtgacgtgtcggccgccgtggattcgtcggcggagccgtcgccgtcatcgccgcccgcaccatcgttgccgaatcccggcatgaactcgcgggtgcggaatcgcgtcagcgcgcaggcaaatgacagtgccgacgaggtgagcagcatggccatgatggaggcgttggccaaggccgatccggcaacctggcccagcaacgtaccggccacgctggcaatcacggcgacatagccgctgtacttgacgagcatgtcatcgtcgtcgccggccgcatccacctcgaacacttcggaggccacgtcgatgacctgcccggtcatcagcagcaggcatgacagggccagcagcagccacttccaatacgtccaaccgttgggcaccagcgcgaccgccaggcacagtacgcctttcacgccctccgtggtcgcaagcgaacggaacgagccgaaccgctgcacgatccatgcggataccggagaagcgaagtcgatgaccagattgaacgtcttgcggaacgcgatcacccatgccggcagtccgacgatcagaatcgaaggaatcaccgacccctcgaaaatcgcgttggacagcatcgaaaacgtcatacccaccaacgcccatcgcaacgccctgctcaataccgataatcctcgcataccttagttccttgtccttgccagtgtaacggaattatgacttctcaatcgtccccccgctgtctaaatgaaagtgcaacaccctttcactggttatctggacaatctccaatctaaggggtgttgcactttcatttagacagcgccccccatatccgcatgtcactgctgccatcataatgagccagtagacgcctttaagcgttctgacagccatggaatcgaaaatcgctatgcacatcatagaacagcactgccaaggcaagaggtctgacca

SEQ ID NO: 1017 - DNA, 16042 bp, Unknown
  R117_24m  MAG No. k141_45330
ctggatcgacatgtacggcaccagcgcaagctcctggtggatgatcacgatgcccttctcctcggaatcgcgaatcgtcctgaacttgcacgtctcgccgttgtacacgatgtcgccctcgtacgtgccgtacgggtacacacccgacaacacgttcatcaaagtcgacttgcccgcaccgttctcaccgcagatcgagaacatctggcccctcttgaccatgatattcacatcgttcaacgcggtgaccgggccgaaacgcttcacgatatgacgcatctccaaaatcacgtcaccgttcatagccacagctacctcctccgatagtaatgcccctgtgcatgatgaaggcaccgtaccgcaaccacgcagcgcagcgccccttgtataattagtctgttagcgccttcgcaatagacagaccaattcgatcttttgccacgcacggaatgagcgtagcttgaagcgcatggtaaatatcaggcttccccggccatactgtgccaatcacttgattgttggcatcaagctgatggaaccaactgccacgttgatggtcaatcatatattcatcaacgtattgccaaaaacgcgcataccactcggcatatatcgatttcccggtaatccggtacagcaccgaagcggtatcaatgccttcagccagagtccagtgcatacgatcatgcactaccggtcggccctcccagtcaacggtgtacactaagccaatttgaccatctacgttccacccggtttcgaccgctacggcaaacagattttccgccgcctcaatatatcgatcacgagtcgactcgtcgatttccccatgatcataggagcttacggcccattgtgtaatcagtcttccccattccaagctatgacctggagtggtcccatatggcttaaattgatcatcttttttctcagcattgtattcgtatacaggtttccactcttcagtaaagtgttcggggatgtgccagttacagtctgatgcaaaaccgactgttcgctgaatcattcggccagcacgcaacctatatttaggctcttccaaagcatcgcttgctgcgaggaaagcctccaccgagtgcatggaggaattaatgccacgatactgctcgcaatgagtaaaagaggtatcccaagtatctctcggcatgccatactgttcatcccagaaatagcgatcatatactttcaacgccttatctagcaatgctctggattccggaatatgcacaagacttgctgaagccgcacccaaaatcacaaaggcatgggcataacatcctttattgggatccggggttccttcttttccaacgcgggtataccagcccccgtgttcgcggtcaagtaacagcccagtagtgaatccgtccaacgcctgcttaattaacggcaaagcctcatcttcaggcacatatccggctaaaagcccaagcgtgtaggcatgagcatatcgtcccgactcatatgcatataggccttccgacggaaccggattgccttcatcatcgagatatgaggcaccaccgcccggccacgcgaagcgcttgccgaaatccactaattcttgcgcttcccgattgagcaaatctcgattatctttggtatcaatttgatattgggactcagtaattggtgtcataattcagctcttccctattcattgccattcggtgtcatttcaagccggcatcttctgctgagatgtacccggaatcaacaagcaatgacttgacattatccttgtcgacagcttcaggaacagccatgatcgaaggcacgtctttgttgccattaggatatgtttcttgagtcttcggagttttacctgcaacaacgtcgtcaataatgccggccgtaatatcggcaagcttacggaagtccttgtatacactcatggtctggcgcccttgcacgatggcctgcacgttggccttctcagcatcctgaccggtgataatcgggtagtaatcccaaccagcagattccacggcattgactgtgcccaaagccagtgcatcattgggagccagcaccgcgtccaaccgttcgccatcaccatagaatgagttgatacgattctccatttcagcctgggctttttgtcgatcccagttttggataccaatggtttgccaatcgtcaactgatttcggaactttgcccgaccgggattgcaacactccggactcaaaatactgtcccagtttgctccatgagccttcaaaatagtattttgcattgttgtcgtcaggagaacccgacatcaattccacattgaaggggcctttcttgccctggtcaaggccgagtttcttaactatatactctccttgcatttcaccaatttttgtattgtcgaaacttgtgtaataatcaaccgcatctgtattcataatcatgcgatcatatgcaatgactgtcgccccattgtcctttgctgtttctgccgcagcaccggttgccacaccatcaagagaagcgataacaacaatgtcggccccttggttggccatgttctggatttgtgacgtctgttggtccaccttgccatcagcatactgtagaacgactttgtagccgcgcttttcaagtatttgcttaagattgctgccgtccttcttccaccgttccagctgctgttccggcattgaaatcccaacggatatcgaggacggatctttaccgctcgcctcagacgaggtcgccgaaccaccacgacttgatccacaacccccagcgccaatcagcattgcaatgctagctcccatagctacggttttcatccaagtcttcatcattgttcctttcacctttgaagagacaagtcagatgttcatttatctgacgaaaactattaaatcattgatatatcaatacatcaaatcgacattagcaatgcgtcgcttttgcaatacgcaatcgaacatcacatcatcccacatccgaacattcctgaaacatcaacgtttgcaaggtatcttcgtctcacgttcaagaaatggcttaaccgctgccttctctgcaacacaacgcacggcctgccatcagtattggatatatcggtatatcatatacaacagcactatgttcttatttgttactttagtgttatttttaatgggcgtgtcgcatcattacatagacctcatcaatctgctgcccatgacaatcagctcacttcataatcctattgattctcagcggcaaagcactcccataacgtaagggctcaatggttgaattcaaagtacgtacgtcccgcagaaggctcttcactattttcgagaattgccgcaaggaggaatatcatgcctacggaacgatttgacgacatgttcaatgaggccatgaaagacccagaaatggcggaactcatccacgaatgcataacgcagatgacagcaggcattcaacctgtcgaggcctgaactggtgccagaatgagtgcggatagggcatctcagcaaagtgaagtagctaagatgactgttctcgaatagtcccatgaaggcagcgccgacgcacccgtattcccttccattagcgcaacattcccgggaatgttgcgctaatgcgcttgggttcctctccgccagcacaacatccccgggaaagtggcgcgcaaagagtgtcaggcgcgtcgctcgatgagtgcgcggccggatgcgaggcggtcgagcacaccggttttggcgatggccagcatcagataccaggccatcacgccgctgataagcacgccgccggtgacctcggaaatcatgtgcacgatgccacgcgggctgacgaatgacacacccacgtagcgaaacagcatcagatatgtgccgtattccaaggcgaccaacgcaccggatgcaatggaaatcggcagattgaacatgcggtaacgggtcaaagcgaacggaatctcagcgaaaacaccctgcagcagcgccgagataatcacgaagcccaaatcgaactggctaccaatcaccgtttcgaccagcgtgccgataaggttcacgtacagcgccgctccgggtttgcgcagaatcagcaccgccagcgtaccggagaaataccagacggcgtgcacgatgctggcgaaaccgggcagaatcgcaccaaacaccgaagagatcggcatgtacgcgaagttgaatccccagaagatcacgccgcaggccgcgcccagtgtggcaccgaccgcgatgtccaacggctgccatttcagcgacgatacggcgaccgaacgtttcggaagagtatgaatggtggttgcaggcatggtgatctcctagccttaaaggccgcacacagtaatcgaatcacgggcgttccttgacctgtgcggctcgggcgggaacgccacaccacagtgtagccgctcggttcacggctggaagtacccttggaggttatgaagcttaccgatatttcccccgcaatcgcattgaccccgctcgacggccgttaccacaaggccaccgccccgctcgtcgaatacatgagcgaacctgccctgaaccgcgaacgcatgcgtgtcgaagtcgaatggatgattcttctggccaacggctttgagggcaacggcaaccagccaatcgttgacggcgtcaagccgttcactgccgaagagcaggccttcctgcgcgccattcccgaggacttcggcgccgaaggcatcaagcagcacgccgctcatgaggccatcacccaccacgatgtgaaggccgtggagtactacatcgatgatcagatcgacaaggctccggccgagctggccaacatcaacgacgagctgaagaccctcgtgcacttcgcctgcacgtccgaagacattaacaacctctccatcgcccgttgcgtcaagaacgcgatggaaaacgtgtggaccccggagttcaagcgcatcatcgaccacctcgccggcaaggccgaggaattcaaggatatgccgctgctctccctcacccacggccagccggccacgccgaccacgctcggcaaggagctcgccgtctacgtctaccgtctgaaccgtcaactcaagcacatcgaaaaccaggagtacttgggcaagatcaacggcgcgaccggcacgttcggcgcccacctggccgcatgcccggatgtcgactgggtcgccgtctcccgcgaattcgtcaccaaccgcatgggcctgacctggaacccgctgaccacgcagatcgaaagccacgactggcaggccgagctgtactccaccgtctcccacgccaaccgcatcatgcacaacctgtgtgtggacgtgtggatgtacatctcccgtggagtgttcgcccaggtgccggtcaagggtgccactggttcctccaccatgccgcacaaggtcaacccgattcgtttcgagaacgccgaagccaacttcgaaatcagctgctcgctgctcgacaccctctccgccacgctggtggaatcccgttggcagcgcgatctgaccgattcgaccacccagcgcaacatcggttccgcgctcggctactccttgctcgccctgaccaacctcatgggcggccttgagtccatccacccgaacacccacgtcatcgagcgtgagcttgatgagaactgggaggtgcttggcgagccgatccaaaccgccatgcgcgcctgcgagctcaagggcctgccgggcatggacaagccgtacgagaaggtcaaggagcttatgcgcggccacaccatcaacaaggaacaggtcgagcagttcatcgaccagcagtccttcgacccggaaaccgccgctcgcttgaaggctctgacccccgccacctacaccggtgtggccagccagctcgtcgctttcgaccgctgaaataggtgcgatgcgagtccctcgagcccatcgcatccaccacactactgcgctgagtcacaaaccaaaccgcaaactgaaccgaacaaggacaggcgtcaggtaaccatttcatgactactgaacaggagcagtccactacggaagatcgcccggacaaggcgacctcctccactaccgaccggccgatcgcctctggtgacggccggtcggccagttttgctgtcaacggaccggacagcccggcaaccgacgacagcaacgattccggaccgtacatcgacgacatcgctccgcgccgcacgcgcgacttcggcgatctgacccgggccggtctgtcgctgttgatggccgccgtggtcatggtgttcgccgtgtatctgggcggcatgacgcgcggcgtcgaatccgacgcacacaccgcagcccaggtcatcaactggttggctgacttcccctccaccgtgctgacgcagctggccaccatcgtcatcgtgatcatcgtgctcgctcaattgctactggcccgggaatggctgcaggccgcggtgtccgcgctggccatgttcgccggctacggcatggtgtgggtcgtatcgacggcaatcagcagtctgaacgatttcaccctgccaatggcactagtctcagccgccacctcatacggctccgggctgttgcccgacatctacgccggcatggcgtccttcctgaccgccgccgggccacgccgcacccgctccacggtcaaatggagctggaatatcctgtatgccatcgctgcggtgatggtggtgctgtcgtggcattcggtcaccggcatgctggtgtcgatggccgccggccgcacagtgggcatgctgatccgattcgtggtcggcacgcagaacaagggcgtgtggggccaagatctggtcgccgccctgaaaggcatcggactggacaccgcctcgctgattcggcatcaggagcccggcgtcggccacggttcactggccgtcacgctggacgacgatctggccgaaggctcgcgcatctacgatctggataccacggacaaccgtcgtttcatcgtttccgtcatcgacgcgcagacccataccgtcggctatctgaagcagttgtgggactgggtgcgtttcaccagtgtgtccatccgacgtgaccgttccgtgcgtgacgccgtccagcatcatttcgccatgctgctgggtctgcacaatatcaaactgcccgcgcccgcaccctacggcatcgccgataccgacgaatccgcgattctggtgctggatgcacacaccatcgaactgcccgccaacctgaacacgcttaccaaggcggatgccgtggcctacatgcgctacctgtccgtggcgagccggcgcggctatacgcaccggcgcatcacgccggaaacgctcgcccggcttgaagacggcaccgtcgtgattgccggctggctcaacggcgacaacgcttccggtccggccaacaccgcgctcgacaaagttcagctgctagtgctgttcgccgcgctgatcggcgtggaaccggcggtggaggccgcccgcgaggcgtggggagacacgactctgacggccttggccccgttcattcagaaggtcgcggtcccctcccccacgcgcgcgctggaatcctgggacaagcagctgctcaagggcctgaggagtcgtatcaccgcgctggctgacgaggagacggtggaatccgccgaaccggtgacgctggcccgattctcctggcgttcgatgatcaccatgctgctggtcatcgtggccgtggtcgtggtcttcacccaactgaagcccgaggagatcatcaccgcgctgaccaacgccaacccgttgatggcggtggtgacgctcgcgttcggtgtctgcggctggatcggctcgtcgatttcgctcggttccctgatggcgcggcacaagcgtgacaatatgggcgtcttcatgagccaggtggcaggcggcttcgccaccgtatccatgccagccggcgtgggcccctcgttcgtcaacctgcagttcctgcgcaaatccggctatcgcaacacccaggcgaccgcaattatgagcgccgcgctcgtggtgtattacgccgtgtacttctccatgctggtcatcatcggcctgttcaccggccgcaacatgttctccggcgcaatcccgacaaacacgttggttatcgtgctgggcgttgtggtcgtggtgctgtccattgcgatgatgattccgccgttgcgccactgggtgacccgtcgtcttatgccgctggccaagacgtatatcaaccagctgctggacgtgctttcccagccccgacagctcacagtcagctgcctgggcgcgctgttccagaacgcgaccactgggctcgctttctgggcggccctgcaagcgttcggccattcatcgaatccgattgaaacgacgttcgtcttcctgctggcctatgcattgggttccgcagtgcccactccaggcggtctgggcggtgtggaagcggcgctgacattcgcgttcgtggcggtcggagtgccgcagggcgtggcgctttccgccactttgctgcaccgcgtggtgttctactggctgcgcattccgctgggcgcggcggccatgaagtggcttgacaagcataatcttgtctgattcgtctattttcatacccccttcggggaaatagatgtgaaaacccttataaaacgcgggttttcacagaaacatgcgctagtatcattgatgacaacatggactaagcaaaagtgcttgtcccctgacccaagaaggatgctttatggcatacaacaagtctgacctcgtttcgaagatcgcccagaagtccaacctgaccaaggctcaggccgaggctgctgttaacgccttccaggatgtgttcgtcgaggccatgaagtccggcgaaggcctgaagctcaccggcctgttctccgctgagcgcgtcaagcgcgccgctcgcaccggccgcaacccgcgcactggcgagcagattgacattccggcttcctacggcgttcgtatctccgctggctccctgctgaagaaggccgtcaccgagtgaccttctgctcgtagcgattacttcgagcattactgacgacaaagaccccgaccgagatggtcggggtctttttgttgtggtgctgtgacgtgttgtccaaccgtattattccggactagttcagcgcttccataagctgctcgaatcccagggtgggctcggcctcgaagggatcgaggagtatggcttcccggcgttcgggggcggtcagggtcaggtgggtccagtcggcggagaactgggctccgacgttcagggccgcgtccacgaaccggccacgcagggcggcacgggtgtcggtcggcggattgtgcacggcgtattccacgttgtctcctgtcagcagctcacgcatctggttgcgggctacgagcgaaccgtacaggcgaccgttggcgatgtcgtggtagtcgagctcaagctgttccatctgggcgaaggtgacgtccgggcgacggcgtttgagcgcgtcgaacagacgcttcttggcggcccagtccacgcggtcggcgagcgcatcgtatgcaccacgctccagcgcgtccagaacgcggctccactcccccataatcgtgtcgatcgtggtggccggcagcgaacttgccagcgcatcgccatgggtttcgatgaaggccttgaccgccgcataataccggcgctgcagacccagtgcggacacggattcgcctgattcgagcgtcagttcggcgcgcggattgtcaaggaatcgactgaccgtgcgattggcggcagccggatcagcaaaggcatactgctcgaatccggacggaacgccatggcggaaggcgtcttcgatcgcgcacagcacaaggtgcgtgacggcaagcttcatccatgtggaccattgcgaacggttcgagtcgccgatgatcacatgcagccggcggaaggagtcggggtcggcgtgcggttcgtcgcgcgtgttgaccatcgggcgggagcgggtggtggccgaggagacggcctcgtccaggaagtccgcgcgctgggtgatctggaagccgtccggggtcatgcggccggcaccggtgtacagctggcgggtgatgaggaacggcagcagctggtgttcgatggtctccaacggcacgaagcggcggaccaggtagttttcgtggcagccgaaggcgtggccggcggagtcgacgttgtttttgaacacatggatcgtggcgtgtgcgccgtaggattcgcgcagcttgcgctgggccttcagggctaggttgcgcatcacgtgttcgccggcgaggtcctgggccagggcctcgcgcgggtcgcgcgcttcggcggtggcgtattcggggtgggatccgacgtccagatacagacgtgagccattggccagatacgtgttggtggagcgggaacgggagacgatgggctggaacatggtcatcgccacctggccggcgtccacggggcgttcggcaccggtgaccgccacgccgtattcggtttcgacgccgaaaatacggcagaacccgtccatctcggcggatggtacgggttccgtggcgtgcagggagcgggtgccgctgtcacgcagttggggcatcactcgccgcctttttgcacgaagctgttgacgtattcctcggcgttggtttccaaggcggattcgatgtcgtcgaggatgtcgtccaacacgtcggcttggtcggtggactcggtttgggcggcggcctgcgtggtggcgagggcgtcgtcttcctgggtcgcggcctgctgtgcttgaggttgttcgaattgttgtggcatgttgtcttctttttgggctgtcaaactcccctcagtcagccttcggccgacggctcccctcacccgaggggagccggaggagtcaaaaaattatcgctggttgatggagtcgagccacggatactgctgcaggtaatgctgcagttcgcggatgatgagtccattggaggccactacatcgttatcgtgacgccagtggatgcgttcgccgtcccaacggctcagcgtgccctgtgcctcccagaccactacggtgccggcggcgatgcccgcgatatcccacacgtgcagcatcggctcgaagtaggcgtcataggtgccgtcggccactttgcacaggtcgagcgagacggggcccacgcgcttgatgtcggccgggcgtccggcgagcgaggaggccacgtcgagcgcacgctgcgattcgctggggatgaaggacatgccgtagctcagcacagaaccatccagcgaggaggtcatcgacggcacgaccttgtcgcgcttctcgccgaccgcggttttgtggatgcgcacggcacccgctcccctggcggccaggtaggtcaggccgagggccggggcgtgcacgatgccgatgatcggcttgggctcgttgtccgggccgaattcgaacagggcggcggtcaccgtccattcgctcatgcgacgtacgtagttgatcacaccgtcgatcttgccgatgtaccagtaacgctggccagggcggctttcggcggggcgggtggtccagaagccgtcgaagtgggcgatgtcggcgattctggcgctcatgaagcgcatgatcttgttgtccacttcaagcttgtagcgggggccacggtccgcgttctcggtgctcggctgggcgaggttacgcggattgagttggtcgtggagggcatgctggccggcttcttcgagcaggccggcgactttgagcgcaaggttgcgcaggtcctgtggggtctcttcacgtgtttcttccatagctaccaagtctatcgttcggcgttgatggccagcgacttcagcagatcgatggcgtgttcggctgaattgagttcggtttcgcagtgcgccttggtgaaggcgagcggatcggagatgtcgagggagaacaggtgatggtcggtagcggccatatggccggcattgccgtagaattcgaccgcctcgccctcgtctgcggcgcgcgggtcgcgaacagtgagtcgggaccagctggcggcggccacctcatcgccgaattgcgccacgagttttgccctgagccaggcgcgggtgtcttccggcggttcggtggtggcgcgtgcgatgtcggcggcgctcaccacccgttcggtgcggggttcgagtttggtgaagatgctgtccgcggggtcgagcgccgcccatttcaggtcgatgaccttcagtcgcggatcattccatccgttggccacgccgggtgcggacgttgtggtgattttgcggcgcagtttttcgagcagctgccatttgagcagccattcgatgcggctggcctcgccggtcatggccagacgttcgtcatcgtcggcggcatggcggatggaggcgcagtcgatgagcgcctgctgccacatcgccataatggatgtggtggatttgtccggccaggcgggttcgccggcggtgtcggtaccttcgaccagtgcggcgacctggtagacggcttggcgcagtttgagctggataagccatgcgttggtttcgccgccgttggccagcggcaagattgcccccagcgtcaggtcgcgggaaacggtgtgtatggcctcgactgggtcagacagttcgagttcgtcgaggaaggcgttcaggtcgaatccggcctcgtccgcatgttcgagcagccacagcagcatgctcgtggtgccgagtttcagtgcctgcggcacctccatgcgattggcgtcgccgacgatgacgtgcagacggcggtatgcatcggtggagtgggattcgtcgcgcgtattgatgatcgggcgttcgaaggtggtttgcaggccgactttggcgtggatgtagtcggcgcgctggctgagctggtagcccgggatctcgctgttctcgccaatccctacgcggccggagccggcgtagatctggcgggtgacgaagtggagggtcatcaggcgtgtgaccaagtcgaatggcaccgcgcgggccatcatatagttctcgtgcgtgccccagcaggagcccttgccatccacattgttgcgatgcagggcaatgggagtgccagtctgtttgcgggcgcgttcggtggcggcctgcatgatgaggtctccggcgtggtcgtatcggaccgcttcgaacgggtcggtggtttccggcgccgagtattcggggtgggcgtggtccacatagacgcggccgccgttgggggcgatcacgttggtgatgttgagctgcggggcgtcggtgagcatgtccgggcgggcggcggcgcgttcgagacgggtgccgcgcgcgtcgttgaccgggtcctcctgccggtagtcccagcggatggatttgctgtggctgtccgcggcgccgttcaccacgtcgaaggacagttgcaccggattgtagcggtccggggtgttcagggataccgcgtattcggtttcggtgcccatcactcgtttaacggtcatgtagtgctccttgagcttgagctattcggcggtgcggatgcggcggatcgggtccatgccgttgatgcgcaaccattgttcggggtccacgtcggccatggaatcgcgggtctcgcggtattcgtcttccacggcggcagcgagcagcggcacggtgagtgccacgtccaagccggtttcgatggattccttgaccgctcgggtcttggcccggtccacgatgttcttgagcatcgcgccggagaccacgtcggccaggaacaacgcatgccactggccgttctcctcctgcacgtcgcatagatggcggcgttcggaggttccgtagatgtcatgcaccagcacggcggacaaggcgtgcgcgtcgacgccatcttccagaggcaggtcgtcggtgaggtaatggtccacgatggcgatggcctgattggttttgggccggccgacgcgaatcttgacgtcgagacgccccggtcgcaacacagccggatcgatcatgtccacgcggttggaggcaccgattaccatcacattgtcgagtgattccacgccgtcgagttcggagaggaactggggcacaatcgtggtctccacatcggaggagacgccggagccgcgggtgcgtagcagcgaatccatctcatcgatgaacacgaccaccggattgccgtccgcggcgcgttcacgggcgcgctggaaaatcaggcgaatcagtcgttcggattcaccgacgtatttgttgagcagttccgggcccttgacggacaggaacacgcccttgacatgggtttcggccggactgattgcgccgtcgccattcgaatcgtaaccaccctcgcatagggcgttcgccacggccttggcaatcatcgtcttgccgttgccgggcggaccgtacagcagcacgccctttggcggcttcaaatcgtagcgctcaaacagcgcacgatgctggaacggcagttggacggcgtccctgatacgaccgatctcactatccaggccgccgatgtcggcgaacgtgacatccggggtctcctccagcaccagatccttgtcgccctcggcgggcagcacttcgatggcgaggcggacggacggatcgacgataatacggtcgccctgattgatgcccgcatacgcgagcgcgccggaacggcgtatgagcacgggattgccggaggcgtcggtaacgatcagtcgaccgtcgtcaagtacctgcttgacactgcgaatctggcccacggtgtcagcatcgcgctgctcgaccagcacgagcttctcgttgagcatcacggtggccccggcggtcaggcgggcggcgttgacgttggaggccacaggcaccaccatgcggcgggtgccggaaatgacttcggccgacgcgtgctggatgccgtcttcatcggtgcgggtggaatcgaccttgaccatggtggcgaaggtgagcggcggctgagcgagctgggcgagctgtgacttcgccttggtcagttccttgccggcgcggctcagcgcttcggcgagcgcatggttcttggccatcaggcgatcgttcagcgcggcgagatcttcggtgtcgctcatgcgggttcttcgcttcccttctatccgggattttcggcaacttatggcagtcggcagaccctattcgttgccgtcggcggatttcctgttacgtataacagtacgcacttttcgcaccacgaaccatacgatgaccacaatcacggccgcgatgaccacgtcctcgaacacgccgagcgcgccttgaatcgagcaccactggtcgccgagtaggtaaccggcggaaacgaggatggtgttccacacggccgagccgagcagggtccagccggtgaagtgcaggaagttcatgcggttgaacccggcgggaatcgaaatcagcgagcgtaccacgggaatcacacggccgatgagcaccgaccatgtgccgtatttggtgaaccagtcgttggctttgctcacgtctttgcggctgacgccggggattttgtctgccgcgagattgatgcgatgcaggcccacccagcgggagatgccgtacaaggtccaggcacccagtacggagccgatggtggcccagatgattgcgcccggcagactcaaggtgccgcgtgcggcggtgaagccggcaagcggaagaatgacttcggacgggatgggcgggaagatggattcgagggcgatggccaaggccacgccgataccgccgatggtttccatcagcatgatcagccagtcggtgatggtgccgatcaggccgggttcggtggtggtgcagatgggtgtggggtcggtcgcaagaatagtggcggctgccatggaaaaactcatagagggcattgtcccaaggttttcccagaatcagaagcatgacgcaagaagatgtgcattttgttgacaagtccgccgagagcgaagttgggagcccggctgattctgcggtttctgtgccgacgctgagcaagcccggcctgctggttatggatgtggactccacgctcattgacgaagaggttatcgacgagttgggcgtggtggctggctgcggtgaggagattgccggagtgaccgcacgcgccatgcgcggcgaactggagttctgcga

SEQ ID NO: 1018 - DNA, 12183 bp, Unknown
  R117_24m  MAG No. k141_45762
aatagtttccttgtagtgtcttcagagggtgttcggcccgacgatatcggtggcacgttacgtggtgcatccggtaggccaaatcggtgcaccactctatgtctgaagggagccactcatgacattcgatgatcgatcggcgtgccatatgagaacgtctccgtcgattccgacggtgtttacacttttacatcttcctacaccttcttacacttttccttcaggtcgaaaagtgttggaagtattggaatcattgggattgaagaccattttcctttacacttttgctcttttcgcgggtctattgcacaagggatcctcaaaatgcgttggaatccttggaatctttgggattcagggatccggaggaatgcgatgagcaggcgccgtaggattcggttcggtcgtgtccagaacctctagggacggaaaacgcaggtatgtggaggcacgctaccagccgccggtatgggcctatgccaaatggcccgatttgccgaagcattattcgagacgattcgacgccgactacaccgcaatggcggaggcctggctcgctgacgttgaacggcatataagactcggcgactgggaaccgcccagaatcgtggtgagcaagacgagggcgacggcgggaacatcatcggggctatcctcgccggccatgacggcagacggtcacgcatctatcacactgcggtccatcctgaagcgcgcggcatgggtgttggctcacttttggccgggcatgcggtcgaggcgcttcgcgcactcgggttgccgaaggttgccgtcggcgtatatgcggacaacaaggccggcaacgacttctgggagcagcagggctttgcaatccgagacgacctggtctatcgcgagctttccttgtaaggtgtccacccgcaatccggcttttgcggtcggtcattcactcgtttcgttgccgcacgcacatttcatgtcgacgatctgttgactctgaatcgtgattcaaatgatccgggccgtatggcctatggattcgatgtcggtttgcttcaatcgcacagacgtctgatgcacacaagtccgcaccggatattgaaacactcagtcttcgatgacgctgggatcggcgccacttttttacgtggcggccgcttatgaaggtgcatatgccgtcggagacggtagccttcctgccgtatgacttcctcatagatacaagcagcggaccatgggactacggtctccccagttctgctagatgtatagattgtttttaagaaaacatagaaagtatgggagatataggtaatcgtgacacctcttgtcggcgtgaaggtatggaaaagcgcaaatttccttctggcgggctttgagcggcgaacagagtggcacactcattctgggaattggtagaaagccttgctgttgctgggtttgtgggtttcggtagatagagtctccatgatgtgcgcagacctcatgatgcgacgggctcgcctgttcgggccgctgctcgcctccggctgcgaggtgctgatatcgggggaggggacgcgccgcgtgcgattgttcgacggtgagcgggccttggtcgggaacgccacggccaaacgaagaagggaattcacggagacgcgtcttttggcccacgaggccttacgacgtatcggccatgacgggcccatactcaaaggttcggatggtgaaccgctctggccatccggcatcgtgggatcgctgtcgcattgtccgtcgctgtgcgtcgccgccgtggcgtcggcggaaagaatccgtgccgtgggagtggacgtggacgattcggacggattgtccgacgggatcatgcggttcgtgttctcttccgaagagctcgcatcattgcgtatggcctcctcggtggaacgtagggcggccttctgcgcgaaggaggccgcctcgaaggcgttgtccgcattggacgggacgggggacttccgtaaggtatccgtgagcctgaaggcggatggaacgttcgccgctgtaagacgggatgtggcgttgcgcggccaatggcgattctacgatcggctggtatccgcgatggtcgccattccctcggagaccgtctcaggggcgcggacccctcgaatgagcagccggagcagaaaggaataggccgcatcgtcatcgtcgacgggcgtatcatgttcgggccgtgtctcgaattggacgaatccgtgcacggcggaccatatggaccatgcgatgaggtgcgggtcatccctccggatctttcccgcggcctgcccgtagcgcactagctcggtcatggcggcgaggcatgcctccgaagcctcgcccgcatgccatcgccacaacagggcgtagatgccgggcgacgccttggcgtgcccgcggtatacgactcccgcatcgtagagtctttgcaggggatcctcggtggtgacgcgcaggagcttctcccgtaacgtctggaaactgtcgtcgatgagagcgttgatgacggcctgcttgtcgccgatatgccggtagatgctcgcgggggacacatccgccttttccgagagaagccggatggtgaaggcgtcatagccgtcctcttcgatgattcgtttcgaggcgtcgagtatgaggcccctgatctcggtggtgggcgtccgctggctttttgtcgttttccgaatagtcctcatatgcttctccgcatcatcccgccgttacggatgaaaaacgccatccggcccgtaggtccctgcaccgtcccatgatgggtggggtcgaaggtccagccacgctcttggaccgcgtctcgatgggtgtgatggctggtcccaccgcattgagattgccaccgagccaagacatgtcggggaacgctggccggcgcgggcgtggaacatgccgacgctctggctgccgtgaccggggaagcatgccgcgatgtcaccgatggggttgcgtgtgtcctccgctatcgcgccggccgtcaggagacggtccgtcatatccgtgtccttgatccgtgggatccgtccgtcatctttcatgatggatgttcctttctattgggggagattgcctgaatcgtgtttgggaagtgtgatccagcagagcagcgcgaacgccaatgcgagggcgcaggcgatccagcatgccgcatgcgtggcgctcatgaaactggtcgatacggactgctccacggtctgtcggatgcctgccggcaggtgcggaaggatcgatttcgcggccatcaccgaatcctccgcggctttcgcgatggaagacgggatctgcagtccggacaacgagtccgagagctcgtcggggtagacggaggagatcgcggaccccatgacggcgacgcccagcgtgccgccgatctcacggatcgtgtcgttgacggccgatgcggcgccggtcgagctttccggaacggtgcccatcagggcgtccgtggcgggcccttgaatcagggcgatgccggccgccatcagggccatggtgggtacgaccacgaaccagtagctgcaatgggcgtcgacacgcgtgaccacgaacatgctcgccgacaggaacagcagtcccgtcgagacgaccgaccggtatccgaaacatttcgccaattgcgtggcgagcggagcgaccgccgccatgaccaccgcgaagggcagcgtcgcgaccgccgtctgcaatgcggtgtatccacgtaatgcctggaaccattgggtggtgatgaagatgaagccgaacaggcagaagaacgcgacgcagatcgcgcaggtgctgctcgtgaacgtggcccttcggaacaggccgacatcgatgagcggggcgtgcgtatgcccctcgaccgccgcgaacaccgcaagtatgatcagggccgcgcagatgccgcctatgacctgccaggagagccagccgtaagtcgggcgttcgatgatcgcccacaccagcaggcccacgccggccaccgataacacggtgccggggaaatcgaacctctcggaacggtacgctcgtacctcgggcaccgccaccgcgatgcaggccagcgccaccacgccgatgacggagcacacccagaaaatggaattccacgcatagtgctccagcaggacgccgccgatgatcgggcccagggcgatgccgacccctgatgtcgccgcccacaggccaacggccaggctacggtacctggagccttcgaagatgacgatgattgacgacagcgtcgccggatagatcagcgcggcgcagacccccaacaccacgcgcagcgtcaccagctgccgcagggcccaggagaaggccgtggctgcggagaccacggcgaatcccgccaatccgacgagcagcatccgtcttcttccccatcggtcgctgagtttgccggcgggcaggagcagtgccgcgaaggacagcgtgtaggcgtccaccacccattgcaggtccgtggacgaggcgttcaacgcgtcgctcatcgtgggaatcgcgacgttgacgatggtgttgtccatcacgaccagcagcaccgccagacacagggcggtgagggccagccccctgttcccggaccgtgcgtgtctccggaccggcatgggggtgggaatcaacgaacgttcagattgcatatcaatgctctcctactgtgtaacaatgttatctacagatgaaacaatactcctctctgtggggggatcgccaccatccgtcaacgaggcatggaagtgctccgcgtgcggacggacccaccgtcggcgccatgaaccatgccgccgcccgtggcgcgggaacgggaaggccatgcggcgtcgcccggggtccgcaaaccccatggcatgttccgggcccgggaatgccacggccgatgggtcctccaaaatcagcgccgtccgcttccgggcggagagttcgtgcggtcgctttgatgacacggccgccgtcccgtcgggactttcggcatcacccgattaccggcccaaccctcacggcgggaccatgacccgtcgaacttcaatgaggaaagcgccggccgaccctttgccggaaaacgcgaaccgtcggcatgccccgctgaagcgacgccgacgatggtttcggatggtgggcggtcccgatcgcccgatccttctcgatccaccgcccggcgatcgccgaacgcccgtggcggctcacgatggttgcaggcccatgcccatccaaggcgttggccgcatcctgcaaaaaaccgggtccatcgtacgcccgaacatgcgaatctccgtacgccggcgtggatatcccgcataggcgggatatccgtcggggagattccactgacagcgtgaccagtcactcatgcgccggcgggagacgctaccatgaagacgcgaatcatgtgaatcatcacgcaaaggagcatgacgtgaactatctggaacatcgccgacagcacaaggacgcgctatgggaacagctacgggaaccacatcaagccccacataggaagcgtaccgataaagcggctgacggcatcgcaggtgcaggccgcgttcaagtcgtacataattcctgaagcggaatagccacatcgcacactggttttctctgaattccgagattctttctctgaattcagagataaatctcgggattcagagaaaaccgttcaagaatgatctgcgtatctcattcaacgtactgccgcataccacacgttgcgtccactgccgaccttcttagcgcgtccttcaaggactagttttcgcaactggtagtacgcctgattcccctcaagatgcagcaattccatcacatcgtttttgctcactgatttctgttcatgcattaacttgatgatcagttcgggataccgcaccctatcgatgtctgattggcgaacgtaatccatcgccctaccgctgcaccgatacactttcgcacccaacatatacgtgcggcgagctccaacgccagcgctttcaacaagccccgcctccgtcagctgccccaatacggtgcgcagacgctggtcactcatgtccagggagcccgacaacacatcaaagccacaacgacgttcactcttgagcttgtccaaaataagcagaccatcgagagacatggacttgccgctgcgctcacgttcctcggccagcagttccacaaacgccttgtcgggcacactacgaggcaacagcaccgacactccacgcctgttggacctcgaataatcaggcagaggacgaccatagttcaaagcaccctcgaatatacggtcgatgccgcgccccgtacgctcggccaatccggttcgtttcagagcatccatcaggcagggattgcgaccatgcggttcggcggtaagcagattatggatgttgatgccctccacgaacccgccgggattggcgatggtaagccccgcatcatccaactgcacgcgcacacgtcccagcagggtgtagtcacgatggccgaaggcgttcaccagcgcctctcggaacgcccgatggtcgaattccggcaccatcattgagaacagaccgacggatagctcgacgcttggattccaaggagagaacatgtcgttgatttgctcgatggtcttcagcaacggtccggcatagtcttggttgactttgatatccgtaccagacatgacttggaaagacgcccgatgagtcggaacgaagcgtttcagagactcccccttgcccagcagcagcaaaccggtcagcgtcggcatggtcttgccatcgacggtcaccgtcaattgcagggatttctccagctcctcatcggtcagttccaacaaattacggtcactggattggtaggtgccgataatccggcgcagacggtcgcgttcaaggggatcgaaatcatcacgggtcgcatccggcaccggctgcgcggaaaagtccaaacgtcccaaatcggacaggcgcgtggcgatctcgtacgggtacatcggcacgctctccggcgtaccatccaccttcatacggcgtcgcaacaccttgcccgacttggtcgagaccacgctgcgggatttcggcacatcgatctgcatcaccggcgtcttctccgtcccgacgatctgcgcacgagcggaaaccggaggaaccgtacgggagtagggagtagagtggcggcgtcgaccgacgcatgttctcgccataatttcaatcccgaaaaggagcctcgtcgcaaccatgacatcacatcttgccgaagcaggacgaacgttggttccccgcaaggaagacagatacggtctgctctcccccgccttggtggtgctgacgttcgtcgccgggctggtggacgcgctgagctacctgtcgctggggcatgtgtttgtggccaacgtgaccggcaacatcgtgtttcttgggttttcgatcgcccatgcccaaggcttcgtctggtggacgtcggcgctgacgctcgtctccttcatggtcggcgcgcttatcggcgggcgcatcatccggcgattcgaggagaaccgggtcaagcatctgttggtttctacctgcgtgcaggcgtcgttcgtactcgccgcgctaatcggcgtctatcttttgaaccagctcatcaccggccccgcagacgatgcgtccggcgtctcctcgattgcacggcttgcacagaccacccaggcctcacaggcctcacagccgagcctgaacttccccaccgcacggcacatcgacctgcacatcatcctgctgatcgtgctgctcgccccggcaatgggcatccagaactccaccgcccgcaagctgtcggtgccggacctgcccaccaccgtgctcacgatgacgctgaccggcgtcgtcgcagacgcttcggcacacggccaccagcagtcgaagctcgggcggcgtgcggtcgtaatgctggcgctggcgtctggcgcgctgaccggcgcgcttctgcaggcgcacggacacgagaacatcatcttgatggtgatgctcgggtgtctgctggcggtcatcgcgatgatgattccgcacgtccattcggatgcgccgtgggtcaccggccggcaatagcctctggcgcatactttcgccatatgagacaaaaacggccacgccacagcgcaaccagtaggaaacgcccggcaatctcggctctcctcgatatgttggatacccgttgtttgaaacaggccctccgcaagatacaaacagaggcagtgagaagtagaggtaaatatgactgacgcacagcaggcgaacggcaaccagccagaatcccagaaccaagcagaagcgacggcacagccgcacaacaagcgagtgacgaagtgggtcgctatagtgattgccatcgtggcggtggcgattatcgccgcggtcgcggtgttcggcacccgcgcatacagcgcgtctcagtacgatagcgcagtggccgcctgcgccgccgcctcggaagacgtacgtaacgccaccaacgactacaacaacttggtcaatggcgatgctgcagaagccgccgctctgaccaaggcagacgtctcggacgcctccgctctcgacgcgctgtccaaggaactgaccgtggaactgccgacgtacgaaggctgcgtggccgacgacaccaagggctaccaggccgcgaccaagaaactcgaacagcaggtcacgtggtaccacgagcacaccacgtcgctgcagaaggctgttgacgccgtcaacgcggtcaagaagtaaacgagggcggtctccctcacgttttcaggatcggacagcgctcaagtcgcggcaacgcgcgatgtcggccggtcctgcacggcccgaaacggcagaaatcccgcgccccttacgttcggacgcgggatttctgccgtttttgagtcacggattgggactatagcccagtctttgccccagagttgtctattcaggattaccctctcggccgtatctcaggagcaggacgtgtaaaaacaaaaaaccctcgctaatccgcgagggttattggctggggtgcctggactcgaaccaagaatggctgaaccagaatcagctgtgttgccaattacaccacaccccaatttggcttggcgtagcaactccgaagagttgttcgtcgtacccccaaccggatttgaaccggtgttggcgccgtgagagggcgtagtcctagaccgctagacgatgggggcatattcagtttttcaaccggctacgtggcgaaccgcgcaacaggtagatatattacgcgctaccctgctctcacgcaaatcccggcgtgtcgcgccattttccgccgttctgcgggaacaccccatgcaacgcgaaagcgggcatccgtatgtacggatgcccgccatgcgtcacgctcccatcatccgccggcgtgcggtggacgacgcatcacagatgcgcccgcaggcccttgagacgggcgacggtgatcggcttgccgacgatctccatcgattcgaacagcggcggggagacgcggcggccggacatggccacacggaccgggccgaaggcgaggcgcggcttgtagccggcgtcctcgacgagggccttgttcagggtctcgtgcaggttgtcggtcttccaatcggcctcatccacagcctcaagtgcggcgatggccttgtccagcacctcgccggcggaatccttcagctgcttcttggcgtcgtccgcaggctccagatactcctcggtggacagcagggagccgaccatgccggcgacctcgcccagcaggcgcacgcgcggctgaaccagcggagcggcggcggtcagcacctcacgctcacggtcggtcagggcatcccagttgtcggcggaaaccacaccatcgcggtgcaggtacggcaccgagcggcgcaggaagtcctcgggctcgagcatacggatgtgctcggcgttgatggagatggccttgtcgatgtcgaagcgggccgggttggccttgacgtcgcgcacgtcgaacttctcgatcatctcgtccatggagaacacgtcgcggtccggtgcaatggaccagccgagcagggccaggtagttgagcaggccctcgcggatgaagccgttgtcgcggtggttgaacaggttggactccgggtcgcgcttggagagcttcttgttgccctggcccatcacgtacggcatgtggccgaacaacggcatctccttggcgatgcccagctccatcaggtaacggtagagcacgatctggcgcggggtggagctcaggaggtcctcgccacgcagcacgacgttgacttccatcatcgcgtcgtcgaccgggttggtcagcgtgtacagcgggtcgccgttcgggcgcacgatcacgtagtccggcacggagccggccttgaactcgatggtgccacgaatcagatcgtcgaaggcgatgtcttcatcaggcatcttgatacgtagcgcaggcttgcggccctcggcgcggaaggcggccttctgctcatcggtcaggttgcggtcgtagccatcgtagccgaactcggccggacggccggcggcaaggttgcgctccttgatttcctcgggagtggagaaggactcgtaggcgtagccggcttcgagcagcttggcggcaacatccttgtagatggcggtacgctcggactgacggtacgggccgtgagggccacccacatcgatgccctcgtcccagtcgatacccagccaacgcagggattcgagaatctggttgtagctttcttcggagtcgcgcacggcgtcggtgtcttcgatacggaagatcagcgtgccgccggtggcgcgagcttccgcccagttgaacagggcggtacgaatcatgccgacatgcggggttccggtcggcgacgggcagaagcgaacacgaacgttcttgggcagttcgggtttggtgttttcagcatcagtcataatcccctattgtgccgcgcgcgccggacgcggagagcagcgctcctcgctcttttgcttcgttattgacatttcgggccaacaccatcccaaaacggccattttccaacgaaatctcttttgcctgtctttggtagtgcccgatatcttgatgcctgtcttcacacctgttttgacacctactttggcgccatccacacgcccgcacgcaaggcttcgacaccatttggcgcaattgttgagttttttacccaaacgatggaagaataggagtcgacgcaatcgtcttatgaaaggggaatcaatgaccgatcccaacaacgtgccgttgccgcagatgcccgcgcccaacggtaccccggcccagcagaatcccagcacgccgcaatacggcgcacctgctccagcccccgcacagccagattatgggcaattcaacgctccggcccccgcacagccggcctacggccagcccgcatacgggcagcccgctcccgattcttccgcacccggcgcagcgcccggtgcaactcccgcctatggtcagcccgccgccgacccgtacgcggcgaatgcggctccgcaattccccgctcccggcgcggctcctacctacggccagcccggaccggacgccaacgcttacggtcaggtgccacccgcatacaaccagtacgccgctcccactgccacagcagccgtgccgttgaacaagccgtattacgactgccccttccctgaggcattcctccgtttctggaagaagtatgtggtcttcaagggacgtgcctcccgcagcgagttctggtggtggacgttggcctctgtcggcatcagcgtcctgctgagcctcctcagcagtgccacggacgacaagctcgggttcctttccagcatttggagtctggccatcctgattcccagtctggcgctcgccgttcgccgtctgcatgacacggacaagcccggctggtgggtcgccatcttctatggcgcgatggccctcggcatgatcatcatggttgccggcggtggcgcagcactgtatggcgccttcggcagccttagcaactccagctatggagccatggcaaccggcggcctcggtgccatggccattggcggactgattacgctcgctggttcaatcgtctacatcgtgttcatggctatgcccagcaagccggaaggcgcacgtttcgacgatgacgcagtagctgccccgatgcctcagggtgcttacggcgcaccgtacggcgctcccgcaaccccggacttcaaccaggccgctccgggcacc

SEQ ID NO: 1019 - DNA, 13996 bp, Unknown
  R117_24m  MAG No. k141_46584
ctcctgcatctacggcctgggcactcctgaggaatacgccgggcgtatgctgtttctcaaggaaggccagcagatcaatcgcgacgacctgctgcgccggttcgtggccatgcagtacaagcgcaacgacatcgccttcacgcgcggcaccttccgcgtgcgcggcgatacggtcgaaatcatccccgtctacgaggaactggccgtgcgcatcgaattcttcggcgacgagatcgaccgcatctccaccctgcatccgctgaccggcgacgagatcgacgaggaaaacgaaatccacatcttcccggcctcccattacgtggccggccccgaacgcatggagcgggcgctcaaaaccattcgcgaggaactcgacgaacgcctggcagaactgcgtaagcaaggcaaggagctggaagcgcagcgcctcaacatgcgcaccacctacgatctggaaatgctcacccaggtgggcgtgtgctcgggcgtcgaaaactattcgcgccacttcgacggccgcgccgccggcaccccaccgcacacgctgctcgacttcttccccgatgacttcctgctggtcattgacgaatcacacgtcaccgtgccgcagatcggcgcgatgtacgagggagacgcctcccgcaagcgcacgttggtcgaacacgggttccgcctgccctccgcgatggataaccgaccgctcaaatggccggagttcctgcagcgcgtcggccagaccgtgtatctgtccgccacgcccggcgactacgagttgggcttgtccgacggggtggtcgaacagatcatccgtccgaccggcctgctcgatccgaagatcgacgtgcgcccggtcaaggggcagatcgacgatctgctcgccgagatcaaggcccgtgtggccaagaacgagcgcgcgctggtcaccaccctgaccaagaagatggccgaggacctgaccgactatctgctggaacgcggcatcaaggtcgaatacctgcattccgacgtggacacgctgcgccgcgtcgaactgctgcgcatgttgcgcgaaggcaagatcgatgtgatcgtcggcatcaacctgctgcgtgagggcctcgatttgccggaagtatcgctggtggcgatcctcgacgccgacaaggaaggattcctgcgctcctatcgttcgctcatccagaccatcggccgtgcggcccgaaacgtgtccggcacggtgatcatgtacgccgacgaaaccaccgaagccatgcggcaagccatcgacgagaccgaccgacgccgcgccaagcagatcgcctacaaccaggagcacggcatcgatcccaagcccctgatcaagaagatcagcgacgtcaacgacatgctcgccaaggaggatgtggacacccagaccttgcttgaaggtggctaccgcaacgcgggcaaggccggcaacacacacctgggcgtgccggtactcgatcccaacgaggcagacaaacgccacgaggagatcctgaaggccggcctgcccgcgcaggacctcgccgacctgattcgccagctgtccgaacagatgcacaccgccgccgaacaactccagttcgaactcgcggcccgtctgcgcgacgagatccgtgatctcaagaaggagctccggcagatgaccgaggcggggcgatgacccgtcacatacatgggttagtgtagggaatcatggcagaaaccccactcgcatttgaaatcatcaccttcgtggtgctcgcgctgttcttcatcgtcgacctgttcgtcatcgggcgccgaccgcatgtgccctccaccaaggaatgcgtgcagcatatcgccttcttcgtggtcatggcgctgatcttcggcggatgcatctggttcttcgccggctccaagcccgccatcgagttctattccggctggctcaccgaatactcgttgtccatcgacaatctgttcgtgttcgtcattatcatgtcgaacttcgcggtgcccaagcagattcagaagtatgtgctgtccatcggcatcaccatcgctttgatcttccgtggcattttcattctgatcggcgcggccctgatcacccgcttcacatgggtgttcttcctgttcggcgccttcctgatctacaccgccgtcaaactggtgctcggcggcgatgaggacgaggaatatcacgaaaacggcatcatccgtaatctgcgcaagatcatcaagatcaccgacgactacgacggcgagaagctgcgcaccaccaagaacggcgtgcgttactggaccccgatgctcatcgtgttcctgaccatcggcaccaccgacgtcatgtttgccttcgactcgattcccgcgatcttcggcctgaccaaggatccgttcctggtgttcacctccaacgtgttcgccctgctcggcctgcagcagctgtacttcctgctgggtgctctgctcgacaagctcgtctacctgcctgccggcctgtccgtggtgctgggcttcatcggcgtcaagctcatcatggaggccctgcacggcaataccttgccgttcatcaacggcggcgaaggcatccattgggtgccggaagtgcccacatggctgtcgctggctgtgattgtggtcgcaattggcggcgcatccgtggcttccgtgatcaagatgaagagcatggaaagcgccgagaaggcctgaaatcgttagagaatacaacccttaaacccagtcagcacaacaatgtgagcgctcacaacacaccgtgaagaaaacttgtcatgagtcggctcgcgctagtagactgggtttcggcaaatggggcaatcgtgcctcgaaccaaattgaacaagaataggcaggcattcatgcgtaaagccaagatcgtagacaccatcggtccttccaccgaggattacgacaacctcctgaagctcgttgaagctggtatggacgttgctcgtctgaaccgctcccacggcacccccgaggatcacctcaaggtctacaacaacgtgcgcaaggccagcgaagccactggtcgcaacgttgccgcgcttgttgatttgcagggcccgaagattcgctgcggttggttcaagaagaacgccgatggcgaagacaaggttcagctgcagctcggccaggaattcgtcatcaccactgatgacgtcgagggcgacgagcacatcacctccaccaccttcaagggcctgccgggcgattgccacccgggcgacccgatcctgatcgatgacggtaaggttcgtcttgaggtcaccaaggtcgagggcaacaacgtgtacaccaaggtcgtcgtggccggtcctgtgtcctcccacaagggcatcaacctgccgggcgtcgccgtctccctgccggctctgaccgagaaggatgaggctgacctgcgttgggccatccgcaccggtgccgacatcatcgccatgtccttcgtgcgtttcgccaccgacatcgaccgcgcccacgagatcatggacgaggaaggccgtcgcatcccgatcgtcgccaagatcgagaagccgcaggctctggagaacctcgaagagatcgtcaagaccttcgacggcgtcatggccgcccgtggcgacatggccgttgagtgcccgctggaagaggtcccgctggccaccaagcgcatcatcgagctggcccgccagtatgccaagccggtcatcgtggccaccgaagtcctcggctccatggtgaactccccggtcccgacccgtgcagaggcctccgactgcgccaacgccgtcctcgacggctccgacgccaccatgacctccaacgagaccgccgtcggcaagtacccggatgtgaccgtggccaccatgtcgcgcatctccggctacgccaccgaccacggcttcgaccgcatcccggagctcaagaacctcgacatgtcctccaccggcgccgtctcctccgccgccgtggacctggccgacaagctcaacgccaaggccatcgttgcttacacccagaccggcgccaccgtgcaccgcgtctcccgtgagcgtccggccgccccgatctacggcctgaccagcaacgagcacacctaccactggctggctctgtcctggggcaccgaagccttcctgctcaaggaggactaccacgacaagtcccgcaaggatctgatgatctacacggacaagatcctcaaggacgccggcaaggttgctgacggcgacaagatcgtcatcctgagctctgctcagggcgatcaccagccgggccgcaccgactccatctacgtgcacaccgttggcgcttgcgactgatttcaggccgctggtagctgctgacagctagcacatagcacgcgaaagccccccccatccagaaagtggatgggggctttcgttatccgttatgttgcgattgtgcggtgattgcaatggcacgtagtcaccgcgatgatcgagcgtggtgactagtcgttgagatgatcgagcgtgccgctcttcagacgcagaatggcgaccatggtcttggcatccacaatcgtgccattgaccaccatctcataggcatcgtccaccgacaccatacgcacgtcggaacgcggagtctccgggccgatttcctgacgggaagccggggtaagtccggtggcgaagaagattgcggtgtgctgggtggaatagctcggcgtgttcataaaacgggtgaactgcgtaagcttggaggcatcgaaaccagcctcttcggccagcttgcgcttagccacatcggtcgggcgttcggacgggttgttggcgtggcctgccggaatctccaacgtccaacgatggttggcgatgcgatactgctcgaccagcggaatcatgccgtcatcggtgacggccagcacagccacagtgtcgccattgttctcctgaacaaagtagcgttcaaacgaaccgatctgattcgactcataggagacgtgatcgacattgaaataatgcgtctccacaatctgtctacgggaaatctccttgaccggagaggggcgccagggatcgaactgacggtaagtttcgttgctcataagccctcctaacaaaagcgatacatcgaaactacagcccattgtaagcggtgaaaccacgcagaagaacgggcaacacacgggtacgccgtccacgatatcgacgtgtttcgcctgttttaccgggggaatggaggactggcgcgtgtcttgtgtcgcaggagtcgaatcggtatgctactctcttcagagtgcttaggcacgccctcgtatcccaattggtagaggaagcagcctcaaaatctgcgcagtgtgggttcgagtcccaccgagggcactttagctaggagttcgctgaaattattacgaaccccattgttgggtaattcaagaaagaggttggcatggctgcaaggaagaagtccgaagaaccgagtatcaacgtcgatgaggtgctgaccgacgaagaactcaaggccgtagccgatgaaagcgaacctgctgagcgcaaggccgtggccgaggatggtccgcgtaccgtcgtcgtggccgaggatgaagccgtgaaccgcatggatctggtcgccatgctggaagacaacggttatgaggtcgttggtcaggccgccaacggcgaggaagccgtggaactgacccgcaagtatcgccctgatgtggtgtgcatggatgtcaagatgccgcgtatggacggcatcgccgctgccggcattatctgcgatgagaacatcgcccctgtcgtcatgctcaccgcattctcccagaccgatctggtgaagaaggccaccggtgccggcgccatggcatacgtcaccaagccgtacgaggaatccaagttgctgccgaccctcgaggtggccatgggccgtttcgccgagatcaacgatctgctggacaacgtggagcgcagcgaacgcaagctcaaggaaaccaccgaccagctcaaggaaaccgaagagaagctcaagaaggccgaagacacgcttgaggagcgcaagctcgtcgaccgcgccaagggtctgctgatggacaaggctgacttctccgagcagggtgccttccgttggattcagaagacctccatggaccagcgcatccccaagaagcgcctggctcaggccatcatcgccaagtacggcgatccgaagccttctgattcgggcgaacgctgattatcggcatcaccgtgctgagtcgtaaagcaacacaaacacactatgggagaggccagcgtgaccgtacccaccaatgaaacattgctggtggtggacggccactcgctggccttccgtgcatttttcgccctgccggtcgacaacttcagtacttccagcggccaggccaccaacgccgtctggggttttgccaccatgctcgcgcaggtgatcgatgcggagaaccccgaccatctgggcgtcgccttcgatgtgaagggcggcacattccgcaatgagatgcttccgcaatacaaaggcacccgtgaggcggctcccgaagagctgctcacccagctgccattgattcaacgcatgctcacggccctcggcgtcacctacatcgagaagccgggattcgaaggcgacgacgtgatcgccaccctcgccaccatgggagacaaggccggctaccacacactggtattgtccggagaccgagacgccttccagctggtggatgacaacgtcaccgtgttgtacccgggccatcacttcaaagacctgaagcatatgacgccgcagtccatcatcgacaaatacaaagtcactcccgcacaatatccggatctggcggcgctccgcggcgaaaccgccgacaatattcccggtgtgcccggtgtaggcgatggctttgcggccaagtggatcaaccaattcggttccctcgacggcatttgcgagcacgccgatgaaatcggcggcaaaaaaggcgaatcgctgcgggccaatatcgaccaggtcaagctcaatcgcaaagtcaacgcactggtacgagatgtcgatcttggcgtcgatattgaggatctgacattcggcaccgtggacgtggcacaaatcgacgccctgttcaaggagcttgaattcggaccgcgtaccaggagtcgtgtactgaaaaccttcaataccggtgccaaggtttccaacacatacggagccggcgagtctacgaataatgaacaggacgagcaggataacagtctcgatctgaacctgccggaacccacgagcatcacctcttcggagcagttcgacgaatgggtcaaggcccatcgcgccgaggtcaaagttcccggtgaaatcgccgatttcacggtttccgactatggcgatggatcgcagcggcatgccgtctgcggcgacgcggtcggccgcgcttggaccgtggccgcgtggggcgacgaaaggccggggcgtgccacggcacaaaccattgccgtggccacggcaacatcagcggccatagtgccccttccaatcaccgataccctgcgagcacagcttgcgcggttcctggaaagcgagcactcccgcaccatcgtgcatgggtataaagagttgctgcatcttctgggcgcggtagatcttgacatggacctgccgatgttcgacaccaagcttgccgggtatctggcccaaccggatttccacgccgatagcctcaagcaggcggccgagcacttcctcgacatccacttcaccgaaaccgaacagccttcgcaaggcacgttggacttcgatgacgatcaggtcgaagaagatccgaacgaacatcgtctgcgtgatctggccattatccgcagcctcgccgtcacgctcgggccgattatcgacgagcgcgaacaatgctggctgatgcgcgcgattgaacttcctgtttcccgcgtattgcacggcatggagcacacaggagccaaagtcgatagcgttcgactcgtttccatgcgtgaccagtttgccgccgaggctcgccaggcacaggaaatggcttgggagtatgccggcaccgaaatcaacctgcaaagccccaagcagctgcagaaggtgctgttcgaagatatgggtttgaaacccaccaaacgcaccaagtccggctcatacaccacgaatgcggccgcattgcaggatctgtatgtcaaatcagtggacaatgagcgggccagcggtttcctcggggcgttgctgcgccatcgagagatcaacaagctcaagcagatcgtccaaacgctgatcgatgccaccaacacatcagatgagcgcatccacaccactttcgagcaaaccgttgccgccaccggtcgattgagctccgtggacccgaacctgcagaacatccccaaccggaacgccgccggtcgtgagattcgcggcgtgttcgtgccgggggaggggtacgaggccctgatgagttgcgattactcacaggtcgagctgcgcatcatggccgatctgtccggtgatgaggcgctgatcgaagcgttccgctccggagccgacttccacaaatacgtggcctcgatggtctacaagctgccggtcgaccagatcaccggcgaccagcgcagccacgtaaaagccatgagctacggattggcctatggtctgagcacgtatggtctcgcccagcagctcaagatcgcgccacgtgaagcggaagcgttgaaaaaccggtatttcgataccttcggcaaggtgcacgattaccttgaatcgctggtggccaatgcccgagagaaggggtatacggaaaccattttcggacggcgtcgctacttcccggccctgcattcgaccaatcgtgttgcgcgtgaggccgccgaacgtgcggcactcaacgcaccgattcagggatctgccgccgacatcatgaagatcgcgatgattcgcgccgagcagaccttggcagaggcccacgtcaagagccgtatcattctgcagattcacgatgaactggtagtggaaatcgcgccgggagaaggcgaccaggtcaccgaactggtacgcaacgccatggaacacgccgtcgaccttgccgtgccgctggacgtatcgtgcggcatcggttccgactggcagctcgctgcacactgacaatttctagctcccctcgggtgaggaggctgagccgttgagcaaacagtccagtggattgtttgtaggcgaaggcgagccgatagtcgagcaatgaagagcacgagcatggcttgtccgcaattgcagaatgagtcccttgccgcaatagcccactacaatgggacatatgccgaatctcaagcaagtcatcgacgttctcgagaccctgtacccattgcgctacgccgaggaatgggatgagccgggtctcatcgtcggcgatctgagccacgacgtgcaccgcatcgtgttcgccgccgacccgacctccgccatcattgacaaggccatcgccaccggcgcggacctgctcatcacccatcacccgttgttcttccgttccgtacacgagacgagcggactcggtttccggggcgacatcgtccgcaggctctaccagcaaggctgcgggctgtgggtagggcacaccaatgccgacgctgcgtatcgcggcgtggggcaggcggcggccgactacttcggactcatcgaccagaaaccactcgtgccgattgacgatgcaaacgcctctcatccggtcggcttggggcgtgtgggtcgtttgccgaagcctgttgccctgaaggatttcgctcagcgtgtattcgacgaagtgtccgatcatggcatgaccaccgcgctcggcatccaggtatgcggcgattcggacacttttgttcagtatgtggccattctgcctggctccggtgactccctgttcaacgaggtgcgtgccaccggtgcggacgtgtacgtaaccagcgatttgcgtcaccacccggtgaccgacgccatcgaacaagcccggtatgaagcccgtatgagggcccaaggcatcatgctcggccatggaatggcgggggagagccatgtgcgtccctgcttcatcaacacccctcatgctgccatcgaatccatgtggttcaactacgcgatcgatgacgtgccagccgccatcgaacaagcgaccggagcaaggcctgaagtcgagtggttccacgacacgaccgatccatggacgctgtccattaccgcgcatcgggattaaggcgctatagtgacgtggcgaaaacgttttttccgaggagatgacatgtttgggggaagcaagcaggaacaactggagcatcggctcgaccataagctgaacgcctcctcggacggcatcgacatggacgtgcccgccaaagtgatcagtagcgaaaccgtttataccgggcgcatcttccacgtggacgacatgcgcatcgctctgaccgacaagcagggcaaggaacacgagatcggccgccaggtgctgcgtcacgccccctgtgtggtcatgctcgtgcacgacatgtccaccgaccgttacctcatcgaacgcgaataccgtgccggatcggacatgttcgcctacgggcttcccgccggtctcatggacgagggcgaggacatcatggacgcggccctgagggaactggccgaggaaaccggcgtggtgccggaccgtgacaccatgggtgttgacttcgtgggcgatttctactcgtccgaaggcatgaccgacgaactggcccacatcatggtgttgcatttgggcccgttcagacgggagcagcgccatttcgacgcggacgagcacgtggaatccgcgtggattccgtggagcgaccttgccgccacgcgcatcacctcatccaattcgatgatcgccatccagcatgaggcgttacgcagactcatcgccaggaactccgacaaagacaagccgtcgctgttctcctgacgttcaactccccggcacatcagtgacacaagaaagtgggatactgaaaactatgcagatcagacctggatcaatgtatccgctgggcgccagctatgacggcgccggtgtgaacttcgcgctgtactcacaggttgcgcagaaagtcgagctatgcctgttcgacgagcacgatgcggaaacgcgcatcgaaatgaccgaacagaactcatacgtatggcataactacatccccggcctccagcccggccaacgctacggctaccgcgtctacggtccctatgacccgatgcacggcctcagatgcaaccccaacaaactgctgctcgacccgtatgccaaggccatcgaaggcaacatcgacggcgacgaaagcctgttctcctactggttcaaaagcccggacgacacctcggcgatgaacgaccttgactcggccgcccacaccatgaagtcggccgtcatcaatccgtatttcgactggggcaacgaccagcacccctacatctcgtaccacgattcggtgatctacgaggcgcatgtgcgcggcatgaccaacctcaacatggacgtgccgccggacatccgcggcacctacgccggcctggcctatccgagcgtcatcgaatacctgaagaagctcggcgtcaccgccatcgaactcatgccgatccaccagttcgtcaacgactccttcctgcaggagaagggcctgtcgaactactggggctacaacaccatcggcttcttcgcgccgcacaacgcctactcctcctccggagagcgcggcgagcaggtcaacgaattcaagtccatggtcaaggcctaccatcacgccggcatggaggtcatcctcgacgtggtgtacaaccacaccgccgaaggcaaccatatgggccccaccctgagcttcaagggcatcgacaacgcctcctactaccgactggtggaaggcgaccagcagcactacttcgacaccaccggtaccggcaactcgctgcttatgcgctcgccgcacgcgctgcagttgattaccgattcgctgcgctactgggttaccgaaatgcacgtcgacggcttccgcttcgatctggccgccacgctggcacgccagttccaggaggtcgacaagctgtccgcgttcttcgacatcgtggagcaggacccgatcatctcgcgcgtgaagctgattgccgaaccgtgggatctgggctccggcggctatcaggtgggcggcttcccgtccagctggtccgaatggaatggccgctaccgcgacaccgtgcgcgacttctggcgctcgcagccctccacgctgcccgaattcgcctcgcgcctgatgggcagttccgatctgtatcaggtcaacggccgtcgaccggtggcgtccgtgaacttcatcaccgcgcatgacggtttcacaatgaacgacctggtcagctacaacgaaaagcacaacgaagccaatggcgagggcaatcgcgacggcgagagcaacaatcgctcttggaattgcggcgttgaaggcccgaccaatattccggacgtcaacgacttgcgtcagcgtcagatgcgcaacatgttcgccacgttgctgttcagccagggtatcccgatgatttgcggtggcgacgaagtggcccgcacccagcagggcaacaacaacgcctactgtcaggacaacgagatctcctggaccaactggcatcttgacaagggacgcaaggaactgctcgccttcgtttccaaactcattcatctgcgtttggatcatccggtgttgcaccgccgtcgcttcttcacaggccgtgagcccggcgacgattcgaacatgattccgcaggtcgaatggttcgaccacaccggttcgatcatggatatggacgactggcagaacacgcatgcgttctccatgatgatctatctgaacggttcggatattccggaggtagactggtacggcaaccggatggtcgacaatgacttcatcctgatcttcaacgcgcattacgagccgattatgttcaccctgccggatgagcgatacggccgcaaatggcagctggtcgtggatacgcacaacccgaatgggccggaactgagctatgaggcgggcttcatgatcaccgcccagtcccgcagcttccttatgctcatgagcgacaaaaagcccaagaagcccatgggcctataaccagaccgaatttaagctccctctgacgagggagctcccagtatagccgggtgagggagagaccgcagcaaagccgcgaacccctactcgcgccccttacgctcctccacgagccgagcatccccgaacgcaagtagatgctcgccggcaagcgggcgcggctggtcgagcagctcgcggaaatccaggattccatcgactttatcgacgccaaacagcgcttctacgacgacgtcctgtctggcgcaaccccatacgtaagcgtgctcatcccatccgcggcgctcgcaaaggagtcagaggaaccgggagaattgaagggggtggagaggaaataggttcgaccgagctgtttcttcctccgggatacaagcgcgaacaacggtttgttgtacccgcgcttggcgaacgggacatgcccttagactggaatcagcaagcgcacagcgagacgcgcgaatcgttttccgatgtcgggaggtagtcatgtcgatcggtcaggttatcaaagtcgtgcgcgaggagcgaggtcttacgcagtcgcagttcgcgcacgagctgttcgtcacccaacaagcgctttcccgctgggagaagggaacggcagagccgagcatcgacatgattcggctgatcagcacccgttttgaggtgccgatggcgaggcttatggaaatgccggacaatggtttttgccaaagttgtgccatgccgttttaccgcccggaagatcacggcaccgaaccggatggaacgcgaaacggagattattgcaactactgctatgacgacggcgtttttcttcaggactatgccaatagcgatgaattggtcgccgcgtgtgcgccgatgatggcggaatcctgccatatcagcgtcgaacaggccgaggattgcatgtc

SEQ ID NO: 1020 - DNA, 12482 bp, Unknown
  R117_24m  MAG No. k141_51656
ccgagaacaacaagaagtaccgttttgagaccctgcagctgcatgtgggccaggagcaggccgacccggccaccgactcccgtgcagtcccgatctacgccaccaccagctacgtcttccacaacttcgaccacgccgaggctcgcttcggtctcgctgacccgggcaacatctacggccgtttgaccaacaccacccagggtgtcttcgaggaccgcatcgccgcccttgaaggtggtaccgctggtctggccgtcgcttccggtgccgctgccgttgaatacgctgtgcgtaatatcacccagtccggtgaccacatcgtcgccgccaagaacatctacggtggaaccttcaacctgctgcgccacaccctgccgcgtgacggcatcaccaccaccttcgtttccgccgagaacccgcaggagttcgaggacgccatccaggagaacaccaagctcgtctacttcgagaccttcggcaacccgaacgccgacctgccggacttcgaggccatctccgaaatcgcccacaagcatcacctgccggtgatcgtggacaacaccttcgccactccgtacctgttccgcccgctggagcacggcgccgacgtggtggtcgagtccgccaccaagttcatcggcggccacggcaccaccctcggcggtgtgatcgtcgaaggcggcaagttcaactgggccgaggtgccgggcaagttcccgaccctgaccgagccggacccctcctaccacggcctgaacttctacgaggctctcggcggcaccgccttcgtgacccgtatccgcgccatcctgctgcgcgacaccggcgccaccctgtccccgttcgccgccttcctgctgctgcagggcaccgaaaccctgtccctgcgcgtcgagcgccacgtccagaacgcgctgaaggtcgtcgagtacctgcagaccgtgccggaagtcgagtccgtctcccacccgtccatcccgggccgtccggatcacgacctgtacgagaagtacttcccgaacggagcaggctccatcttcaccttcgatatcaagggcggaaaggatgcggctcgcgtcttcatcgacaatctgcacctgttctctctgcttgccaatgtggccgacgcaaagtccctcgtcatccacccggcttccactacgcactcccaggagaccttggaagagctcgaggaccagggcattcaccagggcaccatccgcctgtccatcggcaccgagaacatcgaggatatcctcgatgacctgaagggcggcttcgaagcccttcgcgcttccggcttggccaagtgaggtcgacaggagggttgacggcccgatgagaaggggcgcgatgctaatggggtgcatcgcgaatcatcgagccgcatggggtgccttccgcctgatcgcttgacccaaggagtagaaagctcgcactgacgtcatgcagtgcgggctttcttgcgtctgtatgcctcacactgtttgcgcagaggcatgaatagtgtgagacctgagacgacataatcctcaaggatgagggccggcgcgtggcccctagcccaattcagtctggcgcacgatggggcgcgccgttatttcttcataagttggaatcatcatccgggcataaggcccggcccaatatggagaggcattatgaacgtgcagaacccgtccgcatcgcgcggcatcgctattcaggccgtcgacttggtcaagaactacggcaccggcagcaatatggttcacgccctgcgtggcgtgaacgtgagtttcgaacgcggcaaattcaccgccatcatgggcccgtccggctccggcaaatccacgcttatgcacacgctcgccggcctcgactccgccacatccgggcatattcttttcggcggggcagacctgacccgcatggacgacaagcagctcaccttgctacgtcgccacaagatcggcttcatcttccaaagcttcaacctgttgcccatgttcaccgccgaacagaacatcctcatgccactgactctcgccggagacaagcccgaccacgcctggttcgacctgctcgtagaaaccttgggactcaagcaacggctcaaccatcgtccgaacgagctgtccggtggccagcagcagcgcgtggccatcgcccgcgcgctgattaccaagccgaagctggtgttcgctgacgagccgaccggcaacctcgactccgtttccagcgccgaagtgctcggcttcctgaagcgttcggtcaacgagcttggccaaaccatcgtcatggtcacgcacgatgcggtggccgcctcctacgccgaccgtgccatcgtattcgccgacggacagatcgtggccgatgaatcgaatcctactgccgaaacgatgaacgagctgcttatggccgaacgcgaacgcgccacgcgcactgccgtcaccagcacacgcgccgacacgctcgcccgtcttgccggcgtagaggatgtgcccaacctgcccatcaccgacgctccattgcccccagccgggagaaccggcaccatacgccatgcccgcgccgccgcacagcacactcgctgagccggaaagcgagagacaggatacccccatgttttccatcactctgaaacttatgaagaaaagcgccaggatgctgattccggcaggcatcgccatcctgatcggcactgcgttcatcgccgctaccttcctgttcggcaacgcgatgaacgatgcgcttgccgcccagaataccgcccagctcggcggcgcgaactacgtgatcagcccggatagcggcaaggacctgaccgataaggaccaggactacatctacacgcgcacggttaacgacttccagcttgaccgcatccgcgccaccaaaggcgtcaaggacgcacgtgccggctacgcgggttccgtgaccgtaacccgtggcaacaagcatgccagcagctacgtcatcaccaccgccacaaagcgcacgctgctgccggtcaccatcacgcaaggagaccagccggcggacagcaacgagatcgccctgaccaagtccgtagccgaccagctcggcgtcaaggtaggggaccgtgtgaccgtcaactcgcaggcggcgcagtatgcgggcaagaccggcgattcggccggtaataccggtgacgctggtgatgagtcggcccagaacgccgatggcacgagctcgcacgacggtgattccgatgccgcgtccggcgcgtccgccccatccgacggcaccgacacggccgccgactccggcatgaccgtgcgcgtggtcggcctcaccgacgacccgaacggtgcttacgcctactacggtggcgcttccgtgctttccgacaacgtcatcaccgcaatggccggcagcaacgatttcggcaacctgcctgtctacctcgtctatctcgacatcgacgatgccagcgacacggccgcggcatccaccgtaaaacaggtcagcacactgctccctaagcatttcagcgtgcaatcccgtgccgcgctcgtcgaggaatccgtcaaaagcatgagctcgggcgaaaccagcatcaccaccatcttcctgctgagcttcggcatgctcgccatgctggtcgcggcactcgtcatcgccaacaccttccaagtgctcgtggcacagcgccgccgcacactcgccctgctgcgcaccatcggcgcgaacaaaagccagctgtatgtctccgtgctgtttgaagccggtgtgctgggactgatcgcctccgcactgggagtgggcctgggcatcggactcatggccgcactatgccagtcgggcctgatgaaagccaccggtatgaccatgcgactggtactatccggtccggtgttcacggtgcctatggcattcggcatcattatgacggtgattgcctcgctaggctccgcgcgttccgctaccgccgtcaccccgctggaagcgttgcgacccatcgaactgaccgacacgcgacgggccggtgtggtccgcgccgtgattgctgtgctgctgattgcggccggtgcggcactgtgcgtgttctctgtatggcagatgtccgagaaaatcgccggacgtgattcaatggccgacaagcagtatccgctggtgttgctcgccgccatcatcggatgtgcattgatcttccttggactggtgctttccgccacgttctggctaccggtgctcatgcgcggcgtgggcgcgctggttgcactggccggtccgtccgccaaagtggcacatgcgaacattcagaagaacccgcgccgcgtggccgccaccggtgccgcactgcttatcggcgtgacgctggtctccaccatcgccaccggtgccgccagcgccaagcaaaccatgaacgaggcgctgaccacgcgctacagcgtcgacatgattgccgctggcaccgatatgactggcaaacaggccagtgaggcagccaaagtcaagggcgttcagagcagtatctacgcgccgacccgcatgatgaccatgaaggatgccgacggcaagagcctgagtgtgctggtcgtgggcgtggatggtgtcgacgcgctgcgcaaggtggtgcgctccgatttgtccggtgtgaccattgatggcgattccgtactgatgcccaagtattccgccgctacaggcaaggatattccgctggacaagagcgttacgttcacggctggagcggccgaagcacaagccgatgccgccaatggtccgtccggtaatgatgcgaacggcagcgccgaaaacggcaatggacaatccggcggcacacagacgctgacgctcaaaccgcggaaggtggactatcgccgcattgcctccaactacgccgcggtcgccttcgtggacgccagccacttcaccaacggtggaatcaaggccgacgggcatatcatgcttatgcgtattgacgccgagggcgcgggtgttgcgctgaacgacgtattcaccaacgtgcagaatgtgttctccgccagtgctggtgttaccgtgaccggtccggtggccggacgtacgcaatgggagaccatgatcaacggcatgatggcattgttggtcggtttgattgcggtggctgtgctcatcgccttggtcggcgtagcgaacacgctgagtctgtcggtgatcgaacgcacacgcgaatccgccaccttgcgtgccatcggcatgacgcgcggccaactgcggcgctcgctggcggtggaggcgttgctgctttcgctcgtctccggcgtggtgggagtggtattgggtaccctgttcggctggctcggatcctacatggtgtttagtttgtacggcgacaccgtgttcccgttcgaatgggccaccaacggtgtggtgctcggcgtcgccgcgctcgccgctctgctggccagcgtggcacccgcccgccgggccgtcaaaacgccaccagttgaagccttggccgaagcgtagagcaataagctccctcatcagagggagcttttttgttacaccagcccgttatcgtacgcgaagactacagcctgtacgcggtcacgggcgttgattttggcgaggatatgcgccacgtgggttttgacggtgggaagggagataaagagcttgtccgcgatctcctgattgctcagaccatgggcgatctccaccagcacctcgcgttcacggtcggtaagcagatccagttcgggatcggtgtatgctgggcgtgacgtattggaaccgtcggaagcggccccggcaggggaggggatgccggtcatcgagccggcaccgttgccggccgcaccgccagagacgccgacggcggaaccgtacacggcaccggagcgcgcgacatcgccggtcagcgaaccatgctgcgcgtaaccgtcctgcatcatcttttcgatgagtcgcttggtggcggaaggcgcgataatcgcattgccttggaatacagtacgaatcgaattgagcaacgtttccggttcggtgtccttgagcaggaagcccgaggcgccggcattgatggccgccatcacatactcgtccaaatcgaacgtcgtcagaatgattacgcgcgtcggccggtcgtcagccgattcggccgagacggtcgcgttgtccggcgcggcggagagcgaggtaatacggctcgtggcctcaatgccatccatgccgggcatgcgcacatccatcagcaccacgtcgggatgcagggattccgccaacgccacggcttgggagccgtcggacgcctgcccgaccacctccatatccggttgcgaaccaatgaccatggcaaaaccggcacgtaccagctcctggtcgtccgcaataatcacgcgaatgcttctgctctcgttcatgctctccactgtatccgtttcctatcggagcgccgctccataaacaccctgattgttccctgagttcttattgggcaagtctctcaccggggtaacgttcccgcgtgttgcatctgactatccaacgaagccgccggtcgcaactgcatatccggctgcacaccctcatgggcctcgtcgctgaacccggtttcacgcaacactctcaacagctgacgcatatgagccaatgcggcgcgcccccgagcaccaatcgcggcaaaagccgcttcaatctgcatactatcaggcgcaggttcggcgttgagcatcaccagtccctcgtcagcctgcgcaatcaccgattccagcgtggtcagtacttcggtttgcatcgccgcactaatacggttgcgctctaagttggccgccagcaccttttgccgctcctgctcggctcgcagcgcctcctcgcgtcgcaacagcaccagagcgtttgcgccacgcgaacggctccatcgagccatcgcaatgcaggcaaaaccgaccaacatgattcccgcgcccggcagcaagccggacaaaaccagcctccattttgagagcatggaactaccatcgggcaaaaacagatggaacagctgactgtatccattccacccagccatcaccttgatgcccgcaagccacgaatcggctgccagcgccacgctcacccagcgccaagcggactctcgtccatacaataccgccgaatacacggataccatcgcaaacatattgatggtcaaaatcgatggcaagaacaacagttgcacagcagacagcaccgccatcgccagcgcgctgccctctgggaagcggcgacggaacgccaaaggcgagagcataataatcgtcagcattatagtcggcacgcggttcggcgaatacggggcattgccgatcatttgcaaatcgccatacgtggcggaatcaaatagcgcaatcagcacgatagtggcgataacgtccatcagaagatagtgacgctcggtccactgcgcaaatcgacccacccagttcgactcacgcgtatctccctggtcgagtactttggggcgcgcccgatccatcaatcctcgtatacgcgagataacggttagcaccggatcctccgtatcggtgccagactgtggggcggcaggggagagcggaatcgtagccgccacaataaagccaccattcggccctgggccggcctgcacgctgccacccaacgactcaatgcgttcatgcataccaaccaatccgtatccgggcttatgaccgtctgctgcagacgtcgcgccacggccgttatcggatacggtaatcgacagcacatcgtttgaccagatttcatcgatggtggctttagcaccctcgcccgcatgtttgcgcgtattggtcagcgcttcctgcacaagacggaacacggcggtttccgcgtcggcggacagccggtcaggttgcgctttgccggtcatatgccgggacaccaccagatgaccgtcaaacagcgaatcgatgtcggcatatccggtactgccactcgcaccgaacacattgaacagacgctgcatatcatgctgcgcgcgttcggcctcatggcgaatcgtacccatcgtgtgcttggcgatggccagatcatgcgcacccgcataccggccgccatccgactgcacaataatcgtggagagcgtatgtgccaccacatcatgcatatcacgggcgatgcgtgcgcgttcggccagcgccgcgatgcgcgtctcctcggcctctttcgccacaatggaagcgttgcgctcgcgcatggccgccagcgtggcgttgcgcgctcgctgccacaaggccatgatgatgacgctcagcacgctcgattcgatgaacgccgcctccatgccgaagtcagcgagcatcttggccccgcagttgacggcgccgcttgcccccacgacgccggtgaccgccgggcatgtgggcatcgtgatggcatcggacagccagccgtcgcggatgacgcgcgaaccggaggaaggtccggcgaacagcggacccacgttgaaagacaccgaccagaccatcgccgcgaccagtcccatgacgaacgccgtgacgatgaaccgccaggaatgtcggggattgccatacagaatcaccgaatacaccatgatcagggcgtagaaatcgaaatacatgatcgccgggccgaacacaagatgcgtgatggtcagcgccacgaacagccaggccgccggctccgggcaatacctgcgcagcatcagcggcacgaagaccggcagcgaccacagcgtcatcgacgcctgagttgcgggaaacaatatgccgcccgtcgaatcagggctggtgacgccgatgaacggcacgcagccggcgatcagcgctgcggcgagcaacgtgtcccatagcagtgtgcgggtcgactcccgtgcgcaccatgccctcacgcgcgccataatctccataacgcgcaaggctagcgtgtccggagacgaaccggtatcactcttcaggaggatttatggactagagtcttgaaccatgacaatgctgagcaaatactacgtgcccggactggccatagaggaccattccatcgatgttccgctcgactggaccggccatgagccaggccaagcgttcgacggcgaaaccatcaaactgttctatcgcgtggtcaccgcgcccgaacacgtgcatgacgacctgcccctgctgattttcctgcaaggcggtcccggcggtgccggcccgcgcctcaacagcccgacctccgacggatggatcgaggaggccatcaggcacttccgggtgatcctgcccgaccagcgcggcaccggccgctcctcgcgcgtggacacgcacgccatggcccgcatcgccgccgcgcacgacgatgatgccgcggccggcgcacgagcccaagccgactacctgaagaagttccttgccgattccatcgtgcgtgacttcgaacatctgcgcctgaccgaattcggtggccgcaagtgggtgacgatgggccaaagctacggcggcttcctgaccctgaccacactgtccctgttcccggccggcgtaatcgccagcttcaccaccggcggcatcccgcacgtgccggccgacgccgctgaagtgtacgagcataccttcccgcgcatggtgcgcaagacgactcagttctacgagcgctacccacaggacaaggagcgcgtggccgccatcgccgacaagctgccgactactgcggaagtcgccgaattcgttggcaaactcaccgattccgtactgaatccgatggctggtaccgatgtggagcatcgacttggcgtgatcgccggcatggccgcccacggcttcccgctgatgccgaacggcgacccgctcaccgtcgaacgcttccagtgcttgggatccgactttggcatgaagccgagcttcgagcgtgtccattggattcttgacgacgccttccttgatggcgatggttccgcttctgccgactcgccgttgtctgacgaatttttgaccaaagtgatgaacgccacgtcgtcgcgcccactgtactggccgctgcaggaattcatctacgccaacggcgagcttgacgagcccattcgttgggccgcccagcgcgtgcgcgatggcaagcccgaattcggtgctgatgaacgcccgctcaacttcaccggcgaggccatgttcccgtggatgttcgaacaggagtctgcgttacgtccgttcaggccggccatggacctgcttatggaagacacgcgttttggcgtgatctacgacgaggaccagctggcgcgcaacgaagtgccgttgcaggccgccgtctatttcgacgatatgtacgtcgattccggcctgcagctcgacaccttgagccgggtgggcaacagccactactggaccaccaacgaattcgagcatgatggtctgcacggctcgctcgtcttcaagcatctctatgacgaagccctcaaccggggcgacctcgaagaactgttctgactcaaggaagcaagctccctctgatgatggagctctgtatacatgcacgaaaggaaaacgtatgactcagaacctcaccatcggttttatcggatatggcaacatggcccaggccatcgcccaaggcttcgttgacgcgggcgtggtcgccggcggccagatggttgcctgcgccgcccactacgacaagcttgagaagaccaccgccgaacttggcgtgcgtccgttgcacaatgcgctggaagtggtgacggccgccgacgtggtcatcatcgccatcaagccctaccagattgccgccgtcgtcaagccgctggccgacgaacttgccaagccgggcaagatcgtcgtctccatcgccgccggctggaatctcaagaagtaccaggacctgttcaccaccgaagacggcgaatccgtcgactcttcggacatccatatccagtgcaccattccgaacactccgatggccgtgggcaagggcgtgctcgtcaccgaatccgtcaacaccctgaccgacgacgaaaccgaaaccttcgagcagctattcggccccatcagcctcatcgagcgcgtggacaccgcgcatatgaacatcgccatggtggtggctggctgtgcgcccgccttcactgacatgtacatcgaggccttgggcgacgccggcgtgcagtacggtctgcagcgagccaccgcctaccggctcgccgccaagatggtcgaaggtgtcggcgcgctctacatggccactgaaacccatcccggtgccatgaaggacgccgtctgctcgcccggtggtaccaccatcaagggcgtcgcccagcttgaaaaggacgggttccgcggctcggtcatcgacgccgtagacgccatcgtcggctgactgccaatcagagttcgcgtatattcgcatatcacagtcaaggccttcgagccgtatgctcggaggcctttgcatatggccggttcaccacatgcacgttcaatgtgtccagcttctccctagactggaatcatgtctcttactatcggaatcgtcggactgcccaacgtcggcaagtccaccatgttcaacgcactgacccgcaacaacgtgctggccgaaaactacccgttcgccaccatcgagccgaacaccggcatcgtaccattgccggacaagcgtttgcccgtgctggccaagctggtccacaccgaaaaggtcgtgcccgccacggtgaccttcgtggacatcgccggcatcgtcaagggcgcctccgaaggcgaaggcctgggcaacaagttcctggccaacatccgcgaggcggacgcgatctgcgaggtcgtgcgcgccttcgaggacgacgacatcgtccacgtcaacggcaaggtggatccggccgacgacatcgacaccatcaacaccgagctgatcctcgccgacctgcagaccatcgaaaacgcgctgcccaagctggagaaggatctgaggggcaagaagatcgagccggcctacatggacgcagtcaagcaggcaaagaccatccttgaagccggcgagacgctcgacaaggccgcacgcgaaggccgcttcgacaaggattccgtctacgacctgcatctgatgaccgccaagccgttcatctacgtgttcaacgtggacgacaacgagctggccaacaaggacctgcaggctaagctcgccgcatccgtggccccggctccggccgtgttcctcaacgctcagttcgaggcagacctgaccgagctcgacgaggcggacgcccgcgaaatgctggccgacgctggtttgagcgagtccggtctcgaccaactggcccgcgtgggcttcgacatcctcggactgcagaccttcctgaccgcaggcgtcaaggaagtgcgcgcttggcagatccacaagggctggaccgccccgcaggccgccggcgtgattcacaccgacttcgaaaagggcttcatcaaggctgacatcgtctcctacgacgatttcgtggccgccgacggctccatggccaagatcaaggaggaaggcaagctccgtcaggagggccgcgactacgtcatggccgacggagatattgtgga

SEQ ID NO: 1021 - DNA, 19599 bp, Unknown
  R117_24m  MAG No. k141_52583
ctcctgggccatggtgtcacgctcacggatggtcacagcgtggtcctcgagggtgtcgaagtccacggtgatgcacagcggggtgccgatctcgtcctgacgacggtaacggcggccgatggcgccggactcgtcgtagtcgatcatccattcattgaagcgcaggtcgtcggccaggttctgggccacggtctgcagttcaggcttcttgctcagcggcagcacggcggccttgaccggggcgagacgcgggtcgagacgcagcacggtgcgcttgtcgacgccacccttggtgttcggggcctcgtccacatcgtaggcgtccacgaggaagcacatcagggaacgggtcagaccggcggccggctcgatgacatacggcacgtacttctcgccggtggcctggttgaagtagctcagatcctcgccggagtgcttggagtgggccgacagatcgaagtcggtgcggttggcgatgccttcgagctcgccccagtcggaaccctggaagccgaacttgtattcgatgtccacggtgcgcttggagtagtgggagagcttctccttcgggtgctcgtagtggcgcaggttctccggcttgacgccgaggtcgatgtaccagcgggtacgggcgtcgatccagtactggtgccattcctcatcggtgccgggcgtgacgaagaactccatctccatctgctcgaactcacgggtgcggaagatgaagttgcccggggtgatctcgttacggaaggacttacccatgttggcgatgccgaacggcggcttggaacgggaggaggtcatcacgttcttgaagtcgacgaagatgccctgtgcagtctccggacgcaggtagtgcaggctgttctcgtcctcgaccgggccgaggtgggtgcgcagcatcatgttgaagtcgcgcggttcggtccactggccacgggtgccgcagttcgggcagacgatgtccttcatgccgttttccggcatcttgtcgccgtgcttctcggcgtaggattcctcgagcttgtcggcgcggttgcgcttgtggcagttgaggcactcgacgagcggatcgttgaacacgctcacgtggccggacgccacccacacttcgggcggcagaatgatggaggtgtcgacaccgacgacatcaggacgggtgacgaccatggagcgccaccattcacgcttgatattgtccttgagagcgacgccgagggggccgtaatcccaagcggaacgggtgccgccgtaaatttcgccggcggggaacacgaagccgcgacgcttcgcaagggatacgacttcatcgagtttggactgagccacaatgcaccttctggtttgaacggtttggggtctaataacaaccgcttcaggatagccgtatacggtgacaggtcaggcggcattgtccggtatatgttccgcgtctcacgagcggccgttcgcagcgattcctatatcgcaacacctccatattgttcctgttgttttgcccttccccaatttgtaccactgacatcgcgttagcgtcacaaattcgggagatgttgctcggcggaggcgtccacatatcacgaatggacgggacgcgccagacctgacgacacgtatcgaacaaatccgtcacgataatgtccatgttggcgcatagcgtcggcactgtagtgcagggggactcgcatgtggttcgcgagttgagaaaggcctgagcctgacccttagaacctgttggttaagaccatcgtagggagcagtaaatgagcaatagtgcatcatcgtttgccgatgtgtccagcggttgtaccgccgggactccggttccagccgattcacccatccgcgacaatatcgccgatgccgttcgccgcgtacgcgagacgactccattggcccagtcattcaccaattttgtgaccatcaatttggtcgccaacgcgcaactggcggccggcggcactgcggccatgagtttcctgccggacgacgtgatcgaaaccgcgaaaatcgcgggcgcgaactacatcaacgtgggcacgctgctgccgttctataaggatgcgctgcccgaaatcgcccagcgactcaactacttggacaagccgtgggtgctcgacccggtggccgccggcatcggccacacccgcaccgccattcttcagaccttcaaggccgctcccccgaccatgattcgcgcgaacgcctccgaggtaatcgcgctggcgaacatgtgggggctcaataccgaaaccgtgggggacgcttccgagcaccgccccgccggagtggaatccgtcgacgacgtggagtccgcaaccggtgcggcggtggcgctggcacagtatctgaccgaacagcacgccaagcattcctcccatgacgcttccacccgctgtgcagtggctgtgtccggcatcgccgatctggtgaccgacggcgaaaccgtgtaccgactgccgggcggcagcgcgatgatgaccaagatcatcggtgcaggctgctcgctgggcggcgtggctgccacatatctggcggtttccgatccgttgaccgccgctctgtccgcatctctgctgtacaaccgcgcggcagagatagccgatacgacttcgcacgggccgggctcgttccaggtcgcgttccttgacgcgctgtggaatgttaccgccgaacaggtggcggaatccgagattttggtgcagtagtttcagttccctctgatgagggagctcataacagtttttcccaataagacttccacaagaaacaacaaaggtaggaataataatgagtaatgaatacccatacgcctccatgcgagacaacttcgacttgtccgcgtacttcgtggtggggccggaggactgcaaaggccgtccgctgaccgacgtggtggatcaggctctgcgcggcggcgcaaccttcatccaactgcgcgccaaggaggccgatgcctctgagctgaccgacatggcccgcgacatcgcgcagatcatcgaggacaatgagaagtccgattccgtggcctttgtgatcgacgaccgtgccgacgtggtgtggcaggcccgccgcaagggcatcaaggtggacggtgtgcatatcggccagaccgacatggagccgcgagaagcccgcgccctgctcggcgacgaggccatcgtgggtctgtcggctgagaccgaaagcctcgttcagctcattaacgagctgcccgacggctgcatcgactacattggcgccggccctctgcacgtctccaccaccaagcccgaggcttccgtgggcggcaacgacggctccggcaagacactggacgccgcccagatcaacaccatctgcgctgccagcgaattcccggtggtcgtgggcggcggcgtgaccgcagccgatatggccatgctcgccggcaccaaggccgccggctggttcgcggtctccgccatcgcgggtgccgagaacccggaagaggccgcgcgcaccatggtcgaaggctggaaggccgtccgcggcgacaagaagcacggctacgcgccgcgcgtcgtagcccacacccccgctgctgatactcaggctgctcaggaaggggccgcaaagcctggctccgaggccactgagaagaagttcaccaacgccaaggacgccaaggatgcccagaagctcgccaagcagcagcgcgtggacatcgccgcccgtggttccaagcagcgcgacaaggcgcacatccgcaagaccaagtccgtaccgttcacctatcagtatggttcctacgacctggaagtgccgtacaccgaaatcaagctgagcgacacgcccggcgtgggcccgaacccgccgttccacgactacaacaccgaaggccccaagtgcgacccgaaggaaggtttgaagcccctgcgtctcgactggatccgcgaccgcggcgacatcgaagactacgagggccgccgccgcaaccttgaggatgatggtaagcgcgccatcaagcgcggccgcgccaccaaggaatggcgtggacgcaagcatgagccgatgcgcgccaaggaccacccgatcacccagatgtggtacgcccgccacggcatcatcaccccggagatgcagtacgtggccacccgcgagaactgcgatgtggagctcgtgcgctccgagctggccgccggccgcgcggtgatgccctgcaacatcaaccaccccgaggccgagccgatgattatcggatccgccttcctgaccaagctcaacgccaacatgggcaactcggccgtcacctcctccatcgacgaggaagtggagaagctgacgtgggccaccaagtggggcgccgataccgtgatggacctgtccaccggtaacgacatccacaccacccgtgagtggattcttcgcaactcccccgtgccgatcggcactgtgccgatgtaccaggccctcgaaaaggtcgaggatgatgcctccaagctgagctgggagctgttccgcgacaccgtgatcgaacagtgcgagcagggtgtggattacatgaccatccacgccggtgtgctgctgcgttacgtgccgctgaccgccaaccgcgtgaccggcatcgtctcccgcggtggctccatcatggccgactggtgcctgcgccaccaccaggagagcttcctgtacacgcacttcgacgagctgtgcgacatcttcgccaagtacgacgtggcgttctctctgggcgatggcctgcgccccggctccctggccgacgcgaacgacgccgcgcagctttccgagctcatgactctgggcgagctgaccgagcgcgcctgggccaaggacgtgcaggtgatgatcgagggcccgggccacgtgccgttcgacaccgtgcgtatgaacatcgagctggagaaggccgtgtgccacaacgccccgttctacaccctcggaccgctgaccaccgataccgctccgggttacgaccacatcacctccgccatcggcgccaccgagatcggtcgttacggtaccgctatgctgtgctacgtgaccccgaaggaacacctcggcctgccgaacaaggatgatgtgaagcagggcgtgatcgcctacaagatcgcctgccacgccgcagacatcgccaagcaccacccgcacgcgatggatcgtgacaatgcgatttccaaggctcgcttcgagttccgttggctcgaccagttcaatctgtcctacgatccggacaccgccatcgccttccacgatgacaccctgcccgccgagccggccaagatggcgcacttctgctcgatgtgcggcccgaagttctgctcgatggccatctcccagaacatccgcaaggcattcggtggcgaggccgctcagcagcagatcgtgaaggaggctgctgcaggcatcgactccgaggcactggctaaggccaaggccaatgtcgataacggcgtggtgtccgccaacgtgctgagccccgaagaaatcctcgccggcatggatgcgatgagcgaaaagtacaccgcccaaggcggcaagctctactccaccgcccaggagtaaacctctctggctcccctctctgaggggagccaattattatgcccggtggtgtcttaattcgggacgacgctcgactcgctcaaaggcggtgacgaggtcggcagcacggatcgcgccgcggcggtccttggcggccaccagagcggcctcggtccagatggcgcacacttcggcgccgctccagccttcggtccgctgtgcgatatccgccaacggcagttcgccctcgattgacagcgaacgggcctgcacctgcaaaatacccaaacggtcgcgctcagacggcatcgggaaaggaatctgccagtcgaaacggcccggacgcaacaaagcgggatccacgtcctcaatacgattggtcgcagcgaccaccacaacattgcccttggactcgaaaccatccatcaacgtcagcaactgcgccaccaagcgcttgccgacgccattggtatcgttctcgcgcgaggacgcaatcgaatcgatctcatcaaagaagatgatggcgcgcttgtccgcctgcgcggcggcgaaaatcatgcgcagcgtttcctcactatcgcccacatacttgctcacgatggtcgggccggacaccagatagaactgcgcgtccgccacattggcgatgatgcgggccagatgcgttttgccggtgcccggagcaccggtgaagatcacgcccttgatgggcttggcaccgatcgcacgcatctgcgcactgttgcccagctgcgtttcgataagctccttggcgcgcgtgatcacctgctcataaccgccgaacgaatcgaaggtaagcgacggatcgctgcccggcgtgatgcggtactgcttgatgtcgtcatcgtgatcggattcgcctgggcggatggccgtgggccacagcactcgttcgatgccgaacaggtcggtgaactgcacggtgttgccgggcatgatcgaattcgggtaatcgccttcaagcagttcgaggccgtcggaagtctccaggaccacgccttcgttgagcgcacggcgcacgatgcccacacggggcttcaacggccacacatcatgcggcactttacgatagaaatccgtgccgacgagcaacacgtcgcccacatcgaacacctcctgacgcggaaatgtgagctgtgtggtgtgcccattaggcattacgccaaaatatgcggtgcgttcatcgtcaaaaccggtgatgcgtaccaagacgccgtcacggcgcagtacatcgttatcagccatgtcccctcccgaacatttcatgaatcaatcgcaatcagcaaaccctcccatctcaccacaggagcggcaaaacatcaaggaaaaccgctccgaaaaacatcatgggccccacttagaatgaacactatggcacagattgcaacatctacacttcccgctgttctcgcgatctccggctccgactcgtccggtggtgccggcatgcaggccgatctgaagaccatgctggcttgcggcgtgttcggcatgagcgccatcaccgcgctcaccgcacagaacaccaccggcgtgcgttccattcaggacaccaaaccggacattctcgccgaccagatcaacatggtgtttgaggatattccgccggtcgcggtgaaaatcggcatggtgtctgccactgacatcatcgacgtcattgctgaacgactcaccttccatcacgccacgaacatcgtgctcgacccggttatggtggccacttccggtgccaagctcatcagtgacgatgccattgcggccttgaccggcaagctgttcccgatggctacggtcgtgactccgaacattcccgaggccgaagtactgaccgatacgctgattcgcgatcaggaggatatggaggccgccgcccaccgcatcgtggagcgttacggctgtgccgcgctggtcaagggtggtcatggcaccgaggatgccaacgatgtgcttgccgagacggatggaaccgtgacctggtttgatggcgcgcgtatcaagaatccgaacacgcacggcaccggatgcacgctgagctccgccatcgcctcgtatctggcgcttggcgacacgctgtccaaagccatcaagcatgcgaagaagtatctgaccggtgcgctgaagacccagctgaatctcggccacggctccggcccgatggatcatttctggaagtatcgctgacataagtgtggctgttaagctccctttgccaggggagcttaacactactgaaaaaggagaatcatggttcttgaccgtaatgccgttactcaggaagtgccgatcgacccggaaaccggcaaaccgtacctcaacaccgtggcagccatccaggtgtcggccaatggcgtgggctccgaggtttcaccatacgtggctcaggccgtcgaagtgattcgcgaatccgccctgccgcaggaaaccaacgccctgttcaccaacgtggaaggcaatctggacgacgtgctcaaggtggccggtgaggccgccaagaagctcgccgagcagggctaccgcacttctctggtgctgcacatggatatccgtcccggcttcaccggccagctgaccgaaaagcccaagctggtggatgagatcctcgccgacaagcaggcgaaatagcaaagcatcgcttccaccagcaagggcatgctttgttattacacgtttcatggggcggtaactcacccatagggcggtaaatatctcatggggcggtaaaaccctcatggggcggtaggcgaaaacggctctattctgcggaaaggcaaaatccgctaaccgccccatgggccaaataccgccccatgagtgttttaccgccccatgggaatcacggttttgccttctttcaacggggtaagagcgtaagtggggcatatataggagtgttacaaactctgttatcgttcacaatgtgaccgcaacgcggcgtgccacaagatcgaacctatagttaagccccatgtagtgagctatctcacaacgattggctcgctacgtggaattcaagacttggactgcaaacgtcgttcatcccacacaatgggagggcgaacggaacacgcagtccaatcaagagttcgctcgccgcaacatcattgagcagttgcacgcgggcaggtttgcaagaagagggctcaaatatgactgctgctgaacagcagatttccggcaatcccgcggctatggaaagcgcacaagcacgtaccaccgtgacggatcaagccatggttcaggatattatctcgcgcgtggatcgcgcacatgaaaccccgatgttccatcgcatcgtggcgctggtcgccgctggcatgctgatggacagcatcgacgtatatattggcagcgccgttgcctccagcgcgttggccacacactggtccaccgttgcgcaaaattccacctttatgtccgcaggcttcctgggtctgctggtcggttcgctgctggccggcttcgtcggtgacctgaagggccgccgcgtggcttaccaaatcaacctgctgctgtttggcggcttcaccttcctcggcgcattcgccccgaacatggccgtgctgtccctgtgccgtctgggtgccggcctgggcctcggcgctgaaatcgtcaccggcttcgccatggtcaacgagttcgcaccgatgaaccgccgtggccactggtgcgcgattgtctcgctcgtggccaactgcggtgtgccgatcgctatgctgctgtgtgcatggatcatcccccgctggtcctggcgtccgctgttcgtggccatcggtctgggggccgccatcatctggtggctgcgccgcgacatccccgaatccccgcgttggctcgccgtgcacggccgttacgatgaggccgacgccatcgtcaagcagcttgaggccaacggctccgaactgatcgacgcagccgccaaggccgacaccagcgacaccagcgacacccgcaacgccggcggccgttcgctcggcatctgcctgcttgtggctgtggttgctgtggccgccacgaacgtgtgctcctacgccttcacttcttgggttccgacgattctggtcaagcgtggtattaacctgtccagctcgctgctcacctccacggcgatgatgctcggtgccccggtcggctgtctgattggctctctgcttatcgaccgcatcggccgcaagcgcacgattgtgccggccttcctgttcactggcgtgttcggtttaatgtatgccttccagacctctaccgtgagcgcaattatcgttggcttcctgctcatgatgtgcctgtacgtgcttatggcttccgtggtggctgtgtacgctccggaactgttcgccaccaaggttcgcttccgttgcgtcggcttcgcgaacgccgtggccaagctgctcaatgtgttgatgcctatggtggtgggttggatgcttacctcgcttggtgccacgtccatctttgtggccatcagcgcaattgctattgcatcgatgctgattgtcggcttctttggcgcggagactgcgcagaagtcggttgggtgatcggtttcctcacagtggaataactgctgataatgtccattcggcgtcttgcgtggtgatatgcagggcgccgttttgttgttctagtaattgtcggtaacggttgagaccggtaccggtggataggtccgcactgccatccgcatccgaatccgatgacgtgcgggccatgtcgatgcaggcgatgcggacggtgtccagtccgatgccaatcgtcattacatagcccgcttccgggtcggcatgtttggcgatgttgccgtacagttcctccagcagcccggcgatcaggccactccgaccggctgcgccatgagcaccggaaataatcgtctgaccttcaaagccaagctctgataatcggcggtcaccattgctcgcaacatcacgaatttgctcggctagcgggcaatcagcgtctgtgatgccacatgcaatgccagaagcggcatcaacggtcgaatcatgcggagtcactgcactgtgcgccgcttctcccctgccttcaataacatcaatgacctgatgcgtgcgatccaatgcgcccatagccacgctacgcagttcgcgtaattcttcttcagaaggggtcttgccatcggcaatatccttgtcgaatcgcaaaatcaggtatgccaaatcattggatacgtaatcgtgaatgtcctgagctgtgcgttcctgctgacggcggtgagccaactccgctcgaaccaagctgcgttcgtgattccatcgcgccgccatgccaccaagcatgaagccaataaacaacacggccactggcatcacaccatagagggcaatcgcaccaagaatcacttgcccagtgcgatgctcggcagaagaaccgctcgattcataggcgcttccggtgaagtcgcttcccgactgccctgcgctgtcagacccactggatgaagagccaccatcagcagcgccaccatcagcaacactaccgtctagggcactactactcgccgcgccatccgcagaaccgctcatcgtgtctgagccgccatcaagccaaggaatggccacgccaccacgcgacaacatccacaccacaacggcaatgccggcaaccgccagcgccaatcgcttatcggcgtatccggcaatacccaccgccaataacacggcgagcattgcacccgacggcatccagatcggactcatgcacaacactatccaagccaccgctaccgccacgcatccggtgaccggacgaaacgccatccaccccacaatggcaacgaatatgaactccgcaaggcagtccgccgccgagacactgtcagcagccaagcccgccatggtttccatcgtgcatatcaaggcaacaaccagtatggcaatcaacagccatgcattgcgaacaccgctatccagctcggccaatcggtgtcgtaacgctttcatagcagttcctttcctaccatccatgccgttgcacataccgcccatgccaactcttaaatctcatgccgtttcacgcagattgatatggcatgagcgcgactgcgagcgccgagtttggcgagtgcgcggcgttcaaaagtcgccacagtggccacgctgatgcccaatcgctcggcgatttccttggtggtcgacccatccgcatacatacgcagggtgtcgcgttctttgccggaaagcgcgccacggtgcacgtatgacgtatcttcgagcaccgcgtaggcggttgcggcatccatgaaggacagcgaattaccgctcccctcatctcccagtaccagctcattggtcgacaatccttgggctgcattgcgaatagcgagcgcaatgccgttcaaatcggttttaccaaccaaggcctgcgccccgcagcgagccgcctcgtcgtgaaatgacgcgagcgcgtatgaggtgacacccaccagcccaacctcgggtgttttggtacgaatcgcacgacagacttcggtaccgggcacgtcgcccatagacatatccgtaaccagcacgtcaggccgcttggtggggctcaggcatcggctgatggccacggcacccaaatcgcaggtccatatcacggcaaaatcgctggacatgcgctcgattagcgcgccgaacactttcagcgcatacgggtcattgtccacaatgccgatgcgtatgttgcggttgcgcgcttctcccattacattcaccccttcagtgtgcccgacgccgaactgctccgtcctgacatgtcatggtcactatgacaactatcattccacattccctgcgcgatttacgatggaatcatcatcaatccttgacaaggcggtaaaggaggacggcaatgaaccgtgcacaagcactcagcaagctcaacaggagcgatatgcgcaatgccgccgccgagcgcgggacgcaacgaatattcgcgtggaaccgcgcgcattggattggcatggttgtactgatagcggtgttgttgctgctgcagtggagctcatcaatgtatctcatgcccgacgaggtccttgacagggctgccaaaaacctgttcgtatggttccccggtatggttctgcactggccattggtgttgggaatcaccaacctgatactcggttcgatacgatccggcagtctgtctttcccattggcgagcgcaatcatcggaccgctggcattcggctgtaccaatcttcgcttacggccggggttcccataccgttcctgggctcagtggtggaagctaatgcacgctgaaagcggccatcagctattggttcattcgttgatcggctcggccatgctgttgatctgttatacggccgttgcgttcatctgctatgcaatcggacgctacggtctgcgcgaattgtttgtggatccgaatccgcagacggcgagcggacgactgctcacatggattcgtcaggatgcgattcgcttcggctgctggctggcgacggcaatcatgtacggcttgctattggcgctgaccttacggggcggcatggctgcgatggccgccgcgttgctaatcaattttgtgattccgcccgccttgctggtcatcaacggcatctacgcgctacgcccggcctcactgacgtatccgtggaaaagcctgctgttcccgttggcgtgcacactggtacctgcgccgatgctcatggcgctcatcacggtgtatgaagacacgtgcccgataggaagtacctgcacgctgatcggcgaccgatacctctcctggggctcgatggatcaggtcttgcatttcgtcatcgtgttcgccgtggcgagcttcctcggattcggcgtggtgtgggccgtgcggtggattgtggctcgtcgcacaaaataagagagaccaaaatatactggaatcaggggcttcgtgcaatgatgcacgagccgatccaagcaaaggggctgaccatgagcgagaaactgatggaacagtaccggttgcgcaaacaacgcaaacgccgtaacgcttgtatcgccgccatcgtgacagtagtgcttgtccttgccgtcgccggcggcgtatggtggacggccggcgatggcagcgtactggttcgcaatatgttcaagccgaaggccacgcctgccacgcagccggtagtcgacagcaccgcagccttcgcctaccgcaccgcaccggaattcctggcgatggaaaccggcgaccgagacaccggcaatgtgaactactcccctgcttcgatgtggatggtgttggccatcgccgcgcagggcgccaatggcacgacccgctcgcaactgaatgagctgctgggctccggttcgctggccgacagcgactaccaatcgctgctgagttcgatcaacgggcaatattcgggggcgaaatccgagatgagcgccgcgaactcgctgtggatcgataacgactactcccttgccagcgattaccaatccaccgtcaagaagatattcgaggccgaagtcaccacgctaccgttcgacgatcaggccgccgccaagatgtccgattggattgccaaacatacgaatggttcgctcaagccgaagatcacgctgcgtgaccgtgaagtcctgtccatcatcaacaccgtctatgcggatggccgctggaaggatccgttcgaagagcagtccaccggcgacggcaccttccacggcgaagccggagatgctcaggtgccgatgatgcaccggaccttcagccaaatgacttacagccatgatgagtacaacacttggcagcgggtggagattccattcgacaacagcggcaatctggccatcgtgctgccggccaaagggcatttcgacgagctggccggcaatgccgagaaactcggatgggcgttcggcacgtgttcgtcggcatcccctggcgaggacgcaatgggttgcaccgcggacagtctgcccggatggggcgtctccgtcaactcggccacggtgaacgtctcgctgccacgattcaccgtcgacagcatgttcgactcggaagccaccatcaaggcattcgaaaaactgggggtgaccgatgcgttcagtgcaggcgacgccgacttcaccaagatggtcgacaccgattcgcacggcgagaatctgtatatcggttcgattctgcaaggcacgcgcatcgaggtgaacgaggccggcgccaaggtcatgtccttcaccaaagccgacgcagacttcactagcgcgccggtggacaacatcgagttcacggtggatcgcccattcctgtattcgtacgtcaccccggacggcataccattattcatcggtgcggtgcgcaacctcggcggagtcggtggagaacactgatactttcccgacagtccgtcaattagggtgtatcgtttgacgcatggctacgatgaaggaaatcgcgaacaaggcgggggtttccgtctctacggtgtcgctggtgctcaacggacgcgacgaggggcgcgtaaagtccgaaattgcggacaatgtgcgcgccatcgccaccaagctcggctaccggtcgaatccgctggccagttcgctgcgtacaggcaagacgcacatcctcggtttcatcagtgaggaggtggccaccaccccgtacgccggcggtatgattctgggcgcgcagaccgccgcaagccagttcggctatatgctcatcaccgtgagcaccgacggtgagaacagcgagagcgaggaaatcgccgcactcaagcgatacggcaccgacggtttcctgtacgccaagatgtcgaaccgcatcacccatgcgccttcttcgctggccaagacgccactggtgttggtggatgccaccgactcgcttggcaaaatcccgagcgtggaaccggacgagttccgaatcggctacgacgccaccaccagattggttaaggccggatgcgcacgtatcgcctatgtgggttgctcggaaccgatgattgcgcaggatggtcgtttggaaggctatcaggcggcgctcagggacgcctgcctcgactatgacgatcgtctggtcgtcaatgtgctcaataacgggccggcactgaccgcagtcagcgatttgttcgacgccgagcatccggacggattcttctgcttcaacgatgcccgcgcctggtatgtgtacgagtgcgccgcacgccgaggactcacggtcggcaaggacatctccgtgatcggcgtggacaaccatcgcgtgttcgccgaaacgctggaaccgatgctcaccactgtggaactgccgcatttcgagatgggctactgggccgtggccaagctggtgtcaattatcgaaggacgctcgatggacgacgtctcacggccagcgaccaccgctcccctgccgccgatcgacgcgccgattccggcgaagatccactgcacgctgatcgaaaaggcctcggtgaagtaaccgaggcccacgcgatttctcaaggcctccgttcagcacggaggcctttttgcgtctcgaacgggtacgacacgccgatgacgtcacgacatccgccggactgatacgatgcccgcatcgtcacagcgacgcacggcgaccgggaggtgcatggtgagaacatacgagaacgcgcaggagctcaaagaggagatcagtgcggcgttccgcaaatacactgcggagttcgacgatattccggaagccctgaaagacaagcgcatcgacgaggtcgagaggaccccggcggaaaacctcgcctatcaggtcggttggaccaccctgctgctgcagtgggaggatcgcgagcggaggggccttccggtgcgaacaccgtcggatgagttcaagtggaaccagctcggaaagctgtaccggtggttcaacgacacctacgcccacctttcgctgcgggagctggagggcatgttgaccgacaacgtcgacgccatatatatgatgatcgatgcgatgagcgaggacgagctgttcaagccgcatatgaggcaatgggccgacgacgccaccaaaacggtggtatgggaagtgtacaggttcattcatgtgaacaccgtcgccccgttcggatcgttcaggacgaagatccgcaagtggaagcggatggccctataggttcggcgcggcccgcaacccctttgtccagttcgtctacgccccgatgatcaacgccggaggcgtcacccgctgggctggtgcactgattggctccatcgtcctgtccgccggcttcatggcagcctgctccctgtccgaggctgtcaccgaacgctactcccgtaagttcaacttcgaatacggccagtcccgcgcctggggctccttcagctacgccatcgtggccctgtgcgccggcttcctgttcaacatcagcccgatgatcaacttctggatcggcaccgcctgcggcgtcggcatgctgctcatctacctgttctgggttccggccgagcagaaggaagagctcaagaaggaagccgatccgaacgccgagaagaccaacccctccttcaaggagatggtcggcgtgctcaagatgccgaccctgtgggtgctcatcgtcttcatgctcctgaccaacaccttctacaccgacaagcagctgcgtcagatggaagctgccaaggcctgaaaggacacaccatgactgacttcactcccgaaacccctgttctcacccccatccgcgaccacgctgctgaactggcaaaagccgaagccggcgtggccgagatggccgccgaacgcaacaaccgctggtacccgaagttccacatcacatccaacggcggttggatcaacgatccgaacggcctgtgcttctataagggccgctggcacgtgttctaccagctgcacccgtacggcacccagtggggtccgatgcactggggacacgtctcctccaccgacatgctcaactggaagcgtgagccaatcatgttcgccccgacccttgaagaggagaaggacggcgtattctccggttccgcagtaatcggcgacgacggcgaactcaagttttactacaccggccaccgttgggccaacggcgtcgacaatactggcggcgactggcaggtgcagatgatcgccgagccggataacgacgagttgaccagcgccaccaagcgcggcatgatcatcgactgcccgctcgacaaggtcgatcaccactaccgtgatccgaaggtgtggaagaccggcgacaagtggtacatgaccttcggtgtttcctccgctgaaaagcgcggccagatgtggctgttctcctccgatgacatggttcgttggacctacgagcgcgtgctgttcgaacacccggatccgaacgtcttcatgcttgaatgcccggacttcttcccgatcaaggacgccgaaggcaacgagaagtgggttatcggcttctctgccatgggcaccaaggcttccggctttatgaaccgcaacgtttccaatgccggctacatgatcggcacgtggactccgggggaggcgttccagccggaaaccgagttccgcctgtgggattgcggccacaactattacgctccgcagtcgttcaacgacggcgaacgccagatcgtatacggctggatgagcccgttcgttgagccgattccgatgcaggatgacggctggtgcggcaacatgacccttccgcgtgagatcacgctggatgccgacggcgatctacacaccgctccggttgccgaaatggagggcttgcgtgaaaacaccaccgatttcggtgcaatctcacttggtgtcaatggcgagcagaccattgctgatgatgctgaagccgtggaaatcgaaatggccatcgatctcaacgcctccactgcggaacgtgctggtctgaagattcatgcgaccgaagatggcgcttacacgtacgtggcgttcgacgatcagatcggccgtgtggtaatcgaccgtcaggccgcagcccagggtgatcgcggctaccgtaccgccccgctttccaccgaggaactggcttccggcgaactcaagctgcgcgtgtttgtggatcgcggctgcgtggaagtgtatgtgaacgacggccaccagaccatgagctccttcagctacgcttccgaaggtccgcgcgccatcaagcttgttgccgaatccggcacgcttgagatcaagtccttgaagctccacaccatgaagtccatcggactggagtgaagctgattcaaggcagtagcaaggggtaaatagtaaggtgggttccgtgtcgggcaagatacggaacccaccttgcgttatacggcaagttatgacttacgtgttggtttgaaaaacgattttcgtttcagaacgtggtttagggagtgctttatactggcaccccggtaatgaacttttctgaccggaacgcgggcaggctcctcaccttactgatttctcgccaccggtcacgtgcgcgcccactatggcgcagaaagcaaggtgaacgatggcggtttcgcacgttcaacacatacactctgagcatactcagtcagtgatctcacgatttttctccactgttttgagtatctgcaagcgcagcgttcccacagttatcgcagtagtgttgctgctggtggtttgggaggcgtgggttcgtatcgacaatgtgcccagcaccatgattgccgcgccgagcgaaatcgcgcaggccaccgttgaaacttggtcgacgttatggcctgccacccaagttaccctgattgaaggcaccgtcggttttctgttcgccgtactgttcggcattcttatcggcatattgttgtactgttcgcgcattgcgaacgccgcattgttcccgttgctttcggccgcgcagaccatgccgttgatttccatcgctcccctgttcttgatttggttcggttttgaaatttccggaaaaatcgtgatcgtaacagtattcggcttattcccgattgcagtgcaaacgattcgcggtcttgaagcggtcccccagttttattcggatgttgcgctgacttgtggtgccacgaaaacgtggacactgtggcatgtgaagttgcgtgttgccgctcgtcagattta

SEQ ID NO: 1022 - DNA, 2842 bp, Unknown
  R117_24m  MAG No. k141_53237
ccgacgaatttgccgccggtcaggcctttggtcggatcgaactcgcggaaggcgagctggatgccccacatcggcacgtaggagaacagtcccacgaagaacaatgccggagcggaaagaatccacaactgccagtagcgacgtaaatggtcggcgatgcgatcgagcagacctggtttcttgcggtcgggagccgcttccatcgccacggtccgtgcagcaacgccttgcgatgtttgtgcactcatgttggtctccaatttaggatgattgctagagaacaaaagtgcggggtccggcggcagtcacgggagagaaacgaacccgtgcgatggaccccgcggtattacttggctacttggtgtacttgtcgtaccacttctgccaaatcttgatgttggcgtcgaggccgagggtcggttcggacaccttcttcacgtaggcatcccattccttgtcgatgccgcccttctggacccacttcgcgatctggttgttcgcgtagttggagatggcggtgttgttgttctgcagggtgttggaatcctcggtattcgggcgcacgtaaatcggtacgacatccttgacgccgtcgacgcggttgcgcgcctcacgaatggccaagtcggacgcagtgacctggtcggcgttggtgtcgttgaccatcttcacatcgtcgcggatccagccaccgaagcggtcctgcagggcgacggcgcgggtatcaggatattcggcgtaggctttagccttgtcgatggtgtactggtggtcgccgtcatcggagacgatatccggaatagagccgaagaaaccggccacggaaagcttctcgccatacatggcgtcgatgaccttgtagatggcgtcttggttggcggcgttcgggttgacggtcaggccagaaccggagtaggcccagcggcaggcgtcctgggaataatcccacttgacctgggagtcgggcgtggaggcgtccttcttcagcggcggcagggtgacgtactggtcgccgagcttgtcgccgtattcggcgtagttggaccaaccgaaggagacgccggtcagcgcggtcttgccgtcactgacggtctgtgaagcgtattgcgaggcgtcgcgggtgagcacatccttcgggataagtcccttggccatgagtccgtgcaggtaggagacgacgtccttgagcgcgtcggaggtgtaatagctcttaaccttgccgttgtccacatagtagccctgttcggaagcgccgccgcccatgaaggaggtgaccacgccttcggagttcatcagcgtcagggggctccacaggccgaagccgaggctgcggatgttcatcggcacctcatcagccttgccattgccgttcggatcctgggtcttgaatgcatcgagcacgttctcgagctcgtcccaagtggtcggcatctggagtcccagcttgtccagccaagtcttgttgatgaacatgtgagtgccggaaacctcgtaacccttgccgcggtcggagggcagcatggcgatcttggtgccatcggtaacgtacttcgcggcacccggctgggccttgaggaacttcttgacgttcggcatcttgtccagatgcggcttgagatcctcgaaataggtgctgtacttggccgcatccaccatgctaaacaagctcaagccaatgtccgggaattcaccggcggccatcttggcgctcttctgctggccccacgcgttgtcggagacttcctgccacttgatggtgcagtcgcaggcggcttccagatccttggtgtactgggtgtcctgcatcggatggtcggtcacgttgcgacgaaccagaatgttgacaatcggcttgccattctcatctgtggtggcctgcttgttgccgcaggcggcaagcgccgtggccatagtcgcaaccgcagcgattgatgccaacaggcgaacactccttcgtgccatgattaggctccttcttccttgatgtttcctcctcgtaccgatgtaagacgcacctgtacgagcccgtcagccacttgctttgtgactgtttctttgcggtggtcaacactataaatcgttaatcgtttaatgtcaaacgttaatcgtttatctcaatagttaacactctcattgaccagtccacccagcgccgcaaacgtaaacttcggctccatactgccgttctcgcagaacaccggaatcacccacatcgcgacacgccgttactcgtataacgtatctttttccatcaaatacacgtacaacccgtccgttgtacgcacaaaagcgtagccgaacatgacggccaccaagtcggccgctacttacaaaaggtgctcccctccttcaggaggaagaagaagcgcacggatacgatcagacagcaccaaaccaaacagtagccgcacctgggagccaggatgaagcattcggcatcgtgcctgctggccatcgtcgtgggatacgctgtgcaccatctggcccacaagtaaatcatgcaaaaacgcgcgttggcgcacgtcctttttcatggacgtgcgccaacgcgcgtttttgcatcagcttccgagatcaggcctcgcggctcgcggaagccgcagcgaacgccggcaaggcgcgaggtgcgttgaaaccttccttttcgaagcggtcagcaatcttctgtgcaatctcgtggccctggcccttatcaaccaacgcgatgatggagccgccgaagccgccgccggtcatacgcgcaccgtaggcgccgttcttgcgggccacgtccacggcgatgtccagctcggggacggtgacctcgtagtcggcggccagcgaatcgtgggaagcgttgaac

SEQ ID NO: 1023 - DNA, 6114 bp, Unknown
  R117_24m  MAG No. k141_53756
ccgcaagtattcgagagtcgccagttcggtcgatttcaatgacaatggtgtggacgattacgcggatatcgtggcgggtgcgcgcaaggacgccgaaaaccatccggcttacgattccggctactatcagggcggctatccgccggccgatcgcggggcgtgcaccgtacgtgattcacaacatggcgcagcggcagcgcgaaaacgactacttcgccttcaagaagcacatgacggtcaccgggcactaccgtttcgacgcttcgaaagtgctgtagagcgtactcagggcttggcggtgacggtcggagcggcgtcgccattgccggctttggctccggctgcatcagctgaatcggtgccggccgcactggcgttagcactatcgtcagcgttggcaccgccggctttggccttggcgtcagccgcgctcccgccatcgatcaccagtcgcagataatcgcggtcggcggacttgcggcgcggcacgaaccgactgatgatggagtttttcttgccgcggttcttcacgtacaggaagccgaacacggagaacacgaccgcgccgatgaagttgacgataagatcctccatcgtgtcgatcagaccgatgtcgaggtagccaccgaggcccaagtcttggccattgaccgtgacctgggtgatgtcgttgatgcgaatcgcatggttggtgtgcgtggggtcgagcatcaccgagctgatggaatgcacgatggcgtctttctgcatgtcgaatccgaacaactggtccatgccgaattcgaagaactcccagatcacgccgatggtcatggagaagcagaaggagacgatcgccagatacaggggcgaaagctcgaacttcacccggtcggaccggttgagcaggtcgaccagcgagaagccgatcgccgcggcgaggaagccgttcatcgtgtgcaacaccgtgtcccagaacgggaagatctcatagaacgaactgatctcgccaagaatctcggacgagaacacgaacaccagcacgatgacttccagcgccgaaggcagctcgatgcggaactgcacctggatgaacgccggcgccaacagcaacagcaacgtcaggatgcacaggaacacattttcgtagtcgccgttaaagaactggagtattgccatggcgagcaccagcatgcgcagcaccacatagaccgcgaatgagcttttgtgttcgcggatttccatgcctacggctcggctcatggtcttccagcgtacgcgccaggacggtttgcgttgtgcgtcgtgctgttgtgaccgtttccgggtcattcttgcctctttctcgcattgttctcgcgccagtctatccgaacctgcttacaggcaatcggcaagaacgggcgatagtctggccgcatgaaccgaatggaaaccgatgctgcctcgattgtggaccgcacgaatcatgcggcgatgctcgataggacattgtgccggcggcacgccaccgcgtgtgctgattgcagtgctcgccgtgctgctgtgccgccgtatgggcatgattacaccgctgatcgtggctcatggcatgtatgacgtctccgccgccatgaccaatctgaccggaatcgccggctcctcatggtcactggtcgtagggctggcaatcatggccatgccggtggtttgggctatcgtgaggtgtgcgagataggctttgtaccggttggcagcaaatcaaaccagcgagacaacggaatgaacgaagcgaaaggaacggtatctgatgactccgattgaattgtcaacccgacgccgggttacgggactgacttcggatgagttcgccaggctgttcgtctctttgcaacgcgatgtggacggcgaagccgcgcattggagcgccacggacgtcgaatcctgggagctggtcggcccgccggtgaccgccgaacagcatcttatcgacacgttcgccgcggccaacgaattcgtggccacgcttgcggaccgtctgtaccacacgatcatgccagtcacggaagaatcggtcatcaccgcatacgctgatgacctcacattctgggcatcgcatccggaccttggcggagtgccgtgcgcattatggaacatcgccgcactgcaggcggccgaatgggcccgcaaggaaaccggcatcgcctgtgaactagacgtgcgcgaaccgctggtgtgacagctgagctcaaacatgggcgtaggtaacggcatggtttgaggactatggtgttgcgttaccggtcggaaaggatatgatggtgggacgtcatagcaaaaaagcgcgtggacagtcgaggagacatgcgcgaaagccctccgtttggagtgaaattcgcggctatctgctgacggtgatcgcggtgatgctggtcgtgttgctgggacgcaccttcgtgttcaacgtctatgtgattccatcccgtagcatggaagacacgttgcaaatcggcgaccgcgtatttgcctcgcgattgactccgagactctttgcactgcaccgtggcgacatcatcgtgttcaaagatcccgcagactggatggagggggagcagcttcccaccaatctgatgtcgataatcgacagcaatcgttacctaatcaaacgtgtcatcggtctgcccggcgataccgtcgcctgcaagggatccggggagcccatcacggtcaacggcaaacccattgatgaaagcgcttatcttaagtccggcgtgaatccaagcgacagtcctttttccgtaaccgttactgacggcaacgtgttcgtgcttggtgataatcgctccaattccagagattctcgataccatcttgacgacggcaacaatgggctagtgccatacgacgatatccaaggtgtggcgttgttccgcttctggccatttacgagaatcggcttgctcaattgagtttggcgtgaatacgcaagttgacatgtgtcgcacggcccggtgcatcctgcagtcggaccgtttccggaaccctctccccgaaatctgacgaccccctgtctcacagctatcgtacagctccgatacgggaaacgtgcgggtgattccataacgactacgtacttcaggaagtgacgtgtatcacattatggtcatgtgttcagtgccgcagataggcgaagtttattcatgagccgaatagggccggtgaagcgggctctcactgcgttcataatacggcatatcgtgaacggcgttatcatcacagtcaggccgaattaaaggaggctcggtcatggtcgccgcatccacggcattcagcccgtcaagcacgatgacggccagtttggtggaatcgactggcctgcccagtgccgctattcctgtgcacgaggatggtaacaacggcaacggcgacagtagtgccgatggcagcggcgacgacggcggcatggtcagatcgctgagcctgtggaactacttcaccatgggattcggcgcaatcatcggcaccgtatgggtgctgctggtcggtgactggatgatcgtcggcggtggcccggtcgaggcgatgatcgccttcgtgctgggcgccgtgtttctgctgccgatcggctcgacgtccggcgcggttaccatggtcgggtcgtttctgctcggagtgctggtgatgacgccgctcttctacaccggtttcgacacgattccgcagagtgccgaagaggcaagcgaaggccttgactggaagaagttcggtatggtcatctcagcttcgctgctggccgccggcttaatcatcattggcctgcaggtgctgccgttctccccggccgcgctcaaacccacatcatgggcaatcgtggcggtgtggatttgctgggtctggcattgcgttggatcagtgcacgttcacggcgcgaatagcggtgcgccggtaggtcgcgagccgttcagtcgcgcgcgacccaaagcgtatcgaggtcgtcggcctcggtcgcctttttgcgcttgcgtacccactgttgcaggaaatacgccccatagcaggccacgatgaacacgagctcggccacgagcgcgaaccgttgctccacgtcgaaaatcaccaatacgaacgatgcggtgcacaggatgaacgccgcccaagacacgtacggatagccgggcgtgcggtatttgagttcgctggtggaatggccggactccagccaacggcgacggaacacgatctggcagtaggcgatggcgatccacaccaccacggcggacaggccggaaagcgccaccagcaccaggtacacagtcgaggcggcgatcacggaagacaggagcgccagcaggccaccggccatcgcggcgcacaaggcgagcatcggcacgccgcgacggttcgttttggcgaaccagcgcggaatcatgccttcgttgcccatcgaccacaccatgcgtgtggaggcgtacaggccggaattcgaggcggaaagcacggccgtcagcaccacgaaattcatgatgtcgcccgcataggggatgccgatgctgttgaagacgagcacgaacgggctttcgcccacgccggcctggcgccacgggatcagcgcgcacatcacggtgatcgagccgatgaagaagagcaccagacgccacagggtggtgtggatggctttcggcacggcggtttgtgggtccctcgtctcaccggcggtcacgccgatgagttcggtgccggagaacgcgaagttgacggtcagaatcgtggcgaacaccggcatgaagccgttggggaagacgccgtccttgatgagattgccgaacatcggggcatgttggtagccggcgaccgggatgacgccgaagatggcgagcgatccgatgacgatgaacgcgcagatggcgaacaccttgatggaggcgaaccagaactccgcctcggcgaagaaacgcaccgacaaggcgttcagggtgaagatgagtgtgatgcacgccgcgctccacgcccatgtgggactgttcgggaaccagcgctgcatgagcagcccggcggcggtgaactcggatccgagcgccaccgtccatgtgagccagtactggatcgcgatcacgaagccggtgccagggccgatgaacttctcggcatacacatggaaggagccggtcaccggcatggccacggacagttcgccgagcgtgagcatgaccaggtagacgatcagcgcgccgatgccatacgccagaatggtgccgatggggcccgcctgctggatggtgtatccggagctcaggaacaggccggtgccgatcacgccgcccaacgagatcatctgcaggtggcgggattccatgccgcgcttcaggttggtatgtagggcgtgctcgtctttgccatcatgtgacgactcggactggctggtttgcgctggttggttcatctgttccgaatggcttcgacggccatccgtctgaatctgcggttcctgttgcgaggacggcgattgtgccgccgtgtcggtgtcgggctgactcatgtttctctctttgccatgcgtgcgttccataggcgtcgtcgtgacggcccggaatagtatacccgcactgaggatatagctgcgctgcatgatgctgagtcaaaatcagcttcaaggggctgatttggcgtttgccggaggtctacttccgtttcaaggggctggtcaactggcggaacgcagatagaaatggcattgttctatcactattccgccgtttttaaccagtggctactttggcatcagccccttgaaacggaagtagatgttccgcaaagtcaaaatcagccccttgaaacggagataggcactcgcagcggctacttcaccttctggatacgcagcacgaacacggcagcgcacacggccatgacgatggagatggcgaacgccggcgtgtaggtgccggtcgtggtcttgaccacggaggtgatggtggggccgactgcttggccgagcgtggtggccaagctgaggatgccgaggtccttgtcggcctcttccttgttcggcaacacgtcgacgttgagtgcctggtcgatggccgagtacacgccatagccgaagccggcgatgcccgcgtacaggtacatgcccgtgacactcggcatgatccacgg

SEQ ID NO: 1024 - DNA, 24282 bp, Unknown
  R117_24m  MAG No. k141_54299
aatccgcgcaagccaaactcgtggccgacatctccatgtacgacacgatgtacacgcagaacgcccagcaataccgcgagctgaaaatgaccgtactggccggcaagaaggcgctcgccgacttcaacgccaaccagctgccagcgctggaggccgaggccgccgccagtggcgacgccatgcaggcgcaagtgctgaaggacttcaagtccaagctcgaccgttttgccaagcgactcgacgacctcgaccgcatcagcgtggtcaccttgcagaccgcgccgcagatcaaaatcatccagaacgcggaccagaccatcgtggacaagatcgacaccaccatctccaccacgattccggtgtggaagagccagatggtgatcgcgctgggcctgtccaaccagcgcaaggccctcgacctgcagaacaaggccgacgatgtgaccaacaagctgctggcgcgtaacgcggccgccctgcacaagggtgcggtggacgcggaaaaggccaaccagcgttccgtggtggaaatcgacacgctggagaagatcaacgccgaactcatcgccaccctgaaggagaccgtgcagatccagaaggaaggcaaggccaaccgcgaggccgcccaggtcaagatgcgccaaatcgagtccgacctcaaaaacgccttgctcgaaaacgtccggcagatgtgagccgttcgcgcgccagcatgctcccgttggcagaggtatatgagtacgcctactggtgtgcgtatatatgctcccgctggcgggagctggcagccgtaagactggctgagggtggtcacggcgctcggctcggccggctttaccggcaaccattccccgccgcaatttctctgtgggcataatcccggaatgattgccgcgctcgggaattgggtgaagtgaaggttaaaggttgagagcccgggagggttccggaaccggccacgataaccgctgctagccctgcgatacgggttggcggccggcatccaagccgattctctcctaatcaaggagtaccgattatggcaatgtttccggctttgatgaatgacacgatgttctcggatctgttcgatgatccgttctttgagggttggcgcaacacggacaacacgatgagtgccgcaatgcctgccaacatgatgaccaccgatgtgcgcgagaccgacaagggttacgacgtcgacatcgatatgcctggctttaagaaggaagatatcaaccttgagctcaacaacggctatctgaccgtgtccgcctcgcgttgcagcgagcatgaggacaaggctccggccgctgagggcgaggcttccgacagcaagtgcgcttgcgcgtccgattcgggcaagtggctgcgtcgcgaacgctacatgggctcctgctcgcgtagtttctacgttggcgaggacgtgaaggagtccgacatccacgccagctaccggaacggcacgctgtgcatccaggttccgaagatgcaggcccagccgcaagtcgagtccaagcaccaaatcgcgattgagggctgacgatacttgattcgtcccgaagtcccgcttcgagtagctttgccccctctgacgagggagctcccgcgaagcgggtgggggagagataaatcgtaaccaaaccatgcttcccacgccgcctgccctacgctttcaacgccgactaacctgacagacggcgggaaacatagccaatgcaaatgccgagtagggatttaccctacccggcattttgctgtttcaatcaccgaaccccaccctgttcgcgcgccggtcgtgtgccgttctgcagctgtacacatccgatgagtagaatgccttcgaaacgaggcaagagaggcggacatatggcgaacggcgcacagaacgcaagcggcacgccggccccggcggcgagccgttccggcggccacgtcgtatccgcgcgcgccacgaccatcggcctgatggcgatcctgctgtggagcttcatggccggcaccgtgcgcatcgtctccgaaaacttcggtgccacgcttggttcggccctgatctacacggtcggcggcatcctgctgctgatgttccggcgcccggtcccgattcgcgagttccccaagaaatacttgattatcggcggcctgttgttcgtattttacgaatcgtcgatatccctctcgctgggtctggcctctaccgacgcatcctcggtggaagtgagcctggtcaactatctgtggcccacgatgatggtgctgctgtcggcgggcgtatcccatcgcaagcacgcggtcgtcaaggtgctgccgggcgcgattgtggccactgccggcgtggtgctggcggtcggcggtaattccgggctcgactggcatgcggccgtgcagcatatcgccgccaaccctttgccctatgcgctggcgttcgcgggcgcgctcgcttggtcggtgtacgcggtgttcacgccagccatgagtcatggggtggacggcacttcattgttcttcccctgcgtggccgtggcgttgtggattatccacttcgcgtccgggcaggggtggccggccgagccgccgagtctggtcgcatggctgtttgtgttgattgccgcggcggcgattggcggtggttatgcctgctggggctatggcattctgcatgggtctatggagcggcttgctattgcgtcctatgccacgccggtgctgtccaccggggccagtgcggtgttgctgggtttggcgctgtcgctgccgttttggtgtggcgcgctgctggtggccgtcggatcggtgcttaattacttggtcagtgcgcgcaaatagcggggtggctttgctcatggggcggtaataatcccatggggcggtaataatcccatggggcggtaaaaccctcatggggcggtatcccaaaatggctttattctgccgtttcacaatttcttcaaaccgccccatgggccttttaccgccccatgggtaaattaccgcccgatgggcagcagcaacttactcgccgcggcgctcggacgggcggcgaatcgggtcaagcagcgtattcggatcggagatgccgaacatgctgcgcccgccggtggattcagggtgcttggcgagaacggccagcgaaatcgcccccggaatcataatgatcaccgaaagggccgccaatccccagttcacgaagaatccgagccccagtacgatggccaccacaaccaccaccgtgacgataatcgtcaacagtgctcgacgtgggttggtttccctggtccaagaggtgctggctgcgggttttgctgttgaactggccgcggcgttcgtggctgttgtgccatcagccgtgccggtcgtgggccttgccgccgcgctcgtcgcggggtcagtaggggcgtcagacacgttatcggcgacattgccggtcgctgctggacgttgttcgtttgcgtgagtcatatccaccaacatattccctgcttccggctaaagctgggacaagcctgcgcaccgctaatccagcgccgacactggccttgagctgcggacgtccaggccggatgtgaacaggagctgaacggagtctggggaaaccatgagaactcgcgacaatttttgtgaaattgggtgacgctctatgaatcgcgcgctagtattgcgtgagcttacaagacgaggagcctggagcgcggggacgaaggatgaagaactccgtttggaaaacgttcatggaattgtcgctggtccgcggaatcgtgccgtggaccgtgttcggactgaccgcgatcgtggcaatcatactgattgttgggctggcattgagcaagaagcgcggcccggcagcagacggcctggcgccggacggcctggcgccggacggcgaatcgtcggcccaatcgcccgtcgacccagataaccagccggccaaccagcctacgaacgcggctgctacggcgtcatccgcagcttcgacggaagagacgtttatttcccatggcctgcgtacgccgcaacgtcgtcacttgcatccgctggccgccgcgctggccgccgccgtgctcgccggcgcgggcggactactggccacatggctgatgtccgacgtgttcatggtgttcggcgtatcgttgggctggccggtgatcctcaccgtcgcgggaggcttcgcgggcctcggcttcgtgctggccgccgccgtgacgttacggggggcccgtcgcgcgctggccgtcgtgctggtgccgctggtgctggcgtccaccgcgctcggcgtggactcgatctacggcgaataccagaccatcggcagtctcgtcggctatacgccataccccccgctcggttcggtcaccgtgcgcaaagcctcgatgagcgtcggcgagtggcgcgacaaggcgcgcaaggacgctctgccatccatgcccgactcgggcagggtgttcgtcgtcagcatcccgaacaccgaatccaagttcaaggcgcgcaaggcgatggtctacctgccgcccgccgcgctgtccaaccgcccgccggccctgccggtgatggagctgctcgccggtcagccgggcagtcccggtcgcctcatcgacgccggcaacatcgccgccacgatgaacgcttacgccgccgaacatgacgggctggcgccgatcgtgctcgcacccgaccagaacggttcggccatgcacaacagcctgtgcgccgacaccacccgaggcaacgccgaaacctacctcaccaaggacgtggtgaactgggccagggcgacgctgccggtagccaagtcggcccgtatgtgggcgatgggcgggttctcgcaaggcggcacctgcaccacgcagctggtgccgcgtcaccccgacatctacggtgcgatgctgccggtggatggtgagctcgagccgaccgacggcagcgtcgagacgatggtccggcgatatttcgccggcgaccgcaaggcctacgacgggcaggtgccggtcaacgccatcgccgccaccggcacggccggccaggcgctgttcgccggcgccggcaaaggggatcggaagtcggtagccaacatgcgcaccatcgccgcggccgcccgcgcggccggcatggagaccaccgaactggtcgtgcctggcgccgaccatgactggcatgcggtgcaggcggtctggaaccccggtctcgactggttcggcgcgcgaaccgggctgggcgaaatgacgaaatcgttggaggaatacccacaagtggaggtgttgcaatgagcgaagaacaacagcatgggaacgcgcggccggcggccatgccgcagacgcggcggcccctgcgggacgcggaaccctcgcggacgaagcccgccacgacctcccgcgccaccaaaccgcatacggcaaggtccagccatgcggcggaaagctggcgtgaactggccggtgacgtgcggcagtgggcggacgaccaccggttggccgtcaccgccacggcggcgctggtggcgctgaatctggtggcgtggctggtggccgcgatggccggattcgcgtttccgctgcggctcagcaccagcatggccgcattcaacgccggcaaactcatctgctcgctgttcctggcgcgcggcgtcatccaactcatggtcgacgccgtcctgtggctcgtcatgctgtcgatagccgaaccatggctcggccgtgtgcgcaccgtcgtcaccgcgctcgcctgcgcggccggcggcgtgctggcgggcctgaccctgtgcgcggcggccggatggatgttccaggactccctgttcgtctcccgcatgcggttcgcattgagcccgctggtgttgccggtcggcgcgctcatggcggccagcgcgttctgcagccacctatggcgcaggcgcatccgactcgtcggctatgtggcgatcctggtcacgttgctctacagcggcaaccccagcggctactgcatcctcgccgccgcgctgatcggccatgccgcaggccgtgtgatggccgggccgcccgcgcacgtcgaagccgaatggcactggctgcgcagcacctccttcgaggcgcgacgcatattcgcggccatcgccgtggtactggccctggggccggtcatcgccatcacctcccataaccatgcgggcccgctcagcacgatcggcctgctcatgagcccggtttccgtcgacgatggcatgctggccaaatgcctggccggtgacacgcacggcggctgcttcctgcagttcgatctgctgcgggcctcgatgcccggcgcggtgttgcgctcgttgctgcccaccgccgtgaccctggtgctggcgtggggcctgtatcgcggacgtcggttcgcggccatctgcaccgtggccatcaacctgttcacggtggccatcgccgtcgcctactatctggtcgtgccgctgagcttcgcgccggacggcatggcctccctgctgcagcacggcgcgatcgtggcctgcgtggcgaacgtcctgcccccgctgctgttcgccatcgccctgctggcggcgatgaaacacttcccgatccgcatcggctggtgcaggctggtcggcggcatcggcgccatcgtgctggcctggctggcgtgcgccgccatatacctgatatacggcatcgcccaacccgccaccttctcgccacgcgctacggcctcgtcgctgctggccgagctgccgggacgcttcctgcccatcggcttcctgagccatatgaagctgtcgttcgtgccgcgcactccgatggcctcgatcatgtaccaaggcgtcggcctggtgttctggatcgtggtgctggccgtggtgatccactggatgggcgacgtgagcgaatcaaacgagcgggcccgggcgcgcgccgaacgtctggtcgaaaccggcggcgaatcgatgagcttcatgaccacgtgggaaggcaacagctactggctgtcccccacgggcagatcggccgtggcgtatcgcgtgctcaacggcatcgccctgacctgcaccggaccgttcggcgatccggcggaatggatggacgatctgaacggtttctcccagcactgtgcggaacgttcgctgtcgccggtgttctacggcgtgcatcgggaacagcgcgacgcgttgctggaagccggctggaactccatcgaggtcggcagcgaaatggtggtcgacccgcgcggctggaagacgaccggcaagaaatggcaggacgtgcgcaccgccatcaacaaggccaagcgcgacggcgtgaccgacgtgcagtccacattcctggaagcgtcgctcgatgtgcgcgaacagatcgaggacatctccgaggagtgggcgcagctcaaggcgctgccggaaatgaagttcacgctcggcggcgtcgaggaactgcgcgacccgcgcgtgcggctgctttacgccatcgacgcggacgggcgcgtgctgggcgtcaccagctggttgcccacctggcgcgacgggcgcatcgtcggctggacgttggatttcatgcgccatcgcaccgacagccccaacggcatcatggagttcctgatcgcgcgcatggccgagcggctgcgtgacgagggcgaagccgatcccacgcacgccgtggagttcatgagcctgtccgcggcgcccctggccggcatgaatcccgatcgggacaacgccggggaggacggggcaccggccagcgaaggcacgcaggtgctccaacacgcgctgcagatcgtggccgactggatggaacccgcctacggcttccactcgctgttcaacttcaagcgcaagttccagcccaccgaggcgccggtctacgtgtgctacccggacccggcggcgttgccgcagatcgggctcgcggtggtgcgcgcctacgtgcccagcgtgacgcccgccgaagtggccggcatgctcagcacgctgcggtcgtgaaggtgtgcacacgggtacgcaggttagccgattcgagcctgagacggggtatctgctttcagagaggtacatttggccccttgcggacaactaactgccttcaaagaggtgcctgaactctgaaatctcgagtatgagcgttgcaatgacaacgtttgtactcggggtttcccgtattcggggcctctttgaacgaagatagcattctgcagaagcccgaatgtacctctttgaacggagaaagcctgacaaggagggcgcggcaagcgctatctccgtttcgaggggctgatttggtctctcccggaggtctactcccgtttcgaggggctgatgccgaagtattcacgctccaaaatcggcggaatggcgttggcgcggatgggtttttacatgcggtctagcggccgaccagccccttgaaacgggagtagacctccggcgggggtcaaatcagcccctcgaaagcggttttgccggtgcagaggtgtcgttgactgcatcgcgagccgcctcgacgtagtaacgtggggcgtatgagcgaacgtaacgaacacaatgacggaaatacgcaaaccgcatacttcgccggcggctgcttctggggtctggagcgctacttccagaacgtcgacggcgtcacggacaccacggtcggctacgcgcaatccaccgtcgaatcgccgacctacgagcaggtatgcgcgggcggcaccgatgcggccgaaaccgtgaaagtcgagtttgacccggcacaggtcagcctgcggacgctgacattgctgttcctggaggtcatcgacccgttctccgtggaccagcagggcgaggaccgcggccggcagtaccgcaccggcatgttctacacggacgagacgcagcgcgccgtgtatgtggcggctctggagcagctggtcgaccgccagccgcagcgcccggccgtactggtcgaaccgctgcgcaacttctacccggccgaggcacaccatcaggactatctggtgaacaaccccggcggctactgccatgtaccgatcgccgcaatcgcgaacgtaaaacgccgtcagaagtacgtggaacgcatctgggatctgacgcttgagcagttcgcggtcacgcagaacgccgctaccgagcgcccgttcgtcaacgagtatgacgaggagtttgagcccggcatctacgtggacatcgtcagtggcgaaccgctgttctcgtcgcaagacaagttcgattccggctgcggctggcccgcgttctcccgcccgattgccggtgacttgctgaccgagcatgaggaccaccgcattccgggccgcgaccgcatcgaagtgcgcacgtcggacacacagattcacttgggccacgtgttcaccgacggcccggccgaccgcggcggcctgcgctactgcatgaattccgccgccctgcgcttcgtgccgcgctcgcgcatggccgaggaaggctacggcgactggattgcggttgtggatggggatgatcaggcatgagcatggagaatatcgcgggcgctcgcaagcccgccaagcgtgaggatgagcacacggtcgccggcgagcatcgcatgatgcgccgtgcggaccgcgaggtgaccgatcccgagcggatcgccgcgatcatcgccgcctgcgacatcgttgaagtggcctatgcggatgccgagggcctgactatcgtgccgctgaatttcggctttgattacgacgaggcgactggcaagctgacgctctggttccactccgcgccgcgcggccgcaagctcgacgcgattcgcgccgccgccggtggccgactgcccgtggctttcaccatgcagaccgactgcgaggtggtggcgggccgcaccacgtgcaattggggtgaggcgttcaagtcgatcgtcggcaatggcacggcgtcactggtcgaggatctggatgaatgccgccacggcttgcagacgctgatggcgcagcaggcgcatatgccgaatgtggaattcactgatgcgcaggtccgcagcgtcacggtgtggaagattgagtccgactacttcaccaccaaagtccgcaccaaacccgtgcccgcacacatgcatcagcgttagccggggatagcgcgccacctccccactggcgggaggcagcgcgcagcgccggtggatggcccacgtccggacccgatagacttgccgccatggcagcagtgacagtggtaattaccagctacaatcagggcccgttgattcacgaggcagtcgagtcgtcattggccccagacggttcgtccggaacggatcatcatcgtgaacgatgggcccgatgaccacgcatccgtcgagatgctgaacgccactctcgacgattgccggcacggggcgatggatgcgaatggtgtggccatcgacctcatcggccaggcaaacgccggtccttccgccgcgcgcaaccgtggcatcgccgccgccgaaacgccgttcgtagtggtgttggatggcgatgaccgtttgcggccggccttcattgagcgcacgttgtcgatgttgtccgccgacaaaacgatggtcgccgcatccggctggctgcagactttcggtgtcctggaatcagtggtccagccgactggtggcaatgccgccgcgttcgtgtcgcataattgctgcccggccacgtgcatgattcgccgtgtcgcgtgggagtgctgcggcggctacgacgagtcgatgcgcggcggcttcgaggactgggacttcttcctgtcgttgttggagtgcggattggcggtggaaaacgatatctgcggtgctggggttactggcggtactgagcatgtcggaggttttgggagtgcctgggatacagagaatcccgcaaaagacgcggcccatatcggcatcgcccccgagccgctgatcgagtaccgcacggccccggcctcctcaaacgtgaccagcatgaccaagcgcctcgatctcatgcgcttcctgatcgccaagcaccgcgatctctacgccgcgcacatcgccgacgccatcctcggcgttgaagccatctccatgagccgcttaaccatgtgggaatcgttgatgtgcggtgacaccaccgccagccaagccttcatgctccaccccacctacggcgacggcggaatggccgccgccgtacgcttgcggagttgagaggcatcagctgaccaaatgccgatagagctccggatcgattggccgggccaaccgcaggatcgacagcgtgaccttcacgctgccttgtccgcttgcgtcaggtttggtggtgagctgagggttgtcaaacgcagcaacgtggccaacgtagtagtacttaccctcggcctcttccgccttgcgcataacgaataacgggacgaaatgcgtctggccccaattcgggccaatgccgttaagcgcccattggaattcgggagactgcggagttcgtccattcttgctgaagtatttcatttcctgtgtgctcaggaattcatcttcgtattgacttgccgcgtatttcacgaagatgggcatggtattggtttccttgtcgaggaggtaaccacccacgttttgcggagtattctccttcttccatccgcacagtcgcatgacgtctgccatggaatatttgcgttcgtacaagaacatgtgatcaaagacctgttgcctgtcggcggcctcacggaatatatctcggcaattggccataccggtgcgcagagtgtccgcaaagaagatacggaacgttctgttcgtggcaagcatatcggcgaatctgctgttcaaccgatatgcggtaccgttttctgtgccggtgctgttcacggcttcgactaatggctgattgccgaaacgattgcagtttgggccggtgaaatatgagtaatcgagcacgctgatcgcagagtcgaattgcgtgtctgaactatcggactgcgggaattcagtacgaatcgcatcgagcaattcgctgcggccgattggcgagcccgcactccaatgctgcggtacgtcgtcgtcgagccgttcgctgacgaaatggcatagctgagcaagaatgaccaattcgtgcggtcgcaatccgggcagcagcagctccgctgccatcttgagtatcgcgtcttcaacgtcggtcaccggctccaactgatcctcaaatgtcgcttcatgatgtttgcctttgcccaggcttttttcacgggaacgcacgaaatcaagatagttgctgcgcttcgatgcgatggtatacggcagtgaggggtcgtagttatagatgtccgtaagcatggggatgcggcccagctcgtaacggacttggcgatactgttcggacagctttttcatgtcggaccagtcggcggtgtccaaagacttaaggatgcgctccttggcgatcgggtcgaaactgatggacgacaggccgattgactttctctgcaggttcttgcgagctctgtcgcggtcgccggtgttgccgtataacgccaccggaatcagatagttgttgttgtaattgccaatgaaatcgataaccacaacgctttctttgtgcgggaatttgcgcagtccgcgcccgagctgctgcgtgaagataatgctggattcggtgctgcgcaacatgacgatttggttgacggcgggaatatcaactccctcattgaacatatcgacagtgaagagatagtcgagttcgccttcaatgagcttgcggacgtattcgtctcgctgcgtttgggacacgggcctgccgtcatcgtccgtgctggtaacggcagcggtgcgataggggcgttcggcttgttgattccactgttggttaaacagctgggatagcttatgggcttcctcctgtcgactgcagaacacgagtccggtgaccggaatgttgaactgcccatattcctgcaacttgtcaatgatgtagcggactcgcttttcggtggcaagctgctcgatctcgtacttgagctgtttcgagtccttcgcatcaaggcccttggagacatcgagacgatgggtgattccattcggatcgtcgttggagccaaggtattccgcaacaccgtagtagtggaatggacagagcatgttctcgtccaacgccttttgcaagcgaatttcgtacgcgatgttatgcccgaatagctcgaagatgttgatgccgtcggtgcgctctggcgtggcggtcatgccgagcatgaagtcggcatctttgaaatgattgatgacgcgctgatatccttcggctccagcgtgatgaacttcgtcaaccagaacgtagtcgaattcatcggatttgaattgcgccaaaacctccggctgccgcatcgtctgtaccgtggcgaatacgtagcggcggtcctgttgcttgctggtgcctgaatacaatcccaattcggattcatcgcagccgagcaccttttggtaagacttcattgcagtttgaagaatcatctgctgctgggcgatgtacagcatgcgcttcggctggcattcgcgtacgtcgaatgcggaaaggtacgtctttccggtgccggtggccgacacgataattgcgcggtgctcgccttgttcacgaatcttcttgagattcgccaacgcctcctgttgcatggcgtttggctgaatgtcatgcccctcaagcgactgcagaatctcatgacgcggtggggcgtatttcttgaaatcttcctcatactgtttgatccactcttcggtcagcggaacggaatcagccacctgtgagtcgatttcatcctggaactgcccgaccagctctccatccgccagcgatgagactttgagattccattcgcgttgcgtggtcaatgcggctccagtgagattggaactgccaacgtacaggtcgtaatagggtgtaccgtctttcatgcggcgagaaaagatatatcccttgggatggaatggttgtccttgagccattgcggaaactgaggtattacgggaaccttcccacacgcgaacgtcaacaccagtggtgttctgaagatgcagcagctcccagaatgccctgggatcgttgaaatgatttttcgttgaggtaatcagtgtgcccgctcgggtcgctgtttcatggtgacttctgaagtcttcaaataagctgagcacggcctcagccgagacgaatgcgacagaaatgtcgaaggaatcgctagtagccaaggaattgccgatttcctcgtgcatggtcaatccaccggggcgatttgcgatgagggtcggcttatattcgccgggagcatctgagcgcggctcgatcagacctgagatgacatcttcgaggatcgagggggttggatcagaatcgtgatgttgcgtgttggctggagagtctgaggtgctgaccagatttatagacatgttgccctgttcccttgcgattcggatcgtttgatgactgcctgactgcgctgtggcgcgttcatcggagcgtcagttgtttgttcgcgataatcgcgactgcttcgcgatctaccggagcccagttcaatgtcggcatatcagcaggattcagccatcggatatcggtgtgctcggtgagatgcggcgtaccggcgatgaggtgacagatgaatgtggtgagccgcacggttccaaagtcgtaggcgtattcgctggtacatacctcttccgcgacctcaacttcgcataacagctcttcttcgatttcgcggtgcaaggcttgccgcgctgtttcatgaggctcaattttgccgccggggaactcccagtatccggccaacgactttcccgggccacgctgggcgcatagtacggtgccgttggtgacgattgcagctcccacgacgttaatgattttgcgttcccgctccatgaacaaccaggatacaacgcttcaagatccacaagcgatccacgatcctcggtggttttgcatatcgatcctgatgcttttgattatgcgatcggacgggtcgaaaatgtcggtgtggacgctgccgactattgtggtagccaagagaagcgatccgtttccgaggtgagattcgggaacggtccgactctcggcagtgatttatctacgcagacaagccaaaggagcctcgccatgatcctcgtcaccaccaccccgtccgtcgacggatacaccatcaccaattaccagggcatcgtcttcggcgaagtggtatccggtgtgaacatgttcaaggatcttggcgcgggcctgcgtaacatgttcggcggccgcagccagggctatgaggaagagctgatgcgtgcccgcaacgaggccatcgccgagatgcagcagcgtgcggaggcgatgggggcgcacgccgtggtcggcgtggacatcgactacgaggtgctcggcgccgacaacggcatgctgatggtcaccgcgtccggcaccgccgtgcagatcgcgcgtacggcctgagcctgccgagcttgggcccgagctcgtccaccgagccgggctttgtcggttatcgtgacgcattacactgacgctcatgaccatacgaatcgaagcatacgaccggttgcccgacgcggcccgcgccatccgcgagcaggtgttcatccgcgaacgcgactggcggccggaattcgatgaatgggatgccgcgtccgtgcatctgctggcgttcgattcggataatgatgcgcccaatcgccccggctcgtccgcgcaattggcctcacgcagccagcccattcagcccagccagaatcaccccgtagcgacctgtcggttctacgcggaccccgatcatcccgaccagcccgggcgatacatcatcgcgcgcctggcggtactgcccgaggcgcaaggccggcatatcggctcgcggctgctggctgacgccgaacgccgcatcgcgcaagccggcggaaccatgaccgccgtgcactcggaaaacgaccactacaagttctatgagcagtgcggctatcgactcaccgatgaagtctatgaaggcggccgtcacggctggctgatcaaggacctatctcgtaacgtatgaaggcccgcctcggtgttgggcgagcgaacctacagcgcacagacaatcagataaatcgccacgacgtggcagacatacccgatgaccgtgcccaagtgaaacacctcgtgaaactcgaaccagccggggacggggttcggcttgcgcagcgcgaagcatacagcgccggcgatgtacgcggcgcctccgcacgcgatgagcacggtcggcgccgggcctactgcgggagccgtccagagctgcggaataagcgttaccggggccagtcccaacacgacgtatacggtggtgaacacccagttcggcgtccgcagccagacgatatgcagtatcgtgccaatcgccgcggtcgtccagattaccgtgagatatggccggcgaatcgccgggctgagcgcgaacagcacgggtgtgttggtgccggcgatgatgaggaagatgttcgaataatcgatgccgcacagcacgcgagtcaccttcgcgctgcgccatggcacgacgtgcagcagcgcgctgttgccgaacagcagcatggccgaggcgccgtacaccgcgcaggccgctttgaccgagccggccggcgcgatgcagatgagtacgatggacgccgcgatgcacagcggcagggtggcgaggtgaagccatccgcgcagtcgcggcttgcgattgccgaatgcatccacggggacgatctggcgcttgatcgccttcagtgcggccttggcttggcggtagcgcgattgcgcggccctgtatcgggccgatgcacggtccagtgcggtggggttggcgtttgcgctggatttttgactcgcggttgcggaaggcgcaactgttgcggcggaagccatggttcgtccagatggcgtgctgatggaaacgctcatactgatcacctcgctatggccggcgacgctctcccgaccactaacctacgctaccgtaacctagtataggcccgcgcaataatcaaggttgatttcgtaatgcttacagttcttccgtggtgtggtattcggtggtgcggttgcggaatacatcgccgagtctgtgaactcgtattatgcgtgtctgctgggtccgacttgtgtcggttcctgatttcggattgctgcgaatgatgctcccgacgccgctccgccagttgccggattcgtacggctcggccgttcggccgagctggtcgtcggtgactccagatacttcgttggtttcgtctcggttcatgatgttatgtaatgctagtttatggcggatggaaagttgaggaaagttaaatctgcttcatgggcttctctctgatctgtatttgtcccggttcatatgtcaatcgtttgacctgtcgaccggggcagaatccgctgtcccggtcggcgattccggcttgttttcgtgaaccgggacactccggtttcctcaactcatatcgtctggcagacggaatcggcggaataaggccgattctggaattggcacgttgtcccggttttcgcataaatcgattgacatttataccggggcaacaaaaattgtcccggtttgcaaagatcgcccgaaatcgcgaaccgggacagcggattctggcctggcttgaacgtcaaacgattgatgcaggtaccgggacattttccgccacgaaagttgggccataagccttaagtcctaaagccccccctgaaaaacggcgcttgcccggataaagcaaaagggctggaaccttccgattccagccctttagttgctggtgcgagtggggggagttgaacccccacgagcatacactcactgccacctgaagacagcgcgtctaccattccgccacactcgcagacaatcgactaacttacacccggctgggtaatcatgcaatcttcggcgtgtcgcatgggaggcagggatatatcgcttgtgggtctcctgcgggcgccgtgatctttgagggtggcggcactcccctcagtcacttcgtgacagctcgtccgcaattaaggacgggccttgcctgcaacctgctggttcgactatcgtctcaccttcgactacaaacagcccactgggctgtttgcttaacgtctcagcctcagcgaggggagcagagagaagttcggcacaagccgcaacgaaggagaaaactcacaaccctggccggcgctcgccgttgccgtagaagtgggccaacgcttcgtcgcggaactcatcaaagtatccgccgtcgatcgaggcgcggatgtcgtctagcagcttcacgaagaaatgctcgttatggatcgtggccaacgtaaacccgttgaactcgcgggcgcgcagcaggtggtcgacgtacgcgcgcgaataatgctggcatgtgtagcagtcgcatccctcctccagcggcccgaaatcgaacttatgctgggcgcgcttgatgttgtaccggccggcgcgcgtgtagatcgcgccgttgcgggcgcagcgcgcgggggccacgcagtcgaaggtgtcgccgccgttctccacgcacgcgaagatatcgtccacggaggcgatgcccagcacatggcgcgggcggttctccggcatcgcgtcgcagatccacgcgcaggtgtctccaatgatgcgcttctcgatcgcgccgccgatgcccacgccgtcgaagtccagtgaggcgatctgcgaggccgcgcgccggcgtagatcctcgtaattcgcgccctgcaccacgccatacagcgcctgatagggcttgcccagccgctcagccgtcagccgctggtgctcgtccacgcatcggcgggcccagcggaaggtgcgctccaccgagtcctcctggtaggagcgggtgttcatcagcgtggtgagttcgtcgaacgcgaacatgatgtctgcgccgattttgtgctggatgcccatcgaaatctcagcggagaaacgatgtgcgtcaccattcaaaggcgacttgaacgtcacgccgtcctcatccacccaggccatgcgctccttgcccttggcgatgatgtcgtccgacttcatgccggtcacgtccattgccagcgtcttcttgaagccgacgcccagcgacatcacttggaaaccgccagaatcggtgaacgtgggcccatcccagttcatgaaacgcgccaagccaccggccgcgtccagcacgtcctcgcccgggcgctcgaacaggtggaaggcgttggccagcaggcactgtgcgcctagatccttcatctgctcgggcaacacggccttcatcgcggcttgcgtgcccaccggcacgaaggcaggcgtgcgaatatcgccgtggggcgtgtgaatgatgccggtgcggccgtatcgggcaccgtctcgcccaagcccgctggccgtggatggcaggcgggtgatcgtttcgaaatggaaggcgctgcggtcgccgggctgtccgggctgtgcgcccaacggatgttcaagaaggctgatcgtcatatgttcactttaggcagaagggccagaaaagggccggaaattgtgaagaactcggtttcgaggggcggatttcgccgctcccgaacgtctacttccgcttcaaggggctcccggtcaagtaggccggctgcaaaaatggcggaatggcgttaaatgagggcccttgatactcggaattgaccgcgcgaacagccccttgaagtgcaagtagatgttcccgaaacaggaaatcagcccctcgaagccgagatgcccataagactctgcgatgattacgcatagactttcaatcaacgttcagaaaacctccagattgactgcctttactactgaggtagcacacgagaagtggcaatgggcaagtgcccgaatagccgccgaacagacgtgataggaatttaggaaaaggagcagcaatggctgacgaatttaacccgcagggcgtcgaccagaccccgcggaataacgaaaaccccaatagtactgccgataccggcaacgccgagccgaagaacccgtttgtgggtggcgactcggttgatgccggcaacgccagcgattccagcgagcagcaagccccggtttcctcggccgccctcgctgccgatcagcagcctacgcaagccgctaccgacactgccgccaccgagcccatcccggactacgcctccgccaagggcgagagcacggtggtctcctcctcgccggcttctccggcagcgccggccgcaggccagacctcggccacaactccgctgtatcgtccggccccggaatatggcgcttatggtccgaccccgactcaggcacagggccagcagggcggccaggccggcagcaatgcccagcccacgcagcaattcccgttcggtcagcctgcacagcaaaccccacagggccagcagggcaaccgcaatccctactacaccaataacccgcagccgcagggcaacggcaatccgttcaatccgcccacgcagccgcagcagaacaacggcaatccgtttgccagccagtccggtcagaatggccggaatggccagcagccccagcagggcggtctgttcggtttcggcactcccggtaccggtacgccgaacggtcaaggcccggcccagccgggacagcccggtcagcccggccccgccaagcagggcatgtccaagacggcgagcaacatcctcatcgccgtggtcgccgccgttctggctgcgggcctctgcctgggcctcggttacggcgccctcaccagcggcctgatcaccttgccgaccagcaattcgctgtccaacgtcagctcgaataagtccggctccgggtccgccaccgccaagagcggcgaagcccccgactggcagactgtcgccagcgatgtctccggctccgtggtctccatccagaccgcgttgagcaacggcaccgccaagggctccggcgccatcatcgacaccgaaggccacatcatcaccaacaaccacgtgatctccggtgcccagcagattcaggtgacgcttgccaacggcaacatgtattccgccacgctcgtcggcaccgacaccaccaccgatcttgcggtcatcaagctcgacaacccgccgagcgacctcaaggccgtgaaattcgccgattccgacaagctcgccgtcggcgagaacgtgatggccatcggcaacccgctcggctacgacgacaccgccaccaccggtatcgtctccgccctgaaccgcccggtgaccgtgaccgacgacaacaacaacgagatcgtcaccaacgccgtccagatcgacgcggccatcaaccccggcaactccggcggcccgaccttcaacgcggccggccaggtgatcggcatcaactcgtccatcgcctcgaccgccacctcatccgactccgcgggttcgatcggcatcggcttcgccatcccgtccaacctcgtcaagcgtgtggccgacgaaatcatcaaggacggcaaggtcaagcacgttgccctcggcgtggtcatcaagtccgacacggttgaagccgacggcgtgacccgcggcggcgcgaccatcaccaagtccagcgccaccggcagcgcggtcgtctccggcggcccggccgacaaggccggcctcaaggagggcgacaccatcgtggccttcaacggcaacgcggtgaacaacaactactcgctgcttggttacgttcgtgccgcggctttgggagacaaggtgacgctgaccatcgtgcgcgacggcaagaccatggatgtggacgtgacgctcgatcaggaggagtcgtcggtgaacggttcgtccagctccgattccaacggtaacagccagaataagcagaacaaccagaataaccagaacggcaacggccggaatggttacggcaatggcaacggcaacaacgatggcggcaccggtgatggcggcggcttctccgacccattcggcctgtggtaaagccgactcgacaacgtcacacggcgttgagcggtaaccgttgaacaccgtgtcagacaagcaaaggcccgtggcagtgagcaaactcctgccacgggcttttcgtatgcgctattgtgccctgcgcccatgccgccaacgtagtttcgatatccggcatgtcgcgcagcgctcgctgatagggtaggccaagcactgagttcgggcgacgttccgaacacagcgcatatttcaatacaaaactgaatacatttctttacgccgtgtatcggaaggtcgcgcgggagccgagcaaagcgaagccccaggcaaagccgccggtgggttaacaaggcgtgaccgcagcgccgattgcgcgggccacgcttgccgtaccgcaatcgactccgtatacaagcgtaaggagcaatgatgagcagactcatcagattcttcaccaaaattctcgacatctgcaagcttgtgccgatgcttccggtcgtcgtcatcgccgcagttccgctggctttactaggcgattggcgtccgtggggcaatgcgatggcgattccggtacttggcaatccgggcttcggccagtggctggttatcgcactggtgctgattatcgtgattgacactgtgcgcggcatgattgacgatttgcgccacgggcaggtcggagtcgatgtgctggccgtggtcgcgatcctctccaccgtggccgtcgccgaatactgggcaagttgggcggtgacgctgatgatcacgtccggcgaggccattgaggaatacgctcaagccaaggccgagcgcagtctgaccgcgcttatggaagccgcgccgcagaccgcgcacgtcgtcaacctgcctggtgtggggcgtgggtttgctgccgataaaggcgattcgtccgatggcttccggcgtgtgggcttggcgtcgactgccgccgccgcgcaccgcttcgacacggtgccggtcgagcaggtgcagctgggcgacgtacttatggtgctgccgggcgaaaccgtgccggtggacggcgagctgctgtccggcacggccacgctcgacctgagcaatatcaatggcgagccggtgccgcgtgaagtgttcgccggcgcccgcgtgatgtccggcgcggtgaacggctcgaccgcattgaccatgcgtgccacccaagtggccgccgattcgcagtaccagcgcatcctcgagctcgtggcctccgcgcaggaatcgcggccagccgtggtgaaaaccgcagaccgcttggccgtgccctttaccgtgctctcgctggtgatcgccggcatcgcatgggcgatgtccggcattcccacgcgattcgcccaggtgctggtgctggccacgccctgcccactgctcatcgccgcaccggttgcgtacatcgccggaacaggacgcctcgccgcagccggcgtgcttatcaaagcgcaggacgtgctggaaaaccttggccgcgtcacgcaggtgttcttcgacaagaccggtacgctcaccgtcaagcagccgcaggtcgtgcgcgtcgagatgctgcccggtgccgcaacccgtctcaacgaagaccatgtgctgatgatggccggcgtggtggaaagctactcggtgcacatcctgtccaaaggcatcgccaaggccggaacggaggcgatggcccgattgcgccagcggttcgaggatggtcagcggctctgccccgagccggaggccagctggcccggccatggacgggagtatccggtcatcaagaatatcaatgaagatgccggcaaaggcgtttccggcgaggtgaacggacatgcggtgcgcgttggccggctgtctttcgcggccgccggggaggaaggattcttggcggtcgatcggaccgcccccagtcggtctgaggatgacctgcgcacacgatttgggctgcttcagccggacgaaatggcgtcgtatgtgtctgttgatggtcagctgatcgcgcgcatcgtgctgcgcgatgtgccgcgcgccaacgccaaggcagcgctcgccaaactgcatgagttgggcgtcaccaagctcgccatgcttaccggtgacaagcgggcttccgccaatatcattgccagcgaagtcggcattgacgaggttcacgccgaactgttcccggaggataaggtagccgcagtcaaggccgctacaggagccggcaaaaccgtcacgatgatggtcggtgatggtgtgaacgatgccccggtgctcgccgtcgccgatatcggtgtggccatgaccgacggcacatccaccgccgcttccgaaagcgctcaggtggtcattatgaatgacaatatcgccgccgtgccgcgcgccatcgccattgcacgccgcaccaagcgcgtgatgcttcaagccgtaatcgcgggccttgtgcttgccaccatc

SEQ ID NO: 1025 - DNA, 17544 bp, Unknown
  R117_24m  MAG No. k141_56221
cgatcgcggtggatgtaatggtcgatggagcgccatagcacgtcacggccgcagtccgggaagagttcgggcacgaagtcgagctcggcgtaggcggcctcccacggcaggaagttggaggtgcgctgttcgccggaagtacggatcaccaagtcgcaatcgggaacgtccggattgtacagatggtcggcaatcatcttttcagtcacacggtcgccggaaatcttgccatcacgcacttcgcgagcgatggcggcgcaggcgtcggcgatttcagcacggccaccatagttgatgcagaacaccacatcgatgaccttgttgttcttggtacgctcctcggcggcctcaagctcgtcgatcaccgacttccacagcttggggcgacggccggaccaacgcacgcgcacaccccactcgtccatctgttccacgcggcggtggatgatttcacgcgagaagcccatgaggaagcgcacttcctggggcgaacgcttccagttttcagtggagaacgtgtacaggctcaaataccgcacaccggcttcgatggcaccggcgatagtgtcgaacaccaccggttcggcggcctgatgaccattggtgcggaccatgccgcgctgcttggcccaacgaccattaccgtccataatcacaccgatatggcggggtaccttgttcttggggaagtcgggaatacgggcagggtcgctgaacggagctgcgggaatgtccaacgacgtgtaatcaacgttctcaaaagccatactcatgaatctatcaagcgcagcgaacgaatcgggcgttcgaggtaatactccccccaatcttcaaccaactcctgcacaacccgctccacaggcgcggcatcaagcaccgaccaatcgccacgaatcagtgcatcgaactggtttaacacgaacggcgcgatacggcgcgcatcggtagtgtggtcggcttcgcacatcacgccgccggacgcgatggacaggtacgccggctccgccttgccgcataccacgcaagtacccaatcgtggcgtccaaccggccaaggccaaggcgcgcatcacataggagtcgcctatggcttgcggggcgtgggattgtttggcgagcgcgttcaacgcgccgatgagcagccgatattggttcgtcagctgctcgtgttcggtgctggcgagtttatcgatggtctcgacgatgacgttggcggcctcatacgccgcataatccgccgcgatcggagcaccgtaagcggcgaccgcttcagcctgggagaccacgtcaagcgagcggccttcagcgataagcacatcgactcgcatgaacggctcgagcctggcaccaaagcgtgatttggtgcgacgcacgcctttggcgaccgcccgaatcttgccatgcccacgcgtcaggatggtgatgatacgatcggcttcgcccagtttggaggtgcgcaacaccacaccttcgtctcggtacagcgacatctcatctcctttccccgcgacgcccggcagactctactcaatgaagtagtcagtaaataaacaggccccagaaggcgaacaccaacagtatgtacagcatggtgaaggccaccagccagaacaggactcggcccagacgggtggaggcgagtaccgggtcggcaccggtgacgatgtctcgaacggattcacgacgagggggtatctgaatcagtccgcgggcggaagcgacctctatcagatgcataaagacgcgggaccaagcccatagcaccagcacggacaccacttggatgaccggccagctccaatacatgacgcccggcgtctcggtaggagcgctgccccatgcaagtttgaccacacccataatcacctgtccaagtccggcaaagaagatgagcagtgtggcaagagtggtgagggtcaaagtcagcaacgcgttgccgaaaccatgtgcgaaaccgagtatcacaggccgttccggtatcagcatgcccgcacgtttggcctcgcgtttctcgcgccgccatcgggcatccgccgcgattttgcggcccagcgccaccagtgccagcacgatggatgcgagcagcagcagtaccaccgtgacgtgcaggatcacaccatatatggtgccgacgcgtcttgccttcaaagcgcccggcagaccgattgattggtacagattggtgccggccaccttttcgctggtctgcgtgagtccggcggaagtgccgacggcccaatcgatgagatcgtccacataggcgtccgcaaacggggtgcccgcttcggactcatcccccaaacgcagcacatggttggcgaccggatagctgcgcacggtcacgttccagttatcggctttgtgggcgttgtagagaatcgcacgcacgccgtcgacctgcgccgtcatcacgtcttttgaaccgtaagccacataggtgggtacggcgtaagcggcgggtttgagcgtggcgaggtcggaattgttcagtccgaacaggccggtgtccgcgctgaacacgcgttggacgatggatcgatagccttcgttcgcgccgacaagagtgaagtcctgggtgacgaaaaatcccagtgattggcgtgggctgaacaccatcgggctcagaagaatctggaaggcgacgtccggatcgtcctcgagcagatatgaggagatccatgtcgattcggaggtggcatagatgccgaccttggcggcgtctacatcgctttgggctcgtaggtattcgatgacctgatcatatgccttggctgaggccggataatcgcggttgatgtcggtggtgctccagacgggtttgtcgagcactgcggtcacaaagccggccgaagccatatcggaggccacatcgccaaaggagttgtcacaggtgccgtatccggcaccgtgcatgaacaccacgccggggcgcttgcctgatgcgttctgaggttcccgaatcaataccttgatggcttggacgccgtccgcattggccttgccccgatcaccaggctccttggtcagattgccgtcgctggtcatgttcagcgtgatgtatcgctcggtgacctcatacgtgcctttcgccggcagcgtttctccggacgggttatcgaaggtgacttcggtatcgtcggtgagcgtggccatcgactggccggtgggttcgatgttccaaggcaccgtggtcaggttggaaatggagaccagcacgccgatcaggataatgaagatgggcaggctgaccatcagccggtgggtgctggtccacggcttggatcgaacagtcaggcgatgctcttcttcttgcgacacgtgcgctattgtaatctgaccgcgatatttacgccgagggcctattcggccgaatcagtgaccgggatgctggattgggaccacgaccgggccggtggaattgacgggcacttggccgtcggtctccatttgggcggcgatatcgttcgctatggtgagcagcgtgtcgacgatctggtcttcgggcacggtcttgatgaccttgcccttgatgaagatctggcccttgccattgccggaggccacgccgaggtcggcttcgcgtgcctcgcccggaccgttgacgatgcagcccatgacggctacacggatcggcgcgatcacgtccttcaggccttcggtgacggcggatgcgagctggatcacatccacttgggcgcggccgcagctcgggcaggagatgatgtcgaacttgcgggggcgcaatcccatgtattccaggagtttgcaccccaccttgacctcttcgaccggcggcgcggaaagggacacgcgaatcgtgtcgccaatgccctcggccaagagcgcaccgaacgccaggcaggatttgatggtgccttgccaggcggggccggcctcggtaacgccgaggtgcaacggccaatcgcccttggatgcgagcagtcggtacgtttcgaccatggtgatgacgtcatggtgtttgacggagatcttgaaatcgtggaagccgacgtcctcgaacatgtgcgcttccttcaaggcggaggccaccagcgcttccggagtcgggccaccgtatttggcgtagagttccttgtccagcgagccggcgttcacgccgatacgcagcgagatgcccgcgtcggtggcggccttgcagatgtccgggccgacttcgtcgaacttacggatgttgccggggttcacacgcacggccgcgcagccggcgtcgatggcttggaacacgtatttggactggaagtggatatcggcgatgaccggaatcggcgatttgcggcagatttccggcagtgcgtcagcatcgtcctgactcggcacggccacgcgcacgatgtcgcagccggcggcggtcagttcggcgatctgctgcaacgtggcaggtacgttggccgtgagcgtgttggtcatcgactgcacggagatgggcgctcccccgcccaccggcaccgggcccaccatgatgcggcgggacttgcggcgcgggtgcaagggcgattcgctggtcaggtcgaccggatcaccggttttgcggaacggcttttcgatgggattttccgtattcaaggtattcatcattgcttgtttatcaggttgtcggcgcgtcggcgggcttcaagctcaagctggttcatttcctccacgtccgtgaacagcgggttaccacgaagctcggcgtccatctggtccagcacggctttgaccgtgtccacgatgccgaggtacggcagccgatgatcaagaaacgcatgcacggcctgttcattggctgcattgagcaccgccgtatgcttctcggaggcggccaggcagtggcgggccagttgcacggcggggaacgcctcatcgtccaacggctcaaaggtccaagttgcggcttgcgtccagtcgcacgcggcggccacattggtcatgcggtccggcgcggacaggcccagcgcgataggcagacgcatgtccggcggcgaagcctggcaaatcgtggcgccgtccacaaattcgaccatggaatggacgatggactgcgggtgcacggtcacgtcgatgcgttcaggcgacacattgaacaagcgggacgcctcgatgacttcgaggcccttgttcatcagtgtggaggagttgatggtgacaaccggccccatgttccacgtcggatgatgcagcgcctgctcgggagtgatgttctccatgtcgacacgtttccagccgcggaatgggccgccggaggcggtgaccacaagcttggcgacttcggcgtgggttccggagcgcagggattgccagatggcggaatgctcggaatcgaccgggttgatctggttctcgcgcacttgcgcgctgaacagcagatgaccgcccgcgactacggactccttgttagccaatgccagctgggaaccggccttgagcgccgcgatcgatggttcgaggccgatcgagccggtgatgccgttcaatacgacattcgcaccggatccggccatggcgatgaccgaatccggaccgccggtcacacggacaccttgtgcgccggcctgtgcgagagccgcttgcagtgctggaaccttggtctcatcaaacaccgcgacttcgggcacatggaactgtgcggcctgttgcgccagcagctcgatatgtgctccgcccgccgccagaccggtgacggtaaatcgttcagggtgacgcgagatgacgtcaagtccttgggtgccgatggatccggtggatccgagaatgatgacggtggagttggaggctatgctcacttttccttcttcgtatcgtcattgttcagtgtggggaacgacaggtcggggatatccgaatcgaagttaccgccaagcgggaacagcagcgggaacgaatcgttggaatcgtgcttatcctgtgacggctgagctgcttccgtgtcgtgggaggcggcaacgtattcagatgattccacagccggacgggagaccgtgctgtctgcaggctgactatcggatacgcgaaccggaatggagttcgtgttacgatccggcttgctggtgggagcaaaggagaccggcatggcagcggacgcagcctcgtcggcagtgctattcacaggttgcgctgccggggcggagggcgccggggatgaaaccgaacccggtacctcattcaatttcagcgcattcggtgtatcaaggctgggcatcttgggagcgaaggacggcgcatccaccgccggaagttcctgagaaaccgcagccatgtgggcgagagcggccagagaggaaccgtcctgcaccatatccacgggctgttccgcgaacaccgacggggtcgatgacggagctgcggattcgtatgacgactgtgccggagcaaacgagggggcgctgccagcggtcacaccggaaaccggcgcggacggggcactggcgggaggctcagccgcaacagctgcggtaggagccacggaaggcgtctcggagacgggcttcgccgcagactcgttggacgtatgcaccgggtatgctgcgggagcaaaggaaaccggctgttccgcattggtgttattggtgcttgtggaagcatcgaacgatgcaggagccggcgcataggcgatcggtgccgccgcggccggcgccgcgggagcaaccggagccggagcagtgaacaagctctgctcggcctgatgcagggcatcgaatgattcgtcatgagcagcggcagacggcgcaaaacgttcgtcagttgccgggcgctgcgttccggaagcgaacaatggcgagacgccgttcgcttgaacggtcacgttcgtggcggtctgggcaggagccgtgggctcgccggacacgaaatcggccacacgtgcataggattccaagcgactcagcaactgcacgcaggcgttcaggaagtaatcgacctgtcgctcgtcatagcctttcttgcccttgcgctgggtgaagatcacattgttgaccgtattcgcattgagatcggccaaagaccgtacatcgtcttcggtcacgccgtcaacgcccaatgcggccgccgccttgtccacaatctggtcgaccagacgatccacctgcttcttatcgtacgaaggctgcttgggcgctccggacttgaagcgttcgcgctcgtcacgctccgcatggttctggacttcgtgatacagcttctcggtcttcgccttccacgtcacacgcccatgctgtgcgatctcccatgtggtctgcttatcgaccacggcacgttccagacgtccaagcgcggcgtcaacctgtgcgatcacatagccgttcttgcgcaaatcaaaggacacgttctgaatgtcatgctgggtgagattcatgccctcgctgtcatacagagcatgggcgcgctccaagaaagcgtccacctgagcggggtcatacccccacttgcgcttgcccgcacgtgcgatgcccgacttgccgtccccttcacgaagttcctgcgccatcggctattcgacctcctgctggatataaacactctgccacaactttacgtgactattgagacgcatctgaccaagaagaccgaaattcacgattttgtagcagtactgccggtttccttctgcgcgcatctcactgagatttcagaaccccttgccgaagactgtcagggaatatcgtcacagcccatgtctgtggaatgaggggattgcacgaagtgatgaaaaatgaaagtgggcaatgagggactcgaacccccgacatccaccgtgtaaaggtggcgctctaaccaactgagctaattgcccgcaaatgacaacaatagcgtatggccggcactgcgcgacacgtggtgtcgcatacgcgtgccgtagcgctcaatcgcgatgacattcagtcacgcccagcagcactacgcagcacgcgacgccagtcaacacgcttaaagtcaagcgtattgattgaggcttatcagcggcccctgccgaatgcgcgcaggcggatgccgttccagtccgagctgacggtcagcggggtggcggcgttcataccggcggtctgtgcggcggactgcacggtggaggagctggcggcacccgggcggccgggcttgggagtcagtatccacagcgggccgtcattgcccagtaccgcgtaggcgtcaacgatcgtatcggacaattcgtcctcatcatcgccgtcgcgccaccatacgatgacgccgtccacagcggagtcgtagtcctcgtccacgagatcctcgcccgtgagctcttcaatctgggcacgaatggaatcgtccacatcgtcgtcccagagccactcctgaacgatatcgccgggctcgaaaccaaattcttcagcgttctgtgatgccgtttgattcacaggggacacattagcaagtcttcgcgaacaaatgcgttaacgcggccgaaaatcgccgcattgtgggcagacccatgcgagtcgtctcaccagaaacaacgactggccgcgcgtgtcatgcctcgcaatgaggcaaatcgtcggcctgccccttgccgatggccaccaacgcctgatacgcctcgtccagcgtggcgaccttgacgtcgcgcagaccatccggcacgcggccggccaaatccgaacaattcgatgcgggagccaggaaccatgtggcgccatcgcgcttggcgccaagcatcttcagctctatgccgccgattctgccgactttgccgtccttgtctatggtgccggtgccggcgatggtcttgccgccgctctcgttggcgggggtgagtttgtcgatgagaccgagcgtgtacatcatgcctgcggacggtccgccgatgctgtccacgtgcatcgtcaccttggcgtgttgcaatgtactggcgtcaatgcccagttcgtccgcatgggctttggcatacgccagaccgacggcactggccgaatcctgggaaccggccatgtcctgttcgactttcttctgatactggtccgcactctggcccaccggtaccgtggcctcacgcggcatgacctccacctgcggattggcccaaccccagacggcctgcgcgttgatgatcgggtacccgggcacgccggacgcgttcaccgtggtcagcagcagcttgccggaatccttatacgtcgtcacgccggtaccggtgatgtcgataaccgcaccatcctcgaccttgcccagcacgtcttgggtgggtccgggcatctcgatgacgtacgggctgggcagcagcagaatcaccacaccaagcaacacggcgaatgcaccgacgaaatggcgtttcggacgagcggccgcataggcccgagcacggctgattccacgagataggcgcgaatcatgcttcacttcgaacgatggcatgcgcccatcccccgcttccgaatccgcagtcgggctcttctgctcctggacgaagtctggttcctgattcctgtggcgtgcaaacataccctacagtgtaagcggagggccgaaatcagccgaaaacgaacataaaccgaaaatattgctcggccacgagcgaacaggcccgggcagaccctacacttggggtaacacaccgcggcaaagaaggatacgcatggacgacaacgcgattcacgagtggctgatcaaatgcttcggccccattcagggcgagatggcctggcagcagatcagccagttgcctgaggagatccgtgaacagctgatgagtcaggaccccagccgactgcccaatccatccgaagtccagcagatgatggccgcgttcagcgccggcggactcaacacgatgggcgatatgcagcgcactgtcgaggaagggccgatcaacgtcaagctcgccaagtcgattgccttgcagcaggccaacgcctccggttccgcgtccagcgtgtccgccgtggatggcgaggcggctcgccgcgcgatgagtgaggcgaacctgtggctggataccgcctgcgagttcaatcccgcgcccggcgatccggatgtgctgacccgcgccggctgggtggaaggcaccatcgaccagtgggcgaagttcgcagctcctgtggccgagtcgatgaacgacgctttggcttcggtgatttcggagcgtcttggcggcgcgttcggcgatggcgagattgccggcatgttcgccggaccggtgccgattccgattcccgacggcatgaaagatccagcccagctgatgaagctgctgggcaacacgtcctttgccatgcagttggggcatgcggccggcaatctgagccatgaagtgcatggcagtttcgatcagggcatcgcattgctgaagaatccggctggtggactgattgcccagaacgccaccgaatacgcgaagatgctgaacggtgagactcctgcgcccgaggccgatacggccggcacttcaaccgactcggtcaatccgttctccacatccaccgacgcttccgccaatcccattggcttcacttcggccggcaacagcgatactccggcaactgacggtaccgcccaagtctccggctccgatgcctccgccgacgccgccgcgttcgaggctgcgctctccggattcgagaccaccgagaaaattcccgaatctgaagtgctttccttcctggccctgcaggaaatggctcatgcccgcctgtatgcctcggtaacgtggctgatgccgcgtttcgaggcgctcatcggcaagtacgcacgcggcatctccatcgatctggatgcgatggaggaacagctgcgtgacgccacgtcgatggatccggagtcgatttccggcgcggtgaatctcaccaaggtcggcatccccgacactcccgaacagcgcgaggcgctggcttcgctggaatcgctgctggcgatggtcgagggctgggtggattgcgtggtgtggcgcgccggtatggcccatctgcctcatatcgaacagttgcgtgagatgatgcgccgcgagcgcgcgatgggtggccccgccgagcgtacgttcgaaagtctgctcggtttgcagctgcgccccaagcgcatgcgcgaggccgccggattgtgggagatgatcaccgccgccgaaggccctgaaggccgtgacgccaagtggtcgcatcccgatctgctgccttcgctgcctagcgacaagcccgcagatggcgcgtctccgtcatccgacgccccttcaggctcctcttccgatgccaatggttccgcctcccaccctgccgcagatggcaagaccggcgatatcgattgggatgccgaactgtccaagctgctcggcgaagatggcgaagacagtgaaaacggcaactcggaggatacgcaggcatagtcaaccgtccttcagccaattcccgttcctgaacgttcaggaacattcacattcattaccgacgcccgtcacaaaaatcgtgatgggcgtctgtgttgcgctccataaccatccttggtccgcgcatacgacaaatgcagcgaatcctcagctcgggtgatgcccacatacataagccggcgttcctcttccagcgcatcccccgtttccggcgaaccgtacggcaagagtccttccgaacagccgatcagaaacacgtgcttgaattccagacccttggatgcgtggatcgtggaaatcgtaacgccgggatcgtcgtttgcggcaagtccggtggcgtccaaacccatcgcctccaatagcgcacgtttggacgcggcatcgtcggcgagcgcggatgattgccatcccgaatccttacgaacgcggtatttcagtcttgcagcgcgcaaagcggcaccgaataccggctgttgggcgttgatgcgggtgagaatcgcgcaatcggacggcttggctccgttggcgaccaaccgggcgatgcgtgccgccacgccctgcgcctcttccatatcgctctcataagcggttcgggtaacgcgcgggccggattcgcgggcggaaaccagtttcaggtaatcctcacggttcggcgcggccgcaagcacccggttggcgagattcacgacttccggcgtcgaacgatagtcggtgttgagattgacatcggcggcgagcggcccgaattcatcggcgaaacgcagcagatcccagctggaagcaccggcaaacgagtagatggtctgggccggatcgcccacgacgcatacgttgcggttcatcgcgctcttgccgtcaggtcctcccccgcccagccacagggtcagcagcctgtgttgcaggggcgagacgtcctgatactcgtcgacggtgagccagccgatggtggaacgaatttgggcggcggcttcgggaaaatcatccatgatatggcatacgagcagcagaatatcgtcaaaatcgatttcgccacgcgaggtcttttcctgctcgtaggcgctgtagacgtcggcgaaccgagcggtgtcgagtccggcgggcggttgccgatgggcgatggcacaggtccgtgcataatcttccaccgccaccaacgagattttggcccaattgatttcggcgagcacatcgcgaacggtcagcggatcggcatcggtacgtgcggtggcgcggatgatcgcgcgggagacgacgtcacgctgatcttcgatcacatgcgggaatggagcctcgcatatgtctgaccagacgctgttgagctgatgcaatgccgctgagtggaaggtcgcggccgtgactccggcagttcccgcacccgaaccggaacgtccggcaccttcccctacgccgagctggcccaaccgtgcgcgcatttccgccgccgcttttaccgaaaaggtgacggcaagcacccgctccggcttccatgccccggtggcgcaggcataggcgatccgccgcgtgaccgtgcgggttttaccggcacctgcgccggcgatgatgcgcaccggcccttgcaacgtagtcgcggcggtacgctgccgctcatcgagcccctcaagaatcccctgcgcctgttccatgcgtccattgtggcacgattcgcgctcacggcacgactcacgcctatggctgaatcgggctcacgacaaaacatcgccagaatcatgcgttttgcgtgtcattctggggtgcgaatcgccacggatgtattagtgtggaagggtgatgaaacgtagcgattatatgttggcggcactcgcctcagccgtcctgccgaatctgggggtggccggcgtacgcgagaacgtgcaggccagcgcaaccgacgaggccaaaggcatcgatcagaccgtgatccaagatgcctcgggcaagttgtacgacgtatacgccactgacagcaaggaagggcgtacacgtctgattcgccgtgtgaaagcggcgcagacactggcagccgcgcgcgagcttggtggcctcggcttcgatatggaccgtgtggtcgcattcgtcccgggagacgtttcccaacccggccagacggccaccgcacaggccgtggggcagcaggcccaggcggagtccacaccgctgaccccgcgcaagcccggtcccacaggcgagacgaccgtgatgatcgccgtccaccgtgatggtcaggcacgtcctctcgacctgttgacattggatgactgcgcggccgtcggcacctccatcggagccattcatcgtctgccttcgacttttctggccaatgccaaatatccggtagtcaccaccggtcagattcgttcgcagctgaccgcctggattcgccgcttacgctccgccggccatgttccccaagaaatcaccgacagctgggcgcgcatcatggacaccgagggattgtggtcgttctccacctgcacggttcacggcggattctccgacggcgacttcctgttctccggttccaccatcaccacggtgaccaactggcaggatatgcaggtcaacgatccggcacgagaccttgcctggattttcggcaagctcgacgaatcccatcgcaacgccgtgctttccgcatacggccgcatgatgggctctcgacttgacgatctcatcatgctcagggccaacctgtggttgcagatggaacaggtgggcgaattcattcaggcgttgaaccgtgcggacaacaatcgcatcatgcagttcaaggcacaggtcgaacgactcgcacaccagttgggcgtgatcaagcacactccggcatcggccccagccgcagggtcggccgccgccgcgtcgacggatcccggttccccctccacaatcaccgtcggcacattgttgcaggacgaccgtcatcaggcacccgccacgcaggtacccgcacaaccgcagcagtccgaaaccggtaccgcggcggccgaggtctcggacgacacgcccgatccagatcgcaccggttccgctgacatcgtggccgctggcgacgtggatcttaccccggaagtcgaacccgatgctgaccggaccgccaatcacccgcaagcgagtgtctccggcaccgcaaccggtacgggatcgaccaaaccgcagccctcacatggcgcttcccattcttcggtgacgatcacgctgaaggagctcctcagtatgaacgggcatagcggcacgatgtcaaccgacgcttcccctgcatctcaatccgccgccccgaccgacgatgcggtgaatgacgatactccggacagtttcgttcagcacggagcctcgagtgcccaaaccacggtgattccgctgttggagcgggaagaacgcgctctgcgcgatgcccgtgccgggttggacgggtatgacagcgagggcaatccgctggccgaatcatccacatcatccaaataatgtcgtgtgcggtgttccgcgccacgccgagcgcgtaacaccgcacatgacgacgcagacacgcggcacaatagagtacagaacctcggccggtgacggttacttaccatgatgtccgtcacaaagacggcagaacaaggagccttatatggatatcgaactgggcattcagaacgtggcacgaccggtgaacttcagcaccgacgaatcagccgataatgtgagccaggccatcgcgcaggccgtggccgacaacgcgacgatcgatatgaccgatgacaagggccgtcgcatcatcgtgcccgccaaggcactcggttacgcgatcatcggctccgaaaccaagcacgccgtcggtttcggcacgctgtgaccgtgaatcgcgcataagcggccttgggcatcatctcaaggccgctttgtattgccgcgaatcaccgatataacgggagcacgccgcgatgaacgatctcttcgacagtggcctcgtcggtgaggttctcccccagtttgttcggtttgcctttgccatgccagtcagatccgccggtgaccagcagctggtgccggcggcagatggtgagcagccgttctcgttgctccggtgaattgcctcggtgccatacctccagcccgtccaatccctcgctgatcaacgcttcgatctggtcatcggacagcagtctgcggttacggctcacatcaccggcatgggcgatcagaatcacaccacctgcccctttgacggcggccaccacttcatgagaggtcggcgagggcgtgggaatatagtatttggatgaggcgctgaccgcattcgcaaacgcttccgaacgagtccgatatacgccggcactcaccaaagcatcagcgatgtgaggccgcccaatggtggttttgtcaccctccttgacttgggcgagcacggattgccaggtaatcggataatcacgagacaacaattcgaccatgcgctgcgtgcgttgcaaccgtgcggctcgagtatcggcgaacaagtccgtgatgtgctgattcgtgggatcatactggtagccgagcatgtgtacggagacgttctcatccgtggcggtgatttcggtgccgcggagcaacggcaaaccgaccctatgggatgcggcttcggcctccggccagccggcggtggtgtcatgatcggaaatggccacgcccttgagtcccaatgccttggattgttcggccaatgtggccggcgtttccgtgccatccgagaagacggtatggcaatggatgtcccacccgacggcgggcggctccaaaggcatcacatatccagtcataccttccatcgtaacctcatctcagcattcccacgcaaggcgcagacaggtcgtcaccttctgccaacggccaagaccagacattcggcactcagctgacaaccgcagaggctaatctggagcgcagcgctatcgaaaggggcatgatgactcgtaacaccgcaaccgacacatcatccagcaccacgaacaccacgccgcttggcttggcggaggcgcgaccgttgattggatggcgccacagtgccacttggacatatctcatcatgctgattgcctcggcagtggcattgggggcctcgctcattctgtccgccgagactttgcagttggctaggcatccggagtccgcgctcggctgcgatctgaactcggtggtgtcctgttcggcggtggcccagtcctggcaggcggaaatcgtgaagttcggcgggctgagctatccgaacgcgttcttcggcatcgccgccgaatcggtgttcattaccatcgcggtgatcggtttggctcgtgtgaaggtgccgcgttggttcgcgacctgcacgtggctgggcggactggccgctttggcctactcgtactggctgagcacacagtcgctgttcgtgattcacgcgctgtgcccgtggtgcctgaccttgatgttctccaccaccatccagttcatggcgttgagccatgcgaccgtggctgtgcagggattgccgtcacgtaaggctgtggctgctgatgatggcgacagcgaggccgaggtcgcggcggtgccggccggactcaataagtattaccgcctcaacatcgacctcatggtcgacatactgtggatcgtggcgatcgtggtactcatcatcgtcaccgaaggcgcggccctgttcgctgcctgattcctttacaacaaatcgatatcggcgaccagcgtggctgctccggtcagtttcacgtcgctgtcggtgacgtccacgcgcagggtgccgccacgtacggtgatgtcccagtggctgatgccggtcttggcccgcagcacaacgcctgtggcgcataggccggtgccgcaggacagggtttcgccgcagccgcgttcgttgacgcgcatcgtggcttcacccacgccggtgttctgatcgatgtcgtcgacccgcacgaattccacgttctggtcggactcgatgaccggagccaccactggtttggtgaccaaatccagtgattcaaccactggcagggacgcgaaggcatcctcgatcaccgcgaccacgtgcgggttgcccatatccacgaacgtgccgcgcgccgagccctcagtgccggggatggtgacctcgtaggcgtcggtttcgccgatcttccactcccccatttcgacttggaacacgttggctccgtacggcctcatattgccgcgtggcgtcagaatcttgacgccggcacgggtgccgaggcggaa

SEQ ID NO: 1026 - DNA, 33402 bp, Unknown
  R117_24m  MAG No. k141_56686
caagctcgcctccacattgccgcaggccgcgaaccgactgcatgtcgggggacgactggtggtggagtcctatcattcgctcgaagacaaaaccgtcaaatcgttcatggcacaagggctgcgagtggatgttccggctggcctgcctgtcgtaccgccggatgcccaaccgtttttcacggatctcacgcgaggtgccgtcaaggccgacgaacatgaaatcgcagccaacccgagatcggcttcggtgcggttgcgggcggtggaagtcagccgtgagattccgtcacgatggaggaaacgctttacgcaaaccgcgcagggcctgaatgacgtcaagatacaaggctccgcgtctccgggcagagccaaaaacacggcacgaattcgtacaaggaggggataacagcatatggcaactgcacgtagcattcgatcgaacgcggctccagcctcgaaccgaccgcacaccaagcatcagtcctcctcccgacctgagctgcgggtggtctccaacccgcgtggaaacgagcagggcaatgtcgtcggacgggtcatcgaatggaccagaacaagaagcgcaccgctggtgcacgtggccattgcagtgatcttcctcgtcggcaccttgttcggcgcgctgatgctgcgtacccagatggtgcagaactcgtttgaggcggcacagatcgaaaccaacatcaacagacttacccaagatatcgaagacgatcaggccaaactcgatcaattggtcgcgaacctgcccgacaaggccagcgacatgggcatggtcccgcagcagggatcagtgtccatcgacttaagcggataccagtccaacaaaggcggaacccagtgaacaccattcgtcgcatcgtagagttcgccaaggtcaagaccttcgcgttcaaatgcatcgccatcggcgccgcattggcgttggtggcgtcggcatgcgtgattcagctggcctccacccagctcatcggcggccgtcaaaccgcacaagcggccacggctaaccgcaccctgaccgtgacgttgagcgccaaacgtgggcgtatcctcgacgccaacggctccgtgctcgctcaaagcgtggagcgttatactatcgtcgccaatccggaggctgcacaggagttcgagccgattacttgcaatgacaacacccgtgattactgccacgaaattgacggcaaacccgtgggcgctaccggagcggcggccgtgggccgactgctggccaaagtcctggatatgaacgccatggaactgggcgctgatctgtccggtaccgggcagtatgtgattctgaagaaagatgtgactccgcaggtcaagcgcagcatcgaggcgttgcacctgggcggtattgtctggggtgagctgagcagtgaacgactgtatgcggatggcgatctcatgggcgcgctgcttggcggcgtgaacgacaacggcgatggcgtcgccggcatcgagcaggtcgagaacaagacgcttaccggaaccgatggccatgaaacctaccagcgtggtaatggcggcgaagagattcccggcaccatgaccgaatcggtggcggccaaaaatggcgacgatgtcaccctgaccattgaccgtgatgtgcaatggtatgtcaaaaaggtcttgaaggaggccgaatccaagtatggtgcagcgtgggcgatcgccgtggtgcaggatgtccagagcggggagattctcgcactggccgatagcgatgaagtacaggctggtaccgttgcggcgaagatgagcccgtctcgggccgtgtccgaaaccttcgagcctggttcggtgggcaaggttatctccatgtccggctatctgcagatgggactgcataagatgagcgatcaattgtcggtcccggaccacatcacacaggagggccagacctacaaggactcattcgaccatggcactgagcgctggacgctcgccggcattctgcagaactcatcgaacgtcggcatgattatggccggggagaactatccggatgagcaacgctacgagtacctgaccaaattcggcatcggacaaccgaccggactgaacctgcccggtgaatcgagcggtctgctcaccaacccttcggcgtgggatctgcgtacgcgcaacaccatcctgtttggtcagggctacgccgtcaacgccctgcagctcaacaacgtggtggccaccatcgcgaacaagggtgtcaagcagcagcagtcgatcatcaaatcaaccaccgatgccaatggcaagaccactgagaccaagaagggcgaagccacccgcgtggtggatgaaaaggtcgcatcggacatgatgaatgcgatggaatcagtggcggaaggctacaacaagttcgtcaaggtcgatggttaccgcatggccgccaagtccagtaccgcagaggtgcagggctcggatggcacgctctcgtccattatctccgattattccgtggtgattcccgcggacaacccgcgctatgcggtcaccgtggtgctgaaggatccgaatggtgtgttcggcggtctgacggccggccctgtttccgcacagatttgtgagttccttatgcagaaatacgaggtgcctgtctccagtccacgcaaaaatgctattccagtcacgtggtaaggatcaggggagaaaggcgatagcccatgagtgcagtgagcgaatccatcgcccagcgggtgaccctgggaatgctggtcgaacggtacggttttgaagtcgatccacccttcgccaccaatgtcaccattacctcactcagcgatgccgtggacaccgtgattcccggctcgctgttcatctgcacgcatgagcaggaacccgatgtactgcatgccgcacaggccggtgcctatgcggcgttgctgccacgcgcgtccaaagggcagatcgccaatgccgatataccgttgctctacggcgatttcgacgatcgcgtactcggcgatctggccagcggtctggccggcggaccgtccaatgccatggcggtgttcgcggtgaccggtgcggatgagcaggccgtcgacgcaggcgtgtcccagctctccgaattcctgcacatgctgggcaatccggtggcggtaatcaccgcatccgggtccacgtcgatgacacgtaccatgaacctgaactatcctctgggcatcctcgatatgcagcgcgcgctgtccgtgtgcgccgaagacggtgtggcggccgtgatcatcgccatggatgaccgcacgttggccgagcatgcgttggaatcggtgaacgtggatgtactgggcacggaggatgtcaacgcaagcgcaagcttgaacgaattgaagacacgctacgcattcgttgcggaacatgacatgtccatgacctcgtcgacacccgaatcggatgaaatggctgcggattcaccggcaatgtatgaccgcgtccgactcgggcacatgtccttggccatcgccatggtgctggccgccggcgtgaggaaaaacaacatacgcagtgccctgcatgtggccaataatctcaattaagtccgtggatacgggacgaagcgtaatcgtaaaggagtttgaaacaccatggttccgatgagtgtggaggagatcgccaaggccgtcgatggtcgattgatcggagacgccgattccgagtctcgagccaccaatacggtcagcgactcgcggcaggccggccccggatcggtgtttgtggccatccgaggcgagcgtgtcgatgggcatgactttgtggcgaaaaccgctgaacagggagccacggtggccatcgtcgaccatgaggtggagtccgatggcctgccgcagatcgtagtgaaagacacggtcgacgcccttggcgagctcgcccgacacaacatcgttcgccgccgcgagctggacggcgacttcgacatcatcggattgaccggttcggtgggcaagaccaccaccaaggatctgctctcctccctgcttgccaccgtaggcccgaccgtggctccggtgggatcgttcaacaatgagatcggcctgccgctcactgcgttgcgggtcgatgagcacacccggttcttcgtggctgagatgggtgccagccatatcggcgaaatcgcgcgactgacccgtatcgcaccgccgaacacggcaatcgtattgaaggtcggcgtcgctcaccttggagaattcggctcccgcgaacgcatcgcacaggcgaaaagcgaaatcgtgcagggactgcttcccggaggcaccgcggtactgaacgccgatgacgaacacgtggttcccatggccggcctggccagcggcgatgtgctgtggttcggcttgggatcgtcgcaggagcccgaggtgcgggccattgatgtcactgccgaccggtccgatcatgctgaattcacgttggtcgatgcgggcggcaaccatacgccggtgcatctgggcattcctggacgtcacaacgtgatgaacgcgttggccgccgcaaccgtggcgatgcgttacggtatggcacccgaaacggtggcgcggattctggcctcgcagcacaccatcagccctcatcgcatggcattgtccacggtgaatcgcgaggggacttccttcacactgatcgatgattccttcaatgccaatcccgactccatgaaagccggcctgaacgggttgaaggcttggaactcaaatgacggcaaggatccgttccgcgtggcgctgctgggtgccatgctggaactcggcgccgatgagacggcattgcacacctctatcggcacgtatgcggccgaattgggcatcgacgcgatcatcgcggtcggttccgcccaagaccaacatctcgatgcactggcacaggctctggcggacggtgcccgtcagagccaatccgcgtcggtggattgcgtacacgacatcgatgcggccgaacagctggtcatcgacttggcgcgcaaccattccgacgctgtggtactgctcaagggatcgcacgcgtcaggcctgagcgctttggctgaacgctgggcaaagaactgacccgataaccaccccaagaaaccgacaagaaagagaagctgcacgtgattgctctgatcattggaatgctggtgtcgctcatcgtcaccttagtcggcaccccgctgctgattcggctggtccacaagctgcactatggccagtacatccgccaggatgggccgcagtcgcatctggtcaagcgcggcacccccacgttgggcggcgtggtcatcaacttcgcgattctgctcggttgggcatcctccgcactgtaccgatacctgcgttcgggcgacgtgccctcctggtccgcggtgctcgtactgttcgccatgctgtcgatgggtctgctgggctttatcgacgacttcgccaaggtgcgtaagaagcagaacgaaggcctatcggtgaccggcaagttcatcggccagttcatcttcgccaccatatacgcggtgctggcgctgctgattcccaccaaatcgggtttccccagtgcgcaggcgggcatcagcttcatcgaacggccgttcttcaacttcgacttcgccggtcgaaccgtggccatcatcctgttcgtcatctgggtgaacttcctgatgaccgcatggaccaacgcagtgaatctgacggatgggcttgacggtctggcggcaggttcgtcgatgatcgccttcaccggttttggcatcatcgcattctgggaaagctaccacatcaagggcggcagccatggcggctattcctatgctgtgtccgatcctctcgatctgaccgtcatcgccgtatgcgcggccgtcgcctgcttcggcttcctgtggtacaactcgaaccccgcatcgattttcatgggtgataccgggtccctggccttgggcggcctgttcgcagccctgtccatcgccacgcacaccgaattcctggcggtggttctgggtggactgtacgtcatggaagccatgagcgacgtcatccaggtcgggtacttcaagatgacccacaaacgtgtattcaagatggcaccgatccaccatcatttcgaactgaagggttggaccgaaaccaaggtggtggtgcggttctggatgatcgaactcatcttcgtgctgctcgccctgacgattttctacggcgactgggtcacccgctccggcctgctgttcagctagcggaaatctgggtggattatgctcacccacggaattcctatatcaggaggaacaatgcaagtagcggataagacagtggtgatcgctggactgggtgtgtccggcacctcgttggcggaggtattgagggaatgcggcgcccacgtgattggcgtcgacgagaggaagcccgaggccggtctccgctcctttgatgacgtggactgggaccatgtggactacgtcatgtcgtccccggtgttcaacccccgcaccccgttcgtgctggaagcccaacgccgtggcatccccgtgatgagcgaggtggaattcgcatggcagctgcgtgtgaataacgagcgcaccggtactccggctccatggatcggcatcaccggcaccaacggcaaaacctccaccaccgagatgacctcggaaatgctcaccgcctgcggactcgacgcgccgaccgccggtaatatcgcctccggagacatgagcatgagcctgtctcgttgcgccaccaatcttcagcacgacgtactgtgcgtggaactgagctccttccaattgcacttcaccgattcgctggcacttgactgcgcggcgatcaccaatatcgccgacgatcacctcgactggcatggcgggcgcgagaattacgccgccgacaaatccaaggtgttccacaacgccaaacgcgccatcgtctacaatgcgcaggacgccaaagtcagcgaactagcggccgaggcccaaaccgccgaaggatgccgcaaggtgggattcacgctcgaggccccccaggccggtcagatcggcattgaagatggctggatcgtggacaggagcggcgtggccggcggcgcagtgggggagccggtcagactggccgccatcaccgatttcacgcatctggcagagccggacggctcactgtacccgcatctggtggccgatgcattgacggcattggcgttggtgctgggacttggcgctgatcgagataccgcgttgaaggcgcttacctcgttcaagccgggcggccatcgcatcgaaaccgtggctgaggccgcagtcgagggcggctccgttcgtttcgtggacgattccaaagccaccaacggtcatgcggcacgcgcctcgctgtccagcttcccggccaagtctgtgatctggattgccggaggtctggccaagggcagtcgattcgaggacctggtcaaggaccaggcacataccatcaaagcggccgtcatcatcggcaaagaccagcagccgatggtcgaagcgtttgccagccaagctccggacatcccggtgaccatcatcgatcccgaagacaacgataccgtcatggatcgtgccgtcgaagcctgcggcacgtatgccgccgccggcgacatcgtgcttatggctccggcctgcgcctccatggaccagttcaagtcctatgcggatcgaggcaatcgattcgccgccgcagccaagacgtggagcgaggtgcatggcctccactgatacccataagcgtaaggcatacagagcccctgacaggcccgcactcgagatcaccgactacacgggttggcgaagcttgctcaacccgctatggtgctaccacggattccgcatggccgtggtggggctgacatgcttcggcctgatcatggtgttctccagctccacggtcaccatggccgcactgggcaagtcgccgttccttcagcttctgaaccagggcgcgttttgcctgatcggcttggtgctgggcttcgtggcattgacgatgccggtgacgttctggaaacggaccggcgtgttctttgtggtgggtgcctgcctgttgcaggcgctgacctttactccgctgggtatcgacgtctacggcaacaaaggttggctgaacctcggcttcaccactatccagccggccgaattcatgaagttcgcgatgtgcatatggctgccctcgtcgttgcatgcctgcagcaagatgtaccacaagaagggaatcaaagcatatgccgcgccgttggtgttgtatgcgataggcgtggcgctggtgatgggcggcaaggacctcggcacggccatgattctggtctccatcggaggcgtggccttcctgatcgtcggattccccggcaaatggatgggaatcggcgtattgggcgcggtggttatggtcggtgcattggcggtttccagcccgaaccgcatgcgtcgtattctggccacatatggtgattgctcggccgctgacgcgcagagcgtatgctaccagtccattcacgccaagtacgccatcgcctccggaggctttctgggattgggcatcggcaattcgcgtgagaaatggaattacctgccggccgcccataacgatttcattttcgcgatcatcggcgaggagaccggattcgtcggttgcgccatcgtattgctgttcttcgcgattctcgcctggtgcatgatcgtcatcgcattgcaggtcaccgatcgttatgttgccatggtgctgatgtgcgtcaccatttggatcgtgggccaggccatggtcaacatcggcgtggtcgtgggtgtgttcccggtattgggcgtgcctatgccgttcgtctccgcaggtggctcatcaatgatcatgtgcttgacggcggccggactggttgtgggacttatgcgttctcaaccgcagataaaacagtcgcgtcagagcgcgtaagtagactcggtaatcatgaatcaaggcacaccacatatcgttcttgctggcggcggtaccgccggacatgtcaatccgctgctcgcggtcgccggagcgattcgcgacatcgaacccacggcacaggtcaccgtcatcggcactgcggtgggtttggagaaggatttggtgcctgaggccggctacgagctcgacactatcgaaaaagtgccgttcccgcgccgccctgacctgtacatgcttcgcttcccggcaaaatggaagcgagaaaccgccaaggtgcgctccattcttgaaacgcggcatgcggatgtcgtggccggattcggcgggtatgcttccgcccccgtctacgccaccgcacataagatgggcattccgattgccatccatgagcagaatgcgcgtgccggcatggccaataaactgggcgctcgttgggccgatttcatcggtaccgtgtacgaaggcaccggtctcaaaccgcgtgccggagccgacgtcgagcgcgtcggtctgccgttgcgcccggccatcgcctccctgaccaaacgcatcggtgacgatcgtgccgccgtacgccgtgaatcggccgcgcagcttggcgtcgatccgaaccgtccgctggtgctggtcactggcggatcgctgggagcgcaaagcctgaaccgcgccatcgcctcctccgccgcagacctgttggcccacgcacaaatcatccacttgaccgggcgaggtaaaatcagcgaagtacgcgaactggtcacggcctcggccggcgcggacgtgcttaccggcatcggccccgaatcggccggacaaggtgactaccataccgccgaatatctggaacgaatcgatctggccttcgcctgtgccgacttggtgatttgccgcgccggagccggatcggtatccgagctggctgcactgggtctgccggccatttacgtgccgctgccaatcggcaacggcgagcagcgtttcaatgccgagccagtggtgaacgccggcggcggccttctggtcgcagacaaggacctgaccccgcagtgggtgcatgagcatgtgcccgatctgctcgccgatcacgaacgacttgccgaattcggccgcaaggcatgggaatacggcatcagaaacgctgccgaaatcatggcccggcacgttctgcaattagccgaaccatccaaatagtattcagatatcatcccgtgcgcgatacagaccaatcccgtcccgcaacacgagatacggtcataatatagggtgctggaatccccaaaggagttttgaattgtctcaagatcagcccatcgtgcttgaccccacgtatgcctcgttcgatgctgcggcccgccccgcggatctcggcgccacccatttcatcggtatcggcggcgccggtatgagcgttctggccgaaatgctgcacgccgaaggagtcgcggtggacggctccgatcgcgcacacagcgccaaaaccgaccgacttgaaacgctgggcatcaccgttgaattcgggcagcgagccgaaaatgtcgcccaggccgagaccgtggtctactccagcgccatcaaaccggacaatccggaaatcgtcgcagcacacgcggcgggcaagcgcattgtgcatcgcagtgacatcctcgccctgctcatgaacggcaaacgagccgtcaccgtggccggagcgcatggcaaaaccaccaccagctccatgctgtcccacattctggtgaacgccggtgctgatccaagctacgccatcggcggctttatccaaggcccggacggcaccacgctggacggtggacacgcgggcaaaggcgatattctggtggccgaagccgacgaatcggacggcagcttcgccaaataccatccgaccatcgccattatcaccaactgtgaagccgatcatctcgaccattacggcgacgaagcccactaccgtgccgcgttcgttgcccacgccggccgggccaccggtcacgtgatcatcagtatcgacgaccccgacggacttgccgtgctggaggccatgcccgccgacgtgaaatcccataccgttgcctacggcactaccgcgcgtgaatccctgcccgatttgggcggtgccgcgtatgtctggatcgcttcggaaagcgagaccgcaggcagcggcgtcgaacagctcaccctgcatctgccggccgcggtgacggcgggggagccggtgtctcagagcgttgccctgaaggttcctggcgtgcacaatgcgcgcaatgcggccgccgccatcagcgctgccgtgctgctgggcgtgagccccgcagacgcggccaaggcggccggcacattcctcggtgcggcacgccgcttccaggtgcgcggcacggtcaagcaggtcactgtagtggacgattacgcccaccatcccaccgaaatcgcggccctgctggatgcggcccgacgccggtaccccgattcgaccattcgtgtgatcttccagccacacctgttctcccgcaccaagttcttcgcgcaccagttcgccgaatccttggcaaaagccgatgacgtcattatcaccggcatcttcccggcccgtgaaaagcagaccgatttcccggacatcagcccctccaccatcgtggacgcggctgagggactcaaggacgcttccgcaggcacgtggattcagccggtcgaggatatgtgcctggccgccaagatgatggccatgcgcgcccaccacggcgacgtgatcttcaccgtgggcgcgggcgacatcactgacatggatcaggtgctgctcaccgcacttgaggcccatcgggaaagctgcgagtgatgtccgggcgcacggtcagatccgggggcaatgacaacggctcacgtcgttcgtccggaagtccccgcaagccgcgcaccatcggttcacgcggaaacacgggtcactcgtcgaagtctcgcgctccccggtccgtgtcttccgggcatgagatcaacgagccggagatcatcgacgatgtgacggtagccaagggccaggccggtgccttcgtcgatgcacgacggctgcacagcgaggattacgttgccgaaacgctgcaccagaccaccggctccctaggagtcgtatcacgcccgaaagtggtgaatttcaccgaacgcgccaaagaacgcaagcgtgcgaacgtacgtgtcgtcgcgttacgcgtgttgattgctgtcgtcagcgtggctgtagtgacggggctaacgtggctgctgctcttctcgtcggcgtttcgtctggaaaccagcgagatcggcgtatccggtgccaacgaatgggtgagcgcgcagaccatccatgccatcgccgataagcaggctggaaagtcgttgttcctggtctccacccatgaggtcacagagcaactcaagtccattcccggcgtcagcgaggccaaggtctccaaacagttccccaagtcgatgagcgtggaagtcaaggcgcaacggcctgcggccatgctgaaaagaggcgataccctgaccgcggtggattcccaggcgcgtgtgttgaactcggtgaagaacgccaacgtggatggcatcccggtgattgaggtcaaggatatagacgccagtctcaagaaccgttcggtgaaggaggcgctgacgattctgggcgcattgccggaatcgatgcgtaagtccattaccaaggtcaccgctgagacgcaggattcggtgaccaccacgcttaacgacggtgaccgcgtaatcatttggggagactcctcgcaactgaagctgaagctggcggaagtcgaggaaatcgacaagaacatcaccgctggcacggctggctttgccggcaaacatcagattgatgtttccgcatcccagaagcccatcatcaagtgacggcgattcagttggttccgttggttccgttggttccggggcggcgttcgctccgttggtcctgctgacaacgttggtcccgtcaatgccggggcgatgttcgctgccggcgatttgcgcgagtagcgccatagggtgtatgctgaaaagtccggccgaaaagccggaagcttgataactcaagattgggggcgatcggtttcgacggtgacctgttcgctgcagggaagcgtgccgagaacgccgggtccgctcgtggatgaccccggcaaaagaataagtgctaaatctaaccgcactgagttcgctctcgctgcctgatttttagtcaggattaaccagtgagcagccgctccgttcactcctcctcgtctttgggaggatgctgagcgtcgtttagaagacttgctgatgcagttgagcctcagggctgcatcgggactttaactgcggatatgctcgccatcagttgtctgcgacatcgatgggggcagaaaaatcgccaacttggccagcagactacgcacgtagaagactgtgggctcggtcatcggaccggggttcaattccccgcgcctccaccaatccgcctcggcggaaacaagccgcttggctttacgaaagtaaggctgagcggcttttcttattcccgtcgattccctcgtattctctcggtttcacgggataatgtgggcaaaatgtgggcaaaaatcgagcccgcgaagccctctgttacaacgcgagaacggccccgaccggcaagtaggccgactcgggttgagtcgtctgcgatgccggacggggccgaactgtgcgtggtggtcatgcggcgaggtcgaggcgctgtttgatggcgctgacgccgatgagcgcgccggcgaggatgccgagcgcgttgagcgtggtcactatcgcgtccacgtgagtccagccccatgcggggccgaccgtgctgacgaacagggcgagtgcgggcaggacgatgaggcccaaccatttgaggatgtcgtagacgcggctggggattgcgcggttggcttcgatccgacgacctgcggttttggagaccgccgctctaccagctgagctacgcgcataggcggtcatgccggttgattgccatggcacatgaccattgggtggatatgagtaaagcccctgaaccggttgattcagaggctttcacactaatcctgatacggagtatgtcacggggtggattcaccctactcccgcttgtgttttgtttttttcaggcggcttggatggtgaggcgtccgccgagggcgtggattaccttggcgatggtctggaagctggggttgccgtccttgctgaggctcttgtagaggctttcgcgccccacgcccgcgtccttggcgatctgggtcatgccccgggccttggcgacgttgccgagcgcggcctgcatgagtgcggggtcgtcgtattcggctatggcgttgaggtaggcgatgatgtcctgttcgttttcgaggtattcgctggtgtcgtagtcggtgaattcggtgctcattgtcgttgttccttgtagtcgttgaggatgtcgtgggcttgtctgatgtcggtctgctgggtgcttttgtcgccgcctgcgagcagcagcatgagcacgttgccctgcatggcgaagtagacgcggtatccggccccggtgtggaaccgcatctcgctgaccgggcctcccacgggtttgatgtcgccgaatggcctgcctgcgagcttgcagacatcgagccgggcttggatggcggccttcgctttgtggtccctgagtttcttgaaccacttgcggtattcggcggattgcttgatttccatacctctattgtatcctacagactacatcatgtcaagccgaacggccgctggagcccatggccaacgcaagaatctcccgtatgttgaactcccagtagccgtcatcgacgggtctcgagctggggagtttgccccggttgagccagttgctgatccgcttgcggctgacctcgtacccgtagttgtctttgagccattggctcatgcctgccggggttttggtcaggtggattgattcggcctcggcttggctttgctcgcgcagctcggccacgttgacggggtcgccgcatttgcacaggcgcagcgcctcgcccttcgcggccatcacttcgcgtccgcattcggggcagacgccgattatccggcgcgtgcgcggcctgcggtcaaccttggcagagcgtccatggtgcctcgacctgctggctgccgcagtattggcatggttcggtggtgatgactgcacacgttgtactgtagggaaccatgaaagtcgtattgcaacgagtatccgaagcgtccgtggacgtggtcaatgaattgggcacgctggatcccacgttcgagccgcagcagattggcccgggattcatgattctggtgggcgtcaccgatgaggacggcgacaagcagatcgcctggctggcccataagattctgaatctcagggtgttcgaggatgcgcagggcaagatgaaccgttcgatccaggacatcggcggcgagattctctccatctcgcagttcacgctgttcgccgacgtgcacaagggcaatcgcccgagcttcatcaaggccggcaagcccgagcatgccgatttcatgtggatcaagttcgacgaggcgttgcgctccgggggagtgccggtgaaggaaggtcgtttcggtgcgcatatgcgggtcggactggtcaatgacgggccggtgaccatcgtcatcgacaccgagcatgacatgcctgacggaacacgctgaattgcgatagtaatttgacatcatatcccgttccctccaatatgttactaaagcgctttagtcttctgcgggcgagggcgcatgtcgatatgtttcccatgaacgggcagcacaatgatgtggccgcacaagcggcagagataaggggagtgaacagcagatgttcctgaaacctgaacagcaactggagcggtgcaagcgcatagtgcgccagcgcgtggaccctcatatccacccatcgatcgcacagcttgcggtggagtcctttgacattcccggagagccgatgcccactgacgagttcttcgagaagctcaatcgaggggacatcgacttcaagccgtttacgctcggcggtgaatggggcaccacatggggcacagtctggttccgcctgaccggtaccgtgccggccggctacccgaaaggcaagccgctggagctcatcctcgacctcggctggtacccgcactcctgcggcggccatatcgagggcctcgtctaccgtgccgacggcaccgccatcaaagccgtacacccgctcaactattgggtgccgttcatggatgctgagggcaacgcgcaagtgccggtcgccgaagacggcagcttcaccctgtacctcgaagccgccagcaacccgctgctgctcggcgtgcctccgttcattgagaccgaactgggcgaccatgccaccggcaagccggacgagccgtacgtattcaagtccgccgatctggccgaattcgatgaacgctacgagaactactccgtcgatctcgacgtggtgagctccctgatggaattcgccgacaaacagtcgccgcgctactggcaactcgccaaagcattgcagcgttcgctgaacgcctacgacgagcgcaaccccgaatccgtggaagccgcgcgcgcagcactcgccggcgtactggccaagccggccaatgcctcggccatgaacgtcagcgccatcggccacgcgcatatcgactccgcatggctgtggccggtgcgcgagacccgccgcaaggtggcccgcaccgtatccaacgcattggcgctgatggacgccgaccccgacttcaaatacgcgatgagctccgcccagcagtacgcctggctggaagaggatcatccggacatcttcaagcgcatgaagtggcgcattgaagaaggccggttcatcccggtcggcggcatgtgggtggaagccgatggcatgttgcccgccggtgagtcactgatccgccagattgcatatggccgcaaatacttcaaggaacatctcggtgtggagcccaagggcgtatggctgccggacagcttcggctacaccggcgcatggccacagatcgcccgccgtgccgggtacgaatggttcctcacgcagaagatctcgtggaacgataccaccaagttcccgcaccactcgttcatgtgggaaggcatcgacggctcgcgcatcttcacccacttcccgccggcggatacttatgctgcttggtgcaaggtccaggaactcgactacgccgagaagaacttccaggacaaggatctctccgaccgctcgcttctgctcttcggtttcggtgatggcggtggcggccccacgcgcaacatgatggagcacctgcaccgctacgagaacctcgaaggcgtctccaaggtgagcatcgaagagccgaatgacttcttcgacaaggcgcatcagcagcttgcagagaacgccggcccagaaatgcccgtctggaagggcgagctgtatctcgaactgcaccgtggcaccttgacctcgcaacaggacatgaaacgcggctgccgccaagaggaatcgctgttgcgcacggtcgaatacctgggcgcagccgccgtgttgtccgatccggagtacgtctacccgcgcgaggagctggaccgcatatggaagacgctgctgctgaaccagttccacgacatcctgcccggctcggccatcgcatgggtgcaccgcgaagcccgcgaggactatcgccgcgacctgaagcgtctcgctgaaatcgcccaagacatgtgcgccgtgctgcgcaaggccaacccgcaggccgacttgctcgccgaggcccgcatcagccagttccgcaatgacggcgcgtcttggcatgccaaccgcatcaacgaaccgaccgacgcgctttccgtactgacccagacattggacaacggccgtgtactgctggccaacggcgtactgtccgtcaccatcgaggccgacggtacaatctcgtcactgcttgacgaggagcatggccgtgaactggttccggccggcacccgattgggccaatacgaactgttgaaggacgaacccgccgtttgggatgcctgggagatcgaacgcgaatccctgctcatggcgaatgccatgaccggatcaatcgaatcggtcgataccgaaaacggtgcggcacgagtccgtgtgcgtaccgccgacgatgacaccgtcatcaccaccaccatcacgctgcgcccgggttcgcacacgcttgatttccacgccgacattgactggcacgaacgtgaacgcttcctcaaagtcgatctgccgctgggtatcgtggccgaccaagcaacatacgactgccagtatggtctggtccgccgcccgatcgtcaaaaacaccgcatccgacgaagccaagtatgagagcagcacgaaccgtttcgccattatcggcgacgccggttacgcggcggccgtcatcaacggatcggtgtacgggtccgatgccacgccgatctccgggaacgccgccgagggtcgtgactcgggcaccatgttccgactgtcgctgctctccgcgccgaccttccccgacccgcgcaccgatatcggtgcgcatgagttcgactggtccgtggtggccaacgccacggtgggccgtgcgcttgacgccgcttgcgcactcaacgcaccgacgcttcatgacatgcccgacttagcgccgctcgcctcgatcgagtcagcaaacggcaccgtggtgttggactggataaagctggccgacgatggctccggagacctgattgtgcgcgcctatgaggcggccggcggcagggccgatgccacgctgcacgtctgcccggcgctcgcaggcgcttcggtgcatgagaccaacgtgttggaaggcgacgatttggccgccgacctgccggtcgcgctgcaagacggcacacagaacgccgaaggcgccacactgcacttcggcccgttccagctcgccaccctgcgcgtcacgcgctgaattctcgcctgacgcttctgcctccttgtaccatgaggggacagaagtatgtcgtattacggtttctccaattaccatcactcccacccctaccaccagacacagcaaaggagttgaactctccatgtttcttctgcccgatcagcagttggagcgctgcgaccgcgtcatgcagcagcgcgtcaaaccgcatatccacaccacactcgccgcatgcaccttgcgttcgttccacaatcccggcgaaccggtgccctccagtgaatttctagccaaagtgcgcaacggccaagtgcccttcgaacctttccgcgttcccggcgtctggggcaccacatggggcaccacatggttcgaggtgaacggccatatcgacatggcggcggtcaaaggacgaaaagtcgaactcatggtagacctcggctggctcgatcaccgcggccccggattccaatccgagggacttgtctatcgtgccgacggcaccgccatcaaatccgcgaacccacgcaaccactggattccactcgtctacgcggacggcagcagcaccgtagaactcgatgaacatggcgacttcaccgtctatatcgaagccgccgccaacccattcgtcgaaggccccaccccgttctcacccaccgaactcggcgaagaggccaccggcacctgtgacttcccatacacactgagtcgcatggatatcaccatcttcaacgaagacgtgttcgcctactacatggatctggaaaccgtatcttccctgattcgtgagctcaaggacgacgacccacgctactggcagctcgccaaagcactgcaacgctccctgaacatctacgatgaacgcgacttggaaaccgtgtcggcagcccgtgcggcgctcgccggcgtactcgccgaaccggccgcctccagcgcaataaaacacatcgccatcggccacgcgcatatcgactccgcatggctgtggccggtgcgcgagacccgccgcaaggtggcccgtaccgtatccaacgtgctggctttgatggacgaagacccggacttcacgtatgcgatgagttccgcccaacagtacgcatggctggaagaggagcatcccgacctgttcgcacgaatgaagcggcgcatcgaagagggccgcttcatcccggtcggcggcatgtgggtggaatccgacaacatgattccttccggcgaatcattggtgcggcagatcacgttcggccgccgatatttcaaggaacatctcggcgtcgcgccgcgcggcatctggctaccggacagtttcggctacaccggctcttggccgcagatcgcccgccgtgcaggattcgactggttcctcacgcagaagatctcgtggaacgacaccaccaagttcccgcaccactccttcatgtgggagggcatcgacggcacccgtatcctcacgcatttcccgccctccgacacctactgctcgtcgatgagcatgcgcgagctcatgtattcgcagcgcaatttcctggacaaggacctttcccgcaacgccatactgctgtacggctacggcgacggcggtggcggccccacccgtgagatgaccgcacgcatccggcgcgaccatgatctcgccggcgcgccgaagatcgaattcggtactcccgaccaactgttcgaccgcgtgcgtaaggatatcgtcgacgatgcgcaaggggagaccccggtgttcaagggcgaactgtaccttgaactgcaccgcgctaccctcaccgcccagcaggacatgaagcgcggctgccgccaggaggagtcgatgctgcgcgtcaccgaatacctgtgcgccgtggccagtatcaagaacccggactatgtctatccgcgcgaagagctggaccgtatttggaaaacgctgctcctgaaccagttccacgacattctgcccggttcggccatcgcatgggtacaccgtcaggcgcggaccgaatacgcgcgtgacatcgctcggctgaacgagatcgcccttgaagccgggcgcgcgatcgcagtcgtggaacccgatgacgcaaccataaccgacgccgtaatcgccccatattcccgccaagcctgtgagacgtgggtggtacgcccggcttcgagccgagccgaagcgggaaccgcatccatggctcgggtcgccgttacccatgacggcgatacgattgtgctcgacaacggccgactgcacgtgcgcattgaagccgacggcaccgtttcgtcaatcgtcgatcagcgaaccaatcgtgaactggtgcccgtcggcacccgactgggccgctacgaaatgctcaaagacgaacccttccactgggacgcttgggatattcaacgcgatgcattcctcaccgccaacgcgctcagcgaggcatcgattgcaagcgtggacgaaaccgccaacggtggggccgtcgtgcatgctgtcactcgcgcgaagggcgttgaaattcgtacgggcattgtcttaaggccgggctccgccacactggacttcaccgccgatgtggactggcatgccgtcgaacagttcctcaaagtggatatgccggtcaccgtgcaagcgctgaacgcgcaatacgaatgccaatacggtctggtcgaacgccccatcaacaagaacacgcgcagcgatgatgccaaattcgaaagctgcacgcaccgcttcgtgcggatcgccgacgccgactatgccgccgctgtggtcaacgcctccacctacggctccgacgtcagccccatccacgccgatgcggcacatggcaccggccgcggcaccatggtgcggctctcgctgctgtccgcaccgttgtaccccgacccacgcaccgaccaaggcgcacactccttcgcgtggtctctggtcgctgacgccgatatgaatgcggtgctggacgaagcggcgcgactcaacagccccgtaataggggagttgcctgatatggcgccgctggtctcgctcgccgacgccaccggcgtcatcgtattggactggatcaagctcgccgatgacggttccagcgatctgatcgtgcgcctgtacgaggccgccggcggcaatgccacggccacactgcgccttgacgccgctctctccgatgccaaggccagcgtgcaggaggtgaatctcatggaggagccggagctggatgccgaactgccgcgcgcgctcgccggtgacgaaccaatgcctgccgacggtgcgatcgtttcgttggcgccattccagctcgccacgctgcgtattcgccgataagggatattgggcctaggctcgatattttgggtcgcgcccaaccgtaacggaaccggaacagaccggctctgccatacggttgggcgcggcccattattgtatgagaagagggagagcgatcccgttgggcaaatatcaatgcgacacgcgacgatgaattcgttgcgtgcatgtttcgattgtgttatgtttttactaaaccgatttagttaacaggttcgcgactggccggaagctaaaacggtttagtctcagcgatgagaactgaataaaggttgtgataccacgtcaatcaccgcgacgggtgactgtgctggagcacaacgattaggtttctccgtccacagcagggcggggtgaaaaaggaaccaaaaggaaaggaaaacatcatgttttctatgaagaagatcctcgccatcgccggtgccggtgcgatgctcgtatcagtggctgcctgtggtagcggaactgcgggggatgacggcggcaagaaggagatctccttccagacctggaacctcaagaacgacaagtacaccccgtatttcgaggcgctgatcaaggcctatgagaaggaccacccggacgtcaccgtcaagtggcttgacgccccgtccgatggttacgaagacaagctgtccagccaggctgcggccggcgaactgccggacatcgtcgacggcggcaactccatcctgtacggtcttgccaaggccggcgcgctgctcgatgtctccaagcaggctccggatgcggaaaaggactactacgaaggcgcatggaagtccgtgaccatgcagggcaatggcatcgagaagggtgcctacggcctgccgtggtatgtcaacgatggcccgacctactggaacaccgagctgatgcagaagtgcggccttgatccgaacaagattccgaccacatgggatgagtacttcgccgccggcgacaccatcgtgcagaactgcaaggatgtctacctgggcaccacgatgggttacaacaccgaagatctgatgaccgcaggcgtcaagtccttcatgaacgatgaccacagcaagtacaccttcaatgatgaggccggtgtcaagcagatcagccgcttcgttgagctgtacaagaagggcggcatcccgccggaggccctcgactcctcctggagccaggccgccgatctcttccagcgtggcaacctggtctccatggccggctccgcctactccgctgacggcttcaagcagaacgctccggacctttacaagaacctcgcagtcggcccgcgtatcagcaacgacggcaagtccgcttccgtggcctacgagatgctcggcatcagcgccaactcgaagcaccccgacgttgccattgacttcgcccgattcgtgaccaacgagaagaaccagatcgagttcgacaagaaggcctccgtgttcccgtccgccaaggggggtctggatgacgactactacaagagcatcgacgaaagcacccttgagggcaaggctctgaagatcacgctcgaccaggtcaaggacggctacggctctcgtccatccgagttcaccgacaacaacggctccaagaacttccagcagcagatcgccctcgctatgcagggcaagcagaccgccaaggaagcccttgacaagtccgtcgagttcgcaaacgagaagctcgcacagtgagcaacgcggcactcgccgctgacaggtcggaggcccgcacggcctccgaccggcctgaaccgatgaacctcaaccacggcaagaagcagaatcgtagcttcggcaccatcattgccccctacctgtttgttctgccagcgttcgcgattgtgtttgtattcatcgtccttgcggcactcaacactttcaggcttgctttcaccaactccacactgctccgtccgggaaccttcgtcggactcgaaaacttcatcaaactgttccatgacgagtacttcctcacggcactgctgaactccacactctacgtgatctgcgtagtgccgttcatggtgatcctcccgttgatcctggcctatctggtcaagggcaactcccgcatcatgggcttcttccgcaccgccttctacatgccggtggttatgtccgccgttgtggtgggtatgatctggaccaacctgctggattccgccggtctggtcaactccgtgctcaaggcattgaagatcatctccaagccggttccattcctcaccgatcgatggggcgtgctcttcagctcgatgttcgtgacaatctggctgggcctcggctactacatggtcatctacctgaccgccctcgccaacatcgatgaatccctttacgaagccgcctccctcgacggcgctggccctgtccgccagttcatctacgtgacaatgcccggcgtgcgctccacgatgatgctcatcatgatgctgtccaccatcgccgcattccgagtcttcaacgaaatctacgtgttgaccaacggctccgcaggccccggcggcatggatatgacgatgtcgatgcttatcaagcgcgaaggcaccggtatccaggcccgcactggttacgcgagcgccatctccatcgtcgtgctcgtcatcgtcggcgtcatgctcatcgtgcagcagatcgtacaaaagcgaggtgaggactgatgaataccaacacgcataaggtcaccgtcggcaaagtcgtccagtatctgattctgattctgatgttcctgctgctcgtcggcccgttcgtctgggaactgtccctgtcgttcaagggcaagggcgacaacgtctacgccgtgcctccctacctgatgccgaagaccccgacgctggacaactacatttccgtgttcaagcaggtcccggtattccactacatgctcaacacgctggtggtctgcctgatctccatcttcggcaacgtggtcttctccacgatggccggctacgcactgggacgcctgaagtggcgtggccgcggactggtgttcaccatgttcatgggcaccatggtcatcccgatcgaaggcgtgatgatctcccagttcctgatcattcgctccatccacctgcagaacacactgctggcagtcgcactgcctggcctgtgcggcgccatcaacatcctgctcatgaccaacgccttcaaatccattccaatggaactcgaagaggcggccatggtggacggtgccaacctatggcagcggttcttccacatctgtgtaccgcaggtcaaaggcacgatgaccgttgtcggcatcttcgcattcgtcggtgcctggaacgacttcctgtggccgttgatcgcgatctccgatgaaagcaagtacaccttgaccctcggcatgaaccgactcaagggcatgttcatccaagatccgcgactgatcgccgccggtgcgctcgtctcgcttatcccgatcatcgtcttcttctgctgcttccagcgctacttcttccgtggcctggaacagggtggactcaagggctgagcggactggaaaaaggaggtactccaatgaaattcggagtcaactacacgccgtcgcatggctggttccacgcatggctcgacccggactgggacggcatcgacaatgatctcaagcagatcagcgaactgggtatggaccatgtgcgcatcttcccgatctggccgtatctgcaacctaatcgcacctggatcaacaagaagggcgtggcggatgtgcgccgcatggtgcacatcgccggcgagcacggtttggatgcctatgtggacgtgttccaagggcatctgtccagcttcgacttcctgccttcatggctggtcacctggcatgcgggcaacatgttcaccgatgcggacgccgttgcggccgagcgtgaactggtcaagaccatgaccgatgagctgtccaaggaacccgcgttcaagggtctgaccttgggcaacgaggtcaatcagctgtctgacaggccgcatcccacgaagatgagcgccacggaccggcagatcgacgcatggctggacgcgctgcttccgaccgccgccggtgaagggcacaacgcgctgtacagcgtcaacgatggcacctggttcatcgatgggcacccgttcactccggtgcagtccgccaccaagggtgatatgacagtgattcactcctgggtgttcaacggcatcgcgcaaggatacggcgccaccagtgaggagtgctcgtcgtacgcactgtacctggccgagctggccaaggcgttcggcaaggattccgagcgcccggtgtggctccaggaagtcggtgcgccggagaatgtgctggaaaccgactacacgccggaattctgccgcaagaccgttgaacgtgccatggattgccggaacctgtggggtgtgacgtggtggtgctcgcacgatgtgcccgccagcatggaagacttcccgttcttcgagcactctctgggcttgttcgacgagcaaggccagctgaagccgatcggccgtacgttcggggaactcgccgcacagtaccgttccgcattgccggctcagccgaagaccgtcgccgtggtgattgatgtggatgaggccggaaacccggtgaaccgcagtgcactcggcccgggaggctcggtgtgcgacctgtggatgaagctgcaggtggcgggccagcgcccgaccatcatcacctcgcaggtggcggccaatcaagaggcgctcgcgcagcgtggcattctggaattgcacgctgacgaacacccctatgccgcccgttactacactgcggtttcggacccatcgttcgaaacggctgattaaaccgatatccggttgtggaatcatctactccttgttccacagccggatattttcaattgcagtgcgcacaattgcagtgcgcagggcaaaacataagacccggtactcgccgaagagcgagaagaacgagaagacaatatacgagaagggggagcgctcaatgagcatcaattgccccgcagtggaccgactcattgattcgatgagcttcacgcagaaagttggccagttgaaccagcgtctgctcggttggaagtccgtggaacgcaatgctgcgggacggctggtggcctcggacgagctcaagcaggagattgaccgatggggtggactcggcaccctgtacggtctattgcgagccgacccatggtctggtcaacattggggtaacggcatacgccctgaggagcggactgaggcgattgccgtggtgcagcaaactgtgctggaacgtggcgcgcacggcatcggcgtattacttagcgaagaggcgcctcacgggcatcaggcgctgggcggcacggtgctgcccaccaatctgggtttgggcgctacgtttgacccgcagggggtgcaggaagcggaagccgcggttgccgcagaactggccgccagcggcattcatatcgcattggtatccggtttggacatcgcccgtgacccacgctggggccgttgcgaggaatgcttcggcgaggatccgctgatggctgcccgcatgtgcgaggccatcgttaccggcatgcagggtgagcatcgcagcaaggtcggccacgggggagtggccgtggtgctcaagcatctggcggcgcaaggcgaggccgtgggcggccgcaacggacagtccgccgtactgggcccgcacgatcttcatgaaattcatctgccgccggtggccgccggtgtgcgcgccggtgccttgggctttatggcagcctacaacgatatcgattctgtaccttgctgcgccaacccgtggctgctcaaggattatctgcgcgaccagctcggtttcgacggcatcgtgatggccgatggcctggccgtggatcggctcgaagacatggccggctccattcccgcggcagggcgtgccgcactgctcgccggcgtggacgtctccctgtgggatgaaggattcacccgcctcgaagaatatgcggatgacgaacaggtagtggccgctgtcgacacggccttgcgccgggtgctggaactcaaagccatgttcggtctcttgcccgaagacggtgccgataccgccgcaattgccatgccgagcgccgacgccatcgcgcaggccactgcggatgggcgtgagcaggccaagcgcatggcccgcgaggcgataacgctgatcaatgatggccagtctgccgccacgctcgacgatatccgcagcgtcatagctgatgctcaagccggccctgtgattgtcgccggcccgtttgccgacgatttcggatgcttcctgggcgattacaccgcccctctgcccgccgatgaacagtcaagcgtctaccggcaattggtggcacgtctcggggaggaccgggttctcttagccgccaagccgagcgatgcgccggccgatcaatgggcgcgtgcgtcgaccgtggtattcgtatgcggcagcaccagcgaacgcagctatgacagtgaattcgacgacaatggcgcggcgaaggccgtaaccgaatacggtgccacctgcggcgaaggcgtggacttgtctgacatccgcctgccttggcgtcaggatgacatgctaggcgaagtcgcggcattgaccaccgctccaattgtttcggtggcggtgtgcggtcgcgcgcatgtactgaccgatgtgctggaacgctccgccgtgacgatctgggccggatatgccggccaatatgggccgcaggccgtagccgacgtattggttgacggagccgacatgtctggccgccttcctgtgaccttacccgcatatcccgcagccattcccgttcgatacaatgaccgccaaagtgccgcgcatgtctacaaggatgcggcggaaccgatattgcgcggcttcggctatggagccggttcgctggcggcggtgacgttcagcgagatgcacgccgatacgcaatcgcatccaggtgaagtgctggtgcaggtgacggcacatgctgacgatcacggggccgcgggtgccgtgaatctgttcgcgcatgtcagcggcggccgccgcatcccacgtttggcaatgcttgtcgattcggtatacatggacttgaacgcgggagagcgtcgcgatatcgcgttccacgtgccgtgtgatcgtctgcgggatgtcggtgacgggcaagttcaggtgacctgcacgctggatggagattcgacgcatacggtcacggcgacgctgccgggggaatattagggggcatgtatgaatgtggggtgcgaagcactggaaccgcatcacacccccggatggagcctgaaaccgcaaggcatccatcctcgcaacctgcaagtctgcgggttgtcacccgatagaggaaacaacaaaggagattatatatgtgttgctcacaaggtagtgaagggcgctcgtccatcggacgcagactcgccgccgtcgcggcgggcgtagtcgccacagcactgatgctcggatgttcgctggccatgggaacggttgcgaacgcccaggagggggattcccccgttgcggcgtcgcaggagggtaacggcaacaagcatttcatggtgtattaccgcgcatggcgtgacgtgaccatgaaaggcgtgaacaccgatttaccggatgacaattggatctccatgtacgacattccatacggcatcgatgtcgtcaatgtgttcagctacgttcccagtggccaggaagcggcggcccagccgttctatgacaagctcaagagcaattacgcgccgtatctgcatgcccgaggcatcaaactcgtacgaggtttggattacagcggtgttatggtcgacggtttcaagacgtggattgctcagcagggcaaaaacgtcgatagcgcgaccgaatcggattatgacgcgtacgccgatcatgtcatcgaaacgtacatgacctcggttggcctcgacggtcttgacatcgatatggaaactttcccggatgccgcgcaggtggcgatttccgatcaggtcatcacagccctcgccaagcgcatcgggccgaagtcggataacccggaaggcacgatgttcctttacgacaccaatggcagctacactgctccgtttaagaacgtttctgattgcttcgactatgttgcctaccagcagtacggttccgattcgaaccggacggccaaggccgctgccacctacgaacagtttatcgactcgaccaagttcgttcccggcctgaccttccccgaagagggtgacatgaataaccggtggaacgacgcgaccgaaccatacctggacagtcatttctatgatgtggcctcatactcgtacgaccacaatctcggaggcatgttcgtctacgcgctcgaccgcgacggacgcacctattccgacgatgatttggcacacatcaaaccgtcgaatctgatttggacgaagacggccatcgcacaaagccaaggcatgagtctggaaaacgccaagcaggctgccaaccacttccttgaccgtatgtcctataccaaggatgttccagccgaaacgcgccaaaccgtggcagcggccaccaacctgtatgaggtgaacaaggcggtgctcggcgcggattggaacgacggatacagcaacacatatgatccgacgctcgaactttccctgacctccatcgacaccacggcacttaccggtgccatagccaaggcggatgcattgctagctgacggcgcaaccgataccgatgtgcggacaacgctgaccacggccagaaacgcggcggtcactggcctgaccagcaagctgtataccggagctgacgttgtctcctggacggcatcgctcaacaccgcaatcgcagatgcaacgggcggcaagcccaagccgcaacagccaggcacaggcgaaacggacaaacctagttccggtgacgcatcacacaacaagccacagtctgcaaccggacgtctggcaagcaccggttccgatggcaccgtcgtgctatcggtcgccgtgattatgacgctcgccggtatcagcgtattcgcagtccgccgccgcggataacaccggttcgaatgaaccgaaaaacagtatttgggatacggcgcgatatgcgaagcgccgtatcccatggcccacatcggtagggacgaagtagtacgcagacggttgatctccggcgtaagccggaagaagtcaaaggagattatagatgagattgtcactaggcgatcccgctgggtgtacttctgcccgggctcaacacaggaaatggctgtgcagcggtctggccgcggtattgtcgatgaccacgctggcggcgttggccgcaccggccagcgccaccggcacaatgccatgggggtgttcctatgtttttgtcaactccttggggagttgacgtgtcgggattccggttggctgtcgtgggcgcgcttcgccctgccggtggcgtccggcgtcctttcccgtgtggcccgattcaggctacgagggctggttcctggtagaggacgccgtttttgagcatgctgtagattacgtcgcagcgtcggcgcacgaggcagatgacagcggcgttgtggtgcttgccctgttcgtgtttgcgcttgtagtaggcgatggacggcgggtgtttggcggacgcgacgaacaaggactgccacagcgcgttcctgaggcgtttgttgccccgtctggagggtctctcgcccttgatgctggtgccggactggccggtggccggagcgatgccgactccgacccgctgcaggccgacttcgactacggtaaggactacgaggcggtaccacgcttcaagtacaccaaggtcggtggttacgaaggcggcgattcgctggtgctgagcggcaagctctccaacgacaacaccattcgcctgtacaagaccgacctggatgtcgctgccggctccaagattgacctgacctacaacaagctcaacagcgatgattccaagttgcagcttggcctcatccttgccgacgaccccgagaccgtggtgccggtggacgtgacggacggttcggcaggcaacggctggaagaccgcgagcgtggacctgtcccagtacgcgggtaagaagatcgccacgctgggtctgatcgtcaaggccggagccgattgacaactaccaggtgaatatcggcaagctcaccgttacggacggcgcggcccacacgcccgccgccccgacgaacttccaggtggaacgcgcctatgcgaactccgacgagctgatcgtcaagtggaatctcgccgactactccaccatcaagaactacttgctctacctggacaataccttcctcggcggccgctacgacgacaccctgtatgtcaagcacctgcccgccaagaccggcacgctcaagctctacgccgtgggcgcggacggctcgcgttcgctcgccaccgaagcgccgctgaacgaagcggcggccgtctccgacgtgaaagtcgaaccaggcaaggacggcaacgtcaaggtctcttggaccaatccgcaggtatccggcgagaaaaccgtgaccgtcaaatccgacaccggttcgtggcgttacgccgcgaagccgtattcccagaccgtcaaggtcgccgccgacaagagcaaagtgacgattgccaatgcgccggttgacagctcccgctatgtggtgaacgtcgataatgcaggtggcactaccgctacggcaacaggtgcatttgccgatgccgccattgagccgtatccggcttgctcggtgatctggaatggcgataatgtgacgctggcccgtcctgagactcaagactggcgctacctgtacatgaccgagaagtggatcggcgagaatggcaagcagcagcaggagaaccagctgggtgctagctacacctactcgcagaacactccgccaatcactggtattatccgtggtcgtaccacacctgcctcatacaccaggtccatcccccgccagtcatgaactgcgggtgcaggtcgaggattacagcggcaacaagaccgatccggtgaagattccgaccgccgacgaactggccaagtgcacggtcgccgaccccacccagccggatgccaagaagtccacgctgccgcggtcgacggttcggccgtggccgacggcaaggccatccgcacggtgcaggcaacggtcaaggattcgttcggcaatccgctggccaatgccgaggtggcgtttgaactgcccgaaggcgtctcggccattggcggaa

SEQ ID NO: 1027 - DNA, 17117 bp, Unknown
  R117_24m  MAG No. k141_57138
agcccgctggccgcctatcaggcgctcgccaagatcgtcaaggacgaggccattgacgtttcgggcgtgcgtggtttcgcgcttgacgaatacatcgggctgccgctgacccatcccgagtcctatcatgcgaccatccatcgcaccgtggtcgaaccgcttggcctggacccggccaaggtccatgtgcccggcgacgtactcaacggcactccgctcgaagacggcgacaaagtcgcgctggccggcccggcctatgatcgtgccatcgaagccgctggcggcatcgacgtgcagatcctcggcatcggcaccgacggccacgtcggcttcaacgagcccggttcctcgttggcctccggcactcgcgtcaagaccttggccgaacagacccgcatcgacaacgcgcgcttcttcgacaacgacatcaaccaagtgcccacccactgcatcacgcagggtattggcacgatcatgaaggcccgtcacctcgtgctgctggcgttcggtgccggcaaggccgaagccatcgaggagacggtggaaggcggcttgtccgcgttctgcccggcttccgcgctgcagatgcacccgcacgccacgattatcgtggatgaggaggccgcctctcgtctgcgccacaaggactactatcgctacgcctacacccacaagccggcctggcagggcatctgagttatcgtgtgctggcttccctctttgtgtgaggggagctgtcgaatgtaatgagactgagggtggttatcggcggcggcatatgtgtattgcttcccgattggaccaccctcagtctcgtttcgcgagccagctcccgttggcgggagcgcatgagcggtaaggagaacaacatgtctgataggaacgagatagtctcgcgcgtgaccgcggcactggagggcaagccggctccggtggcgattcgcaacgcgcgcaaggtggatgcgtgcggcgaacggcgcggatattgggtcgtctccgatgccgccggcgtcatcgtggcggccggcacgggggaggaggccttcgagcactactgccgcacggtggggctcgacccggccgatcgcaacgcggtcatcgacgccgaaggccgtattctgacccccggctacgtggacatccacgcgcacggcgcatgggagaagagcttcgacgacgggtcggatggcatcgatgtggcgcgggccggccacgccgtgcacggcaccacgcgccaggtgctctcgctgatcaccaatcccgtggacgtgatctgccggaacatccgcaccgtccgcgccaagatggagtccggccgccccgacatcctaggctgtcatctggaaggtccgttcctggctctggcccgcaagggcgcacatgacccggaatgtctcaaggatccggtacccgacatcgtcgacgacatgcttgaggcttcaggcgcggcgaacggcaagattggctgcatccgccagatcaccatcgcccccgaactaccccacggcatctccgccatccgccagttcgccgctgccggcgtggtgccggccgtgggccactgcgacgccgactacgagaccgccaaagccggcttcgacgcgggcgcgggcatcatgacccacatgttcaacgcgatgaacggcctgcaccaccgcgagcccggtccgattccggccgcggtggaggatccgcgcgtcaccatcgagctcatcaacgacggatttcacgtgcaggatccgatggtgagcctctccttccggttcgcgcctcatcgtacggccttcgtaaccgatgcaatggccgcgaccgactgcccggacggtgcctacaagttgggtgcactggacgtgaacgtggtcgacgggcatgcgcgtttggtttccaacggcgccatcgccggctccactctgctgctggaggtcgccgtgcgccgtgcggtgtgcgaactgggcttgagcccggtggacgcggtcgaggccgccacattgacgccggccaaggcgttcggcttcgaccggccgaacccggtcaccggggtgcctatcggcctcatcgcccccggcttcgccgccgatttcaaccttgccgatccgaccgattggacggtcgaacaggtgtggtgcgcgggccgcaagctcaagtagcagtaggccgaccggttgacgaatggaaagcattcgtctacaagcatgttcaaatggtgacatgatagcatgttcatctcaccatttgaacgttattcacgtcgtaatacaagaatccgtaatactgctcgataccgcataaaaccggccatggtcgccacaagcgaaacataagtcgatggctgtggaaacgcaggagtaacacatcctcaccatagtcaggcggtaatccacgcccgcagtgatggcgtggaaacaagttatgagagaggattcctgttgaattccaagaagattctggccgccgccgtctccgtggccgccatcgcatccctgaccgcctgcggcggtgtgaaggatgacaccaccgcaggcgccgattccggcaacgccatcaccatcggcaccaccgataagatcaccagcctggaccccgccggctcctacgacaacggctcctacgccgtgcagatccaggtgttcccgttcctgtatgcccaggactacaacacctccgagctgagcccggacatcgccgccgatgacggtacctggaacgatgacggcaccgaattcaccgtcaagctcaaggacggcctgaagtttgccaacggcaacgacctgaccgcttccgacgtcaagttctcctacgaccgcatcaagaagatcaacgacccgaacggcccgagctccctgctcgccaacgtcgaatccgtgaccgctaaggacgacaccaccgtggtgttcaaggattccgtgcctttcgacgtgactttgaagcaggtcatgtccagccccgccggcccgatcgtcgatgaggataccttcgacgccgacaagctcaccgacgccgacaccatcgtctccaagaaggccttcgccggcccgtacacgctgaccgccttcaagatcaacgagtccgccgcctacgctaagaacgactcctacaagggcctgaccccggccaagaactccgccgtgcaggtcaagtacttcgccgacgcctccaacctgaagatggccgtccagcagggccaggtcgacgtggcctaccgctccctgagcccgaccgacatcgaggacctctccaaggactccaaggtcaaggtcgtcaagggcccgggcggtgaggagcgcttcatcgccttcaacttcaagattcagccctacggtgaatcccagcccgacgccgacgctaacaaggccaaggccgtgcgccaggccgtcgccaacctcatcgaccgcgaagagctctccaccaaggtctacaagggcacctacaccccgatgtactccttcatcccggacggtctggccggtcacgatgacacgctgaagtccgcctacggcgacggcaacggcaagccgagcaccgagaaggccaagaaggtcctcgccgatgccggcgtcaccaccccggtcgacctcaagctccagtacaacagcgaccactatggctccgcctccgccgacgagtacgcggccttgaagtcccagctcgaggaaggcggcctgttcaaggtcgacctgcagtccaccgaatggacccagtactccaaggaccgcgtggtcaccgacgattccgacggtgtgtacccggtctaccagctcggctggttcccggactactccgacccggacaactacctgtccccgttcttccgcgacggcaacttcgtgaacaacggctactccaacaaggaagtcaacgacctgatcgtcaagcaggccggcgagaaggatgcctccgcccgtgaggacatcctcaagcaggtccagaaactcgagaccgaagacctctccaccatcccgctgctgcagggtgcccaggtcgccgtcaccggcacctccgtgaagggtgtcaccctcgacgcttccttccgcttccgctacgcctccgtcaccaagggctgatccagcatgagctcccctctttgagggggggagctgtctggcgacggcagactgaggggagcccaactcgtatgactcccctcagtcggcttcgccgccagctcccctcggagaggggagcctttattgctttatataccgattaccaacaccaaggagcatcgcgtgtcagacagcgccacagcgacctccagcaccactccggcgaaagccaagacgaagaagaaccgactgtcaggtagtttcttccgcttcgtgctgacgaggttcctcctcattatccccaccgttttcattctggtcaccatcgtgttcttcgtgatgcgcgccaccggcgacccgatttccgccgccctgggcggccgcctgacacccgccgaactccagcagcgcatccacgcggccggctatgaccgcccgctgatcgtgcaatacgtcgactatcttggcggcctgctgcacggcgacctcggcacgacgctgaccgataaccagccggtgatcagcatccttacgcactacggcgccgccacattcgaactggccttcctcgccctgatcgtggcgctgatcgtcggcatcggcctgggccgactcgccgcccgcaaacgcgaccgtgccgccgacgccggcatccgcatcttcgccatcctgtgctacgccaccccggtgttcttcctcggcctcgtgctgaagctcatcttcgccgtctggctcaacatcctgccagcctccggccgctccgacctgaactccgaaatgcagttcacccgtctggtatcgccgaccggcttctacatcatcgacgccatccagctcggcgacatgaacgtgctcgtcgacgtgctgcgccacgccgtgctgccggccgtcgccctaggcctgctgaccgccggcgtgttcatccgtctggtgcgcaccaacgtcatctccacctacaattccggctacgtcgaggccgcccgctcgcgcggcgtctccgaaaagcgcctgctcaacaagcacgcctggcggccggccctgatcccgatcatcaccgtcatgggcatgcagatcgccctgatgctcgccggtgcggtcctgaccgaaaccaccttcgaatggaagggcctgggcttcatgctgtcccagtacctgaaggcccgtgacttcgtggccgtgcagggcatcgtgatccttatcgccatcatcgtggccgtcgtcaacttcctcgtcgacgtcatcgccgcgcttatcgacccgagagtgaggtactgagatgaccaccgcatcctccgacaagatcaccgtccccggtgacgaccgcctcaccaagctcaacgtcagcaccaagacgccgttctggaccaagattccaatcatcaaggaactgcgcgtggcggtcggctggcagaagggcatgctgatcaccggtctcgcgatcaccgcgttcttcctgctcgtggccctcttcgccccgctgatcgccccctacggccacgcccagatcaaggccgccgacggcacgtccttcccggcgcaggccgcgccctccgccgaacacatctggggcaccaccgccgccggattcgatgtgttctcccgtgtggtgtggggtgcccgcaccgccgtcatcgccatcgtcgtggccgtgctgctctccatcttcgccggcgtgctgcttggtctggtgtccggctactacggtggctgggtggaccgcatcctggtgatgatcgccgacgccgtctactccttcccctcgctgctgctcgccattctgatggccatcatgatctcccacggccagtccggcctgtggagcggcatcctggcctccggcatctccatcaccgtggtgtacatcccgcagtatttccgcacaattcgcgccgaagtgatccgcatcaaggaatccgcgtatgtcgagtccgcgcgcgtggtcggcgcctccacctggcgcatcatgaccaagcacctgttcaagaactccacccgcacgctgccggtgatcctgacgctgaactcgtccgaagccatcctgaccctcgccggcctgggcttcctcggcttcggcatcgagccgaccgccgccgccgaatggggctacgacctgaaccgttcggtttccgacgtgaccgccggcatctggtggaccgccgtgttcccgggcatcgccatcgtgcttatcgtgctcggcatcacgctcgtgggcgaatcgctcaacgatctggccgacccgcgtctgcgcgcccgcaagtccgccggcgaagtggtcggatcgatcgaagacacgtccgtcgacccaaacgagaagccgtccgcacgcaacgaggtgatcgccgaactcgacgcgaacgtcgacccgccggccaccgtcaccgaccatgacccgaccatcgtcgcctccgaatggaccggcgaaggcaagccggaaggcaaggagtgagagatgagcgaagacaacaagaatctcgccgatatcaaggacctgtccgtctccttcatgaccgacgccggttccatcaaggccgtcgaggacgtgaacttcaccattccgcgcaagaccgtggtcggcgtggtcggcgaatccggttccggcaagtccgtgaccgcgcgctccatcatcaagctgctgccggagacggccaccacctccggtgccgtctacctgtccaagcgcgatggctccgattcgctggacgtgctctccctgagcggcgaacagctgcgcgaagtgcgtggttccgaggccgcgatggtgttccaggagcccaattcggtgctgaacccggtgtacaccatcggctggcagattgaagagggcctgcgcgcccacggcatgaaggacaagaaggaactgcgcgccaaggccatcgacatcctgaagaaggtcggcatcccggatgccgaaacccgcgtggactactacccgcaccagttctccggcggccagaagcagcgcatcgtcatcgccatggcgttggtgctgaaccccggcctgattctggccgacgagcccaccaccgccctcgacgtgaccgtgcaggccgaaattctcgacctgctgcgcctcgcccgtgacgagttcgacgcctccgtgctcatcatcacccacaacatgggcgtgatcgcggacatcgccgaccaggtggtcgtcatgtaccgcggccacgtggtcgagcagggcgacgtggagcagatcttctaccatccgaaggacgactacaccaagcgactgctgggtgccgtgccgcgcatcggtcagaagctggtcgtgcgcgaccgcgagggcaagccgatcgagcgcaaggccgattggcgcgaacagccgatcgccgttgaggccaagaacctgaccatcacgtacccgggccatctcatgcagcccgacttcaaggccgtggacggcgcgaacttcaccatccaccgctccgaagtgctgggcctggtgggcgagtccggttccggcaagtccaccaccggccgtgccatcgccggcctgcagaaggtgtccggcggctccctgaacgtgcttggcatcgagatgaacggcgtcaaggagcgtgacttcaagcccaagcgcgcggacattggtttcgtgttccaggatccgggctcctcgttcaacccgctgatgaccatcgcggagaatgtggccgagccgctgctcgtgcaccacaagtacggttccgtggccgaggccaagaactatgtgggcgacctgctggagatggtccagctgccgcgcgcctacatgaaccgtttcccgcatgagctgtccggcggccagcgccagagggcgtctttggcgcgtggtttggcgttgaagccatcgctgctgatcgccgatgagccgacttctgcattggacgtgtcggtgcaggccaaggtgttggagctgttcaagcgactgcaggcggaaatcggcttcgcgtgcctgttcatcacccatgatttggcggtggtcgatatgctcgccgaccgcatcatggtgatgcataagggccagatcgtggagcacggcgatgccgaccagattatgcagcacccggagaacccgtacaccaagaagctgctggcctccctgcccgtgcccgacccgcgcgaacagcagcagcaccgcgcccacctccacgagctcctagcccaagaggcgtaatcgcatagcattggagctccctcgtcagagggagctaactttatatccgctagtactgctgcccatcgaactggaacagggcgtgggcgtcgccgtgctttttgttctcgatgtaagtatggaacagctccagccgctcgctcgtgctggccgccaggggagtgggcaggtcatccagatcgaaccagccgacgctgaggctttcctcgtcgcccacgaacggctcggcattgccgccgggcttcagggcgcacaggaacgaatgatccatgtacatggtgttgtcgccattggcgtaggtcaacaccttgtttgacgaggtgacggccaccaaatcggtgacgatggcatcgatgcccgtctcctccttgatttcgcgcatcaccgtgtccgccggctgttcgcccggctcgttgatgccgtagaccatcgcccattcgcccgtgtccgaacgacggcccaacagcagttgaccatgttcgttcagtacacaaccggtcacgccattgagccatagcagatcatggccgatcttcttacgcaattccaacacaaattccggagtaggcacattgcctccttagtagaaaaaaaggagctccctctgatgagggagcttaagggttacttggcctgggcagcctgcttaatatggtgcgcttcgcgcatgatttcattttcctcgcgcttgtcagcgttcggcgtcgcctacaatcagtccaccggactgattgctttacggctccgcatccacgcttcgacgtcgtcgatctgcttcgggatgccggcggaaatccattcggggccattctcggtcatgagcacgtcgtcctcgatacggatgccgatgccgcggtattccggcggaatcagcagatcatcctcgcggaagtacagaccgggctcgatggtgaagatcatgccgggcgtgatcttcgcgccctgataggactcatagcgggcctgcgcgcaatcatgcacatcaagacctaggtggtgggccacgccgcaggcgagccaacggcggtgctgctggccttgcggggacagtgactcctcgacgctcaccggcagcagaccccaatcgtgcagacgctcggcgatcacacgcatgcaggcgtggtggatgtcggaataggtggcacccggcttggcggcttcgaaaccggcctgctgcgagtccagcacggcctggtacagacgcttctggaagtcggtgaacttgccgttggtcgggaaggtgcgggtgatgtcggccgtgtacagggaatcgacctcaacgccggcatccaccagcagcatgtcgccggtcttcaccacaccggtattgcgcatccagtgcagaatcggggcgtgggggccggaggccacgatggagtcgtaaccgatggcgttgcccagctcacgggacacggcgttgaacgcgccttcgaggatacgctcggaacgcggcttgtcgagcgcggccggcagtgcggagagcagacggtcgaagccgtgcttggtggcgtccacggccttgcgcatctcgttgatttcgtagccgtctttgaccatgcgtgcctcggcggcgaactcgtgcagcttgtcgtcggatgcggagttcttgtccggatcggcgaaaccgttggcctcgcggatggactcgaccatcgaggtgatttcgggatcggtctcgctgaccacgcgcacacgcacggcgccggcctcggcacccacgtccttggacagggcgtcggccagctgggcgatgtcgtgggtctcgatgccggtcatcgcctgcatctccttgaggccagcacgcgggccaacccagtattcgccgtagtgggcggacatgaagaagtcctcggtggagttgtcggcgcgaggtgccacgaacagttccggagtgtgcgtcttgccggcggcggcttcgggggagtcggggtcgaccgggttcaggaccagcacggcgccggcctcgtaatcggaacccagaccggtgtagtaggcgaacgtggtgtccgggcggaacatgtaatcgcaatcattgttgcgcaccttcggctggccggccggaatgaccagacgctcgcccgggaaggctttgcccagcgcctcaaggcgggctggcgtgaacttggaggattcgagaggcttgatctccggatcatcgtcggcccagccggacttcataaactccttgaatgcagccgactgcgggcgcagcgagcggttgttcacacggtcgctcatcgactggttcgcgcccggcgccgtagcgcgctcctcggcctcatattccttgtccttggcggtgatcacttcacccattgccactctcctgtatgtagttgttgtcgaatcatcgattcccacctcatactagtcggctttatgcgatgtgccacgattgacggctgacggtaaaaccaagtacggaatttggacggtcttccggacatgcccatatggcgagtgcatcgggctggaatgcgggcccgtttattgttctcggtagggaaggaggggcatgggctggagcttgccgattgatattggcatattttgcgggctgaatccatgtgaacccatgcgatgaaggttcatcgcatcacgggacccgctgctctgcggatgcctccatctggggcactctggctttgagcagttttacccgcagcggagtgcgttcgatgacgtcggcgtatgtgaaatggacgatttcggtggcaccggctcgtttcagtccctcgtcgcgtgctcgttccttggccaccacctcctgaatgctgcggttatcggtcatggctgggtccacgtatttttgtgtgccgtcgtattcggccactatcacgcgcccgtcatcgagcttccatacgaaatcaacgcggtgctcggtattcgtctgcgggtcggtcaccgttacctgaatacgcggcgtgaggaagcgatcctcgatgatggtgcctcgcgcgagggattctccaccattctcgctcctttcgtttgcatagcgcagcaggcggaatactcgggcataatcgattctccattgaacgcagtcggcggctatctcttccttggttattcccttggcaagggccgagtcaaagatcggcaacgcaaaccgaaaatcaaggtctatagcggcctcgaccaaggttctagccggtgatatcagggataggccggaggcctcgtaatgtgtcttcggattgttcatatcgggcatatagacatgtcgtaagcgctgatggcattgacgagatccatgatcggaagtcacgatggttatgcagccatcatgcaaatgccattgatgttcgaatccataagcacttactgccaccaagccgccaaaaacccactgaggatgctcttgcgcaagagcgcgggccatatgcaacgttcgctccggtggcgtcaaaccatcccagtatgcggtatttgcataaagactgggaatgccgtcatacactttcaacaactcgccactctgggcacggcggcgtagagcggtctgttccgcttcatttcttgaatagacgcatctcagctcattctgcgcggctgatatgagcgaggccactgctttgtgtgtcttcatgacgtcgagcgtagccggaacgaagcagcgtaagtatgaatttcagccattgtggttctagcctcggagcttggctgtcttggagtgagatattcccgataatttcaaggtattaggccgctaattcggaatagtggataacatacaaaacttatccaccatcagtaatgtcattcgaacaacgtgctttggggattcgaacaagatatcatcggcgaaggcggatgtagctggtagagggcggcgaattgacggttaacagtgcttatgctttgtacgccgtcggtgctggttcagatattggctggcttctgtctgagtgtggaatctagcgtcggcgtgagtccaatggttgtatcgtggccgacgatttgctgcgatttattggcggcatagatccagggcttggacggctgccgacggtgagagcagtcataacagtgaatgagcctctgcgagttcaaaagatgatgtagaggacgtttgtgagagtcgtttccggggcaagacatggtcgattgacgatgttgaaatttctcagcgacggcagaatggcatgccttggcgaggaggcgacactgagaggcgatggagtcgggattaatccaggttttggccagctaccgactcgcaagagcatcatagcgtcggtgtaccgccagaagctggcactgtaccgacgctgaatagcatcagcgtcgccggacatacaagttttggattgcagccgactaagaatgggatgccgacggcaagagccgcattgcaactatatgagatggcttcactgtgcgcgctgcaggaaaaggccgcccgcgcggcggcgacatatgagacggtttcactgtgcgcgcacgataaaccaccccggcggctaggatagagggaattgagggagtgcggctccacgcgtgaaggcaagaatcccgaaccatgcagggcaaacctgtgcgaggggagcttcctgcgcatgcggaagcggaatatatgcgggcatgcgtagacatgacgagaatggcacgaacacgtaagtggcatacgcactccgaacggttcaacagcaacacgagcagaggtcagaagaggatatgtcattcgagcatccgaatcggaacaacgagagcatgcgggacgtcgaactggacatcatgagccgcccgccggagcataacaccaccaatctggatctcgaccggatgaacctgatgctcgacatcctgggccacccggagcagtcgttccgcgtgattcatatcaccggtaccaacggcaaaggctccaccgcacgcatggccgaggccatctgccgcgcctacggcatgcgcaccggcctgtacacgtcgccgcatctggagaagatcaacgagcgtatcgccatcgacggccagcagctgtccgacgacgatttcatcgacatctgggaccagaccaaggatctcgtggccctggtggacgccaagatggaggagcaaggcaagccgaagatgagcttcttcgaggtgctcaccgccatggccatctggaagttcgccgacacgcccgtggacgtggccatcgtcgaggtcggcatgggaggcctgtgggacgccaccaacgtgctcaacgcggatgcggccatcatcggcccggtggacatggaccacatgcagtggctgggcgacaccgtcgaacagatcgccaccgagaaggccggcatcatcaagccgaactgcaccgccatcatcgggcctcagccgcatgaggaagccgtcatgccgattctcaccgaagccgccgaacgcaaccacgccatgctcgtgcgcgacggctacgaaatgaccgtgtccgaccgtatggccgcagtcggcggccaggtcgtcaccctgaccacgcccaacggcacttacgagggcgtgccgatcgccaagttcggcgagcatcaggcccacaacgcgcttgccgcgcttgccgcctctgaagtggtgattccggtcaatggcccgctggacggcgacttggtgggcgaggcgttgagctcggtcaagattcccggacgcatcgaacagatccgcacctcaccgaccatcattctggatggcggacacaacgtgaatgccgccgaagccctacgcaaggccatagaggaaagctacgacttcaagcagctggtcggcgtggtcgccatgatgcgcgacaagcaggtcgaggaatatctgggtgttctggagccgatcctgagctccgtggtggtcaccgagaactcgtggcgcgagcgtgtgatgccggccgatgagctcgagaagattgccgtggacgtgttcggccgtgaccgtgtgatcaaggaagcgaacctgcccgacgcgattcagactgccgtcaacatggtcgatgccgaggacgagctgggcgtgggctacggccacggcgtgcttatctgcggcagcttcgtcaccgccggcgacgcacgcctgatgcttgaggagcatgccagccccacgatgaggcaggccatggccgtccatcagccggcggtcgacccggacgattcggatcagccggcagacaaggccgaggatgaggccgccgacaacctcgaggattcggtgagcccggacgacttcgacgtgttcgacgtcctcggcctcggcaaggaacaggccagtgacgccggtaacgccggcaccggcacggccagtgccgacacaggcaccgacgattccgccgacgcccggtaacccgaatccaaggcatatcggatacccggacgcccgacatacggaaaacagtctcacgccatgtatctcaaggaactcaccctccgcggattcaaatccttcgcctccgccaccacgctgcgcttcgagcccggcatcacggcggtcgtcggccccaacggttcgggcaagtcgaacatcgtcgacgccctgacctgggtgatgggtgagcaaggcgccaaaaaccttcgcggcacttcgatggaggacgtgattttcgcgggcacgtcctcccgcccgccattgggccgtgcacaggtgagcctgaccatcgataattccgatcacacgctcgatatcgattacacggaagtcaccatatcccgcaccatcttccgcaacggcggctccgaatacgcgatcaacggctcgcaatgccgtctgctcgacattcaggaactcctttccgataccggtcttggccagcagatgcacgtgattgtgggtcagggacgattggatgcgattctgaaggccgacccgtccggtcaccgcgcgttcatcgaagaggccgccggcatcctgaagcaccgcaagcgcaaggaacgcgcgttgcgcaagttggccaataccgaaacgaacctgagccgacttgacgatttgctgggggagattcaccgccagctcggccccctcggacgccaggcacgcatctcccggcgcgccgacgcgattcagatatccgtacgcgacgcccaagcacgcctgtatgccgaagacgtccaacgctcgatgaaccgccgcgacacggtacgtcaagagcttggcgatgtgcgtaaccagctggccgtcgcccagcgtgaactcgcccaagtcaaagtacgcatcgaacaggtcgaggcgttgagctctgaatccagtccggccatcgccaaggccaaccaatactggcatgaattctcgcagacccgtgaacgactgaacgcgctcgcccagttggccgaagagcgcagccggtcactcaccggccagatcgtcaccaatttcggtgaggatcccggcatgctcgtcaaacgagccgaggaactggagtctcaggccgcggcacaaaccaaggccgtggccgatgcgcgcatcgcactcgacaaggccaccgaggaacgcgccgacgacgagaagaagctcgcctcagtccgccagaccttgacggaactgcgcaaaaccgcacaggagcgcgatgcgcagatcgcccgactgcgcgaactcatcgcccgcgaggaatccgccgtgcaactggcgaccagccgcgccaaggattacgcctcccaacgtgactcgctgacttcccagcgcgacgatgcccagcaacagctggacgcattgcgcagcgaagcggactccattgccgacgatgacggtgccgcattggacgccgcgcgtgcgacgctcgccgaatgccgcgaacgactgaacgaactcgccgataagcagcgcgagatacagtccaagatcatctcgctcaaatccaaggccgatgcgcttgccgacacgctaggcagccgcaatgcctccggatcattggaacgcgacacggacgtggcctcgcttggccgactcaccgacttcatccatgtggccgaaggctgggaagatgccgtggcccacgcgctcgaccagtatgccagcgccatcgtggtacccgaggcaggcaacatgttgcacgccctcgaacgcgctcgggaagataagctcggcaaagccgtggtgctgaccgcgagcattgccggcgatcccgccacagagccgggcacggagtcggaggagagtagcgccgagaacacggcggccgccccgcgatcgggcaacgcgctggcagcactcgtcaccgcgaacccggatgcaaagaacccggcacaggccgaagctgtcgtgcacaccgtgcgtctcctgctggctgatgtagccatggccggcaccgccgacgaagcacagcacatcgtggcatccggcgaagccatgcgggccgtcaccaagaacggcgagaccttcacacacggcgtggcggcggtcggcggctcttccatctctcaatcggacctgtctctggccgcccgccgagacaaggcattggcacaggtcaaacagttggccgcccaagacggcggaatggctgagcaagtggccgaggccaaagccaaacgcgatgaagcggcccgactcgtcgaccaggaatccgccaaacgcaccgaagcccggctcaaagcccaacaggcggagaaatctctgaaatccgccacagaccgcgtcgcatcgttcacccgtcagcttgagcagctggataggaaaatcaccgagacccaagagaatcgcaacgagcatcagctcaagctcgacgatctcaatcgcgctttggcatcggcccggcaatccacagcggaacatgccgatttcgacgaacttgatgaacgtgaacgcacgctggagcgcgaactgaacctgactcgcgagcatgaggtcgccgcgaaaatcgcgtggaccgaagcaagccgcaaaggggagtcactgagccgacaggccgggctgctgcgggacaacgccagagaagccgccgaacgccgcgcccgcatcga

SEQ ID NO: 1028 - DNA, 3984 bp, Unknown
  R117_24m  MAG No. k141_58166
ctcatggcggcggtcgccgccctgtgttcgctgggcaccggcgccatgctgtcgggatacgtgtcttcccgactgttgcgcgattcgggcgtcgcgccgttggaatcgttgcacgtggaggccttgccgcctgagcagacggtgctcatcctgctgctcggatgcgcggtcatcgccgtggcccttgccgtgtcatgcgccgccgtgctgtccaaatccccgaaatccattctttcctctatgcgttaggagtcaccaatcatgtctaactgtctgcaactggaccatgtcgattacgcctacggcgcggcgaagatccttgttctctcggatgtcagcgcggatttcgaatccgggaagatgtatgcgatcaccggcccgtccggcgccggcaagagcacgctgctgtctctgctggccggcctggacgccccctcccggggagtggtccgcttcgagggggaggacatcgccgcatcgggctatgcgaagcaccgtcgggagcacgtgtccctggtgttccaggaccataacttgatcgactacctcacccccgaagagaacctgcggctggtcagcaccaaggccgatatgaagatcctcgaggaactgggtttgagccgtgaggaatccaagcgcaacatcatgcacctgtcgggcggccagcgtcaacgggtggcggtcggccgcgcgctggtcgccccgggccgcgcgatcctcgcggacgagccgacgggcagcctcgacccggagatgaccgacgaggtgattcatctgctgcagcatgccgcccatcagctcggcaaatgcgtaatcgtggtgacgcattccaagcgtgtcgccgactccgccgatgtcgtgctgcgtctcaggagcaagaaactgacccgggcgtgacccacctgggccgggcggcacccatacaccgcttcggcatttcggcaccccggcgaccgggcactccggtatcccggcccttcggcattctggcacccccgcgctccggcaccccggcgacccactcgcgttgccggggtgccgtattcgctctgcgccataatgtgcgtgataatggaatcatgccagtgatgaatgatgaagtgcccggcgaggttgaaccgcaccccgattgttggactggagtaatccagattcgatgatcggaggtgcggttcaaaaggcccttttttgtgtcggattacgaaccgcgcgtttcaccgcttgccgttgtagatctcgttgtcgatcacatcggcgaacacgcggttgacggccgggcgcactaccttcagcgacggcgtcaggcacttgttctcctgcgtgaactgcgtgcccagcacggcgaacttgcgcacggattcggcacgcgagaccgtcgcattcgccttgtccacgtactgctggatctcctcgcgcaccgcggcgttcgtggcgagccggtcgaccggcgtctccgtggacaggccgtgcgcgggcagccaaatggccagcgactccgggtcaagtgtcaccagcgcgccgatgaacgggcgctggtcgcccaccaccacgcagtgctccacgatcgggcacttgacgatctcctcctccagcggaatgggggagacgttcttgccgccggcggtaataataatgtccttgattcgaccggtgatgatgatgcggccggcgtcatcgatctcggccaagtcgccggtcctgagccagccgtcggcggtgaacgcctcggccgtcttctccggcagattgtggtagccgcggaacacgttcgggcccttgacctgcagttcgccttcgtcggaaatgcgaatcgaggagccgggcgcgggctggcctacggtgccgatcacattgtcggtcacgcgcgtggcggcgaacggggcggcggtttcggtcatgccataaccctgaatcatcggcagaccgatgccgttgtagaaatgcgccagatcaagcgaaagtggtgcgccgccgcaggccacatacttgatcttcgggcccagagcaccgcgcaccgtgcggtagacgagcgtttcatacttggcgcgctcggcgatttcggcaaacgtgtgctgctcgccggcctgctccttgcggctccagacgcgcgcagcctcggcggccttgacaaacaggcggcccttccagccggcaccggccttgtgcgaggcggcgttgtacaccttctcgaacacgcgcggcacgcccagcaggtaggtcggttcaaacgaacgcaggtccggcagcagggacttggtgtccggcagataaccgaccacgccgtcatcggaggcgatggaggcgtactggataaatcgtgcgaagcagtgggccagcggcaggaagagcagcaggcgcggatggtcgtcgagaaccacctcatgcaacgcctgcgaggcggcgatggtgatggacacgaagttcttatgggtcagttcggcacccttcgggttgccggtggagcccgaggtgtagacgatggtggccagatcgtccgtgcgcacggtggccacgcgctcgttcagttcctcgtccgaaacagccacgcccagaccttcgagcgcgcccagtgcgttgccctcgatcatgagaatctgcttcaaggcagggcagtggtccttgaccgagtcgagccggtcgaagcgctcgcgattgtcggcaaaggccagcttgaccaccgaatcgttcatgatgcgctgggcctgcggggcggagtcggtgtcatagatcggcacgcttaccgcgcccaccgcggccagtgcgaaatcgagaatgccccattctagacgggtggaggaaaagatggtcaccgcgtcgcccttggcgatgccgagcgcgatcaggcccttggcggccgagaccacgcgctcgtggaattcgccggtggtgacgttctgccagcggccggggccgattttcttggcggcgattaccgtgtccgcgccggtgcgggcaaggcgatcggtaagtagggagtagatggtctggttgtcgcggatttcgatggattcgccaggcgtggtgtagtggtcaagcataagcgggccgtgtccttacgtgcgttgcgtgatggctgttgacaaaatcgagccattctgacaagttaggttacgctggcgtaaggttgcgcgcgttgtgggcaatggagaagttgtctgtctggttttgtggattgtatacaacaccgtgtctaaccggtttgctctacggttatgaccgtgtctatttcgggagccatcgacttcctgcaggacaagtacgcgctgagcccggccctgcagggtctggtcatcagctccatcatgatcggcggcgtgatcggcgccggctcctccggcttcctgtccgataagtacggtcgccgccgaagcactggtcgccgcgcaaaagcagcactaggccgcgtttgctgcgtctattggcgaattgatcatatgggtcgtctgcgtgcagacgacccttttgcgttccgtcggcttctgacaccgtagaaacgtgctttctcggcttcgaggggctgattttgccttatctggaagtctacttccacttcgaggggctgatgcccaagtagacacggccctaaaacggcggaatgacgttgacgtgtagccgtttatacttccgattacatggatgaggagcccctcgaagcggagatagacttccggcaaatgcgaaatcagccccttgaaacggaagtaggcctccggcaaacgcaaaaattagcctcctcgaaacggataaatgcacgtattgggtgtagtggatgcttcagcccctgatatcgaagcatattttttctggttggcgcgtctagcatgcgcactccgcaatcgataattctgtggcctctctcactttaaaagtctggcgtgtgcgagggcgttcgcttaaggtgaatgggattgcgcggaatgtggagcgcagggtcatgaccatgcgcgtgctgcagatccagctgcgctcgctgaccgccatgga

SEQ ID NO: 1029 - DNA, 8302 bp, Unknown
  R117_24m  MAG No. k141_59256
cttatgccggtttcctccgccgtgccggagccgagcgcgttgtcgatcgcggtgcaataccaccagccgggcaggaacttggctatggtcaccatcacggcgggcatcatgtcaatcggcaatgcaactcccgacgtgaacatgatgagcaggccgaagatattggcgaatccgttggcagccgcctccgaaaacccgaattcgctgagcatgaatccacaggcgacggtcatcagcgcatatacgcaggttgcgcagaacgtcatcagcactccttcggcgctcaatgtcaacggatcaagtcctgccgcggccatcagaccgaccgccagcaccagataaccgacgcatacgacgagcgcgaatccgctgagcgtcagcaaccgctggagtcccatcgacgacatgcgttgtggggatgcggtgagacgacggcgaacttccccggtggtgaatatgcccagaatcactgacccgcagacggtcatcgccaaaaacagcggatacagcgcggttttcatggtgttgccaaatctgctggccgccatgtccgaagcactttccgcgtccgcgcttgccgtgtcgatcacagcgaccttatggttcgcgtccatgtcactcgccgatgcggcagccgctttcgatgcctcgaacagatcgccgacgctgggtttctcaatctgaccggccggcagcatatcaagcatgtcctgattcgagaattcaccaaacccgcccatgccatcttcagacgaatcacccgcagtgtctccaatgtcgataccggccatagctgcgagcgccgcactatcgaccgtcgtatgcgagccaatcagtgccgtacgtgtgagtgaaaggaacccgctgacgttcatccgggccatcgagcctgcgccggacgtatagctggtgaccgtgtccacgcttggtggattctcgcctgtcgccacggcatcaatgaaatcgtcggcgaaaccatcggggatgatgacgatcagatccacccagttcgaggcgacggcttgttgcagagtttcactagcatcgtcaacgttcaccagttcgctggaatccgacaggtatgtgcgcatcgatgacgcgatgccgcccctgtccgagtctcgatcgatgacggcgacacgcattttggccggctcgaatgccgcggctgcggaatcggatgtgccagacagcatcgaccagctgatagacagcatcatgatgcccacgaacacgaggtaaatcaacaggtaggccctgtgcgagaacagtacacgcaatgtggctttacaggtgttcatagcgttgcctcctcagcattgcgatgccggccaagaggaataccgcgctcatcgccagcaaaatggcacaagtggtgatgaacggctggtagctgtcgtagtacaaaatgtcgtaaaacaggttcgtcacctgttgcgcggggttgatggtgccgaggatgggcgcgttgcgtgctatccagtcactgatctgcatggcgaagccgccgtacagtccggtgaacagcgacaatgtgcaggcgattccgctcgacaaaccgtatttcgtgtcgtaggaaagcttcggtaccgcgccgagcaaagtaccggctgaactggtcatgaatgcggcgatgattaccgcgaccaccgtcaccggttctcgccctccaaacgaaatgtcgcagatgaagcgaatataggccaatgcgataagcaatgcgaccgatgcgcacaaccagcaggcaaggaaaccggcaataagctgtctggcatggctcaatggcgccacggtgcggcgaatgcccaatgcggacaggttggcttgtgctgtggagaccgtgctgattgagtaccccatggcaatcatgcaggacatggccagcaacgcgtaatagtatctggcgatggcattgggctggaaatgcgtgagcgttgtttcgtgagtcacatcgacgctttgcccgatgctattccagaagttgcggctgagcgcagcctgtggattgtcggcgatggtttgtcgggtgacggcgtcggtgcggttgtacaggtcgatggcgctacgcaatgccgataggctgatatccagtccgacgcttcctgtggtgtcattggccgcggtcaccgtttcccgactgatggttatcgccaaacgcccgttgccgtcagcagccaggtagccgcggactgtgccatcggcgagcagctgttcggctttccgcacggtgtcggctgcggtgatggtcagcaattgctgattgatatcggcgtatgccgtgccgtccaaagactccgacgatgaggccgtctctccagacaaggcatccacaaacgtacgcgccccgtccgcctgctgccagcggctatcttcgacgacggccattggtatcggtttgagctcgtatccctcggacagtccgccgaagaacccgttgaacatggttgccagcacgatcggaaacacaatcatccagaacagtgcctgacgattgcgcaggttcgctttcaatgcgaccaaaaatgtggtccacatgatgtctccttacctgctcccgctggcgggagctgtcggcgaagccgactgagggtggttactacgggaccgcccccgcccgcttcgcgggagcccccgccagcgggggcaagattgttagtcccttaacgccttgccggtgagttccaggaatacgtcattcagggtgggcgggcgactggtcaggtggccgatgttggcgccggagcgtttcaccgcgtcgagcacgtcggtcaggttgtgttcgccgcgccggcatcgcacgtcgagttccttgccgtcgtaggtggcttcgatcacgcacggcagcgcacggacctcggccatcgccgaatccgccagatcgagcgtttcgatggtgatgcgctcgcccgtgtcgatcatgttcttgagctcgtcggcggttccgagcgccaggtgccggccgtggtccatgatgaggatgcggtcgcagatctgttcgacctcctccatgtagtggctggtgtagatcaccgtggcgccggcctggttgagccgctggatgccttccagaatcgaattgcggctttgcgggtcgacggcgaccgtgggttcgtcgaagaagatcaggttaggcttgtgcgcgatgccgcaggcgatgttcaggcgtcgcagcagaccgccggacagtttgccgggccggaacttgcggaagtcctggagtccgacgaattcgatggactcctcgaccagcggcgcgcggtcggttttcttcggcacgtacagcgagcagaagtagtcgatgttttcggtgacggtcagttcgttgaacacggccacgttctgcggcacgatgccgatacgacgtttcagcgcgtaggaggtcggcgtcatcggctggccgaacacgcgaatcgtgcccgaatcgtaggtgagcagcgcgaggatgcagttgatcgcggtggttttgccggacccgttcggtccaagcagcccgaaaatctcgccctggttcacgtcaaggtcaaaatagtcgagcgccaccatgtcgccgtagcgtttgaccagttggctgacgtgcacggccagagccgggttggttgtcgagtcgtgttcggaagctctgttgtcggttgtcatagtcactcccttccttggcgattccatcatcccaagaaggggccggacgccgccacaggcaaacgtcacgacttggccgtacaggcgtgacatttgtcattacagtccttcggcgtcggtctgcatggccttgtacaccttatcgaccggcatcaggctgatctcgtccatcgaatagttggacgccctgtggctttgcgtaatcatcggtatcatccctttacggttgtgtcgacaacatccgacgcttgtgcctcatctattcgggaagtgtaagcccgttgtcttggaccgtcatgcgggtaattccgcacgcccgtcaagttcgtcgtgttccgcacaccgctagactggtggtggaagagcgtcgagccggggaggtgccatgcgcgtgttggccgagatgggcttgctactcgtgttgggcctggttgtcgggctacggtccgatggcgtgttcatcgccggcctgctgttggccgtttccgtcgccggattggtggaatggctgcgtcccgcgcaatggtcttgggtcttgtgtacggcgtatctcgtcatcgccgtggcggtgccttcatggtgcgcgttcatgccgctcatcgcctacgatactgcacagctgccggccctcgcctcgaccggagcccgggctggggcacggactgcggcaagcggccgctcccccagtgtctcgcggaccgcggcctctcgccgttcccttgccgatgcaatacgttcggccccgtggctttcggtcgccgcgcgctggatatgggtgttgccgccgatcgcgctctggttcgcccgtggcaccgaccgtctccagacgctggtgatgacgatggtcgccctgcttggattcgttctgggccgggcccgcgcctcctcggacgaggcgcggcgcgcgttgctgcacgcgcaggacagggcgcgcgaatcctcgcgggccactcgttcgcgcatcgccgacatcgatgaggaacgcgcccagtcgattcgcatggcgaccctcggcgagcgcacgcgtatcgcccgggagatccacgacaatgtgggccatctgctgacccgcgcgatcatgcaggcgcaggccggcaggacggtggccgaggcgacgaacgatacggtcgccgcgcaagggttcgccacgttgggtgcgacgttggatgatgcgatgacgatggtgcgccgttcggtgcatgatcttgaggatgacggcactgatttcgccgcgcagatcgatgatgccgtcacgtcgttcgacggcatctcccccggtttcgccgtgacgctggccaacgacatcgccaaggcgcccgcgccggtctcgcgctgtttcgcgaccgtgattcgcgaggcattgtcgaacgtggtgcatcatagtgcggcgcgcgaggcgagcgtgacgttgcgagacttccccgcgttctggcagttggtcattcaggatccggggccggccgtgtccgagtccgatgggtcccggacggccgctgcccgcccgcgtgcgatgcgtgccacgctcgtcggctcgcgactcgccgccgacagtgttgccgatatgcgcggttcggccgatgagctgatgcgcggcatgggtttggcggatatcgaatcgcgcgtacgcgcccttggcggcaccgcggtctgcgggccgtatgagggcggctggcgtgtgttcgtatccgtgccgaagaagcgttggaccatggaatcgagggattgatgagaatcgcaatcgtggatgatgatccgatcgtctgccagtcgttggagacgattctgacggccaccggcacggccgaggtgctatggacggcaaatgacggcgacgccgccgtgcgccgttatttcgagacgccggcgagccgaccggacgtgctgctgatcgatattcagatgccctgcaccagcggtttggatgccgcgcgcgaggttctggccacggacccggccgcgcgcatactgttcctgaccacgtttgcggaccagtcgtatatcgcgcaggcgatggggcttggcgccaagggctatctcatcaaacaggatgtggcggcggtcgggcctgcgctgcaggcggtgatggccggtcaggtggtgctcggcgcggaagtgctcggcaagctcaccgaacggactccgaatcctgccgattccgacgattccggagataccgccgattccatcgagggcctgcttggcgagcgtgagcgtgagatcaccgcgctggtcgccgagggcctcgataaccgcgacatcgccgccagactgttcctgagcgaaggcacggtccgcaatcgcatcagcgcgatactggacaagctcggcctgaccaatcgcacccaactcgccatcctctggctcaacgcccatcggtgaggggcctttggtcaagtaggtctctccctccgtcatcgcttcgcgatgccacctcgaacgcgattcaggacagcttgcagctgacctcttattcgctcgttgttactcacccttgcctaaaaacacctccggcgttttcttcacggctcggctcatcagagggaggttgtgaaaaaccaacctcagctgtttttcatgacgatactgtcgatggtgttggccacgcgctcgcagtcgtcggagcactgttcgaggtgacggtacacgtcatgccaggcgaacacctgcagcggatcggtgcaggtggtgtgcagcgtgcgcatcgactcgatgaacaggtggtcggcgtccgtttcgatcgtgttgatggcgaacaccagttcgcgcaacgtcttggaatgccggaatcgcggcagttcgttgaccagctcgcagatgctttccgtggcgcgcaccaccatatccgacatctggaccgcatcgtcgcgcatgtcggtcacattgtcgtagtacatgcggttgagtacgccttcgatgctgtcggtcacatcgtcgagcacgtggccaagctcgtcgatgtcctcacggtcgaacggcgtgatgaacgcggtcaccagttcgtccatcatgtcgtggcgcacctcgtccgccgacttctcaatcgcgtgcatgctgtccatgcgttcgcgcagctggtccggattgaagtcgtgcatgacctcggacagcagcttcgcggcctggcatgcgtagtccgcgctgcggcggaatccgtcgaagtagaacacgtctttttgtctcgccatgtgggtggattcctttctagaacacgaccatgaacagtttggccattacgaagctgatgagaccgcaaccggggaaggtgaacacccaggtgagcatcatgtcgcgcaccacgccgaagttgatggcggagaggcggcgtaccgcgcccacgcccatgatggcgctggtcttggtgtgcgttgtggagacggggatgccgagcacggtcatgacgagcaggcacagcgcgcttgacagatcggccgagaagccttggtatttctcgagtttcaccatgtcctggcccacggatttgatgatgcgttcaccgccgacggacgtgcctacgcccatgatggtgctgcacagaatcatgagccagaccggaatcatcacaccggtcacgctgggttggccgttgcagaacgccatgccgaggaacagcacgccgatgaacttctggccgtcctgcgcgccatgcatgaagctcatggccgccgcgcccacgatctgcgcgtaggtgaagaacccgttggtgcggcggcggtccatgccagcgcaaatcagggtcacggccttgcataccaaccagccgacggcgaagccgaacaggaggcttgcgaccagaccgtagagcaccttgacccattcgcccatgttgatgccgccgatgccgccttggatggcgatggccgctccggacaggccggcgatcaggctgtggctttcggaggtgggtatgccgagcagcgaggcgcccacgctgtatacgacgatggagaacagcgccgcgcatagggcgatgagcgccgcgttcgtgtcgccgccgaaatcgaccatgttgctgatggtggaggccacggaagcgttgagctgcgtcatgatgaagacgccgaggaagttgaagatggccgccatgatgacggcggagcgtacgcgcatgcatcgcgtggtcacgcaggtggcgatggcgttgggtgcgtcggtccagccgttgacgaagatgactcccagcgtcagcaacgttgtgacggtcagagccgggttggaaagcacttgttggaggaaatgcgccagtgagacgtccaaggggaatcaacaccttcttcttcgggggcgggagccgtcacactgattgtaacggaagaatggctacgtagttcccatggcgcgcggattatatggtgttgttatgttgcgcgccgcgcatcctttcgtgaaaacagagcgggacagtcgtatgcttcgattcggcgcctgcatcgacaactctcgtcatctaccgaggattcggtcatgcgtgtgcgaaaatggacacggtgtcaatcaggaggtgcacagtggttgtaagcacggattcgagccgcacaatgcccgattgggtgaagtacggggtgttctggcacgtgtatccgctgggcttctgcggtgccgatatcaggcccgccggcccgcgccagttccatggccgcggccttgacgcgatgatcccttggctgga

SEQ ID NO: 1030 - DNA, 5447 bp, Unknown
  R117_24m  MAG No. k141_66840
gggttcgcccgctacgagcccttcacgattcagaaaccctacattattctacggaatctgtcacttctgcagattcggcattccggccttataccagagcaccgcgataccaacacgttctttgacatcgagcttggcaagagacctactaaccgcctttttgactgcctccagttgcattccgagacgctgagcaatttcagcgttagtcattccttcgctgaccagtgctgagacttcgaattcgcgaggtcccaatgaatcgaatttacttctgatggccagagtgtcagcattgatgctgacgttgggaacccctcggcgaatcacttcctttgtaatccgtggtgtgagtatggcgtctccatcgtacaccgagtgaatggcccgacacaggtccttagtcttaacgtccttaagcaagaatcccgaagctccggcgctcaatcccccaaacgcatagctatcctgatcgtatgtggttaaaatcaggatacgtattgaaggatataactgtttgattcttgccgtggcatcgagcccatccataacaggcatgcgaacatccataagaatgacgtcagggaggctctgcccatgtaattgcagtgccgcaagaatatcaagggcatcctgtccattccccgcctgcaacgtcatgcgaagcgcaggatctttcatgaccatgagcgaaaaacccattctggtcggctgctgatcgtccacgatcattacgttaatcatcgtttccctcctgcacaggaatatatggacgtttttgccgtggaataatggctgaaacagtccacccctgccctgatgatgagccatagtgaaggtgcccgccgacccgcgtaacttcagtcactaggccagcaagcccgaaaccggtccccttagcgcggttatctttgttcagcgttggcttaccatcatcacgcactgttatatggagttccccattatccagatgatcccatgaaaccacaattcgcgttatatttttcccatggcgcattgtgtttgtgacagcctcacgactcactcggaagcataaatcagcttgggctagatcgtctggacgccttcctgtctcggtcagaatggcggcgattccaatatcacgagcatgttgaagaatcgggtttatatcattccagctgcacagttcaaccgttcctgtttttgttttccgtaacgtcaccggagatgaaagtttccgtaccgcctcgcgtgtatcacctagactttgccgagctaagttattgatactctttatagcgccttccaccggctcctgtgtcaatccctccaagccttcagtaagtgcaatgatagcggtgagattatggcccacgctgtcatgcagttcggctgcgacgtccgcccgccgacgttcttcatcgcgttcctgttccaattccaggcttcgttgctgttgagcttccaccaaggccgctcccttcctccgctgactgatgttgcgcgaccaaagagctaaaatagcggtcatcgacgcaaggagggactcgggcagaaatatatcagtctgcaaggcggggaaggtcgcaatccagaggccgcaaacgattgacaatcccgacaaaaccattcccgcaatggcacgttcagtggtcgcggccaaggctgtagacgtgtagacggcaaacaagagaggcaacatcagatatggctccgcttgaagcaagcaagcgcatagatacaatccgcatatggcacacaaaatagcgaacggcattctgatacggaacaacagcgccacaacagataagacacataggatggcgagtacggggattccccattgatgctccaacagtttcatggctgccgaatcgcccccgccatgggtgaatacgattctggtgagcatcatcacgtcgtagcataggcacagtatcggcgcgaccatgcgcgcgaccgggctggaccgccagaacgcggccacgtggccgatcaggccggtaaccgcgtggcgcttgtcgtttccggtttttgcggtcatgcgattctccttccctgggtgctgccccatccgtgttgaagcgtatcgcatgtggcctgtgctgtatggcgtgtatgcggttagatgaacttccaaagaagttttccgttgtcagtcggattcctactggttgatgaacatgaggaagatgagcatgccgccggcggcagtcaggcctgcggataggagtatcgcgattgtactgacgattctgtgtcctcccgcctgttcgggataggtgacgatcgcgatgacgagcgaagcgatgaggcatacgaagtcgatgatgacgaggatgttcctgacccagcccgtcgtgtagaggtggatgccgagcagctggggcacgagcgtgcacagaagggaaaggacggccaatgcgaggctggcgcagccgccccatgtccgcccgccgtccggcggtgccggcgtatatgccggttgctggtttgggtattgggatgtgtttgccatggtcattgctccttggatgtgaggttcacggtgccggtgaattggtcgccggtgacgtagatgtagaagctggtgcctgtgacgttgtaggtctggtcgattttgccgttcgtggcgggcacgggtcgtttcgtgtcgctgccgttggtcacgaggattctgccggtgccggatgtgcctgtgatggtgccgttcaggtggatgctggccttcttgccggtgccgccgaatacggcctcctcgccggtgaacttgctgtagtcggccttgtagccgcccgtgtaggagtcgccgtcttgggtgcgtatgccttggaggttcctgtctccggccacgccgatgccggtcgagcagccggtgaggatgatcgcggcgagggcggcgatcagcacggcgatgacgcggcgcggcaggcatatggactgttcgctgttgtgtggcgcgttgtgttgttcgtcgtgtcgttcgttgtgttggccggtggtgtgcatgatgaagcctttccatggtgttaggtggcgggctcccgcaggtgaggggagcccgtggacggttgctcagacggcttgtttggcgagccggtggaagatcagggcgctgatggcggtccagatggcggcggcggtcgtggaggcgagcatggatgccgggctggcgatgttcgcgaggtcgcgggcggcggaggcgctggtgatcagggcgagcggatacggcccggcgatggccggggcggccaggctcagcgcgcatccgccgatggtcaggaccatcatcacgctcatcgtgcccgcgaacgattcggccttcgcgctcacggcctgcgtgagcgtcatgatcgcccataccgacagggtcagcgggataccgcgcagcaggaacgggccgagctgcgcgaggtcgaatccggcggcgaagcgtccgacgaggatgaactctgcctcgaacacgaggacggtcagcgccgaagccgcgagcccgtgcagcatcttgccggcgatcgccgcgttcacggtgccggcggcgttcagccgctgccagttgcggcctcgatgctcgttggcttcgacctgcgcggcgaacgcggccacaagcaccggcatgaacaccatgctcggcaggaggatcgcctgaccccagatcgcggcccaggtcacgccctgcctggcgaactccgcctggtagccggtgtactggctccacccgttgaacatgccgattgcgtcgaacaagacggtcacgatccagtaccacaggttgccggccttgcgcgtctcccagcggaacgccgcccacacggacggcctgcggcgtcccgccgcatgcgcgcggggcatcgcggcatggctcgggccggcagctggattggcggccgggttgattgccgggttcactgcgtttgcgtgtgtcatcgtcttgactccttcaccttgaccacgaccatgctgaccagcgtccagccgaggaacgccatggccgcggaggccacggccatccacgggcgcgcggcgagcagcatcgtggcgttgccgcccgcatccacggatctgacgaacgggctcgcggccgaactcaggccggccgggaacagccagccaagcgcgggtctgttcatcgcacccaggccggagcccagcacgccggcgatgacgcccagacccaggccgatggcctgcttgtcgatcatcatcgagaacatcagctggaccgcgctcgtggccgtcgcggacaggaagccggtcagggccggcacccacaccagcgcggcgaacgagccggccaccgtgaagccacgggccttcgccgcgatcggcacccacagcaacgggatcaggaagcaaagccccacgccggtgccggcgacgatgagcttgcccacgaaccgggccgcgtccgactggccgaacgacagccatgtgaggttcatgcgctccgaggtctccagcacggcgatgcggctggtcaacagggccgccagaatcggggccagcaggctcacgacctgatagacctcgccatcggccaacgcggccgacctcaacgccgggacaggactgccggcgcgtttcatgaacgccatgcccgcccacgccgaaaccagcagcatcatgcccagcagcatccaccagaacgacgagccccgcaccttcaacaactccagacgcgccagcgtgaacgggctgccggtcttcgcgcgggggcgcggcggacggcggcccgtcgccgcgaacactgccgcgccgctcatcgtgcgcctccgtccgccgccgcgaacgccgcccgacccgcagcctgccggatcggcaacggacgacgcggggatgcgtgcgcggatgcgcgtgcggcgtcggaatccatggcattttgcgcctgatgaggcgtgggctcgcggctctgcgggctttcgatcagtttgaggaacgcctgctccagcgtcttgcgctcggaggcgacgcgatagaccgcgacgccctggccgacgagctgcgtgatcagggtgccgatccgctggtccggcagttccggcaggcgcagcacgccgccatccctgcccggcagccaccggtagtcgatccggtccgagcccagcatcgccgccgcgagcttcgggtcggagacacgcaaatcgatgtgcccctcctcgcgcagactgtcgagcgaaccctgatacaacaggcggccggccgcgatgacgcccacgaccggcgccatcttctcgatctcggaaaggatatgcgagctgatgatcaccgtgatgccccgttcgcggctcagacccatgatcatctcgcgcacctcgaccacggcctccgcgtccagcccgttcgtcggctcgtccagcaacaggagctccggctgcgagatcaacgccatcgcgatgcccagccgctgcttcatccccagcgagtagtccctcgccttcttgccctcatggccggccagaccgacc

SEQ ID NO: 1031 - DNA, 2666 bp, Unknown
  R117_24m  MAG No. k141_68446
gcgaaggtgctgtcctggctgctgggcatcgcgaaacggcagatctacatgcgcgtgcggcgcgtacgcccgaatgtgaccgcgttggacgatgcgcccgaaccgcgtgacgatggaccgagtccggagacggccgtgctgtccgaagcgggcgtggatgatctgatggcgttgttgcgccggctgcccgtcgaactggtggagacggccacgttggcgtggctgcacggcctgtcgtaccggcagatcgccgatttgtcggacgtgccggaaggcacggtcaaatcccgtatctcgcgtgcgcgccgtctgctgcgcgcgcaactcgaccgctaaaacgatgcggatggaaaggaacggtgaatcctgatgaccgatcatcttgacgaaacgatcgaccgtttgacggacgagacgcccgacgggcgtctgcttgcggcattggacgccgtggaacgatcccgttcgggagacgcgcctcccgctgcggcggtgatggcgcgcatccgcgcgtcgcggtccccgttggacggaccggcatggtcgtgggcgcgcagtctgcggttgttcatgctgctgctgggccggcagtcgcgggtggtgccgtggcaggtggtgccggccacactggcgttgatggcgttcgccggattgggggcgcggttcttcgcggtcggctggagtgcgacgatcgtgtcccatgcgttctgctcgatggtgctggccggcgtgctgctgagcgtgacgatggcgttcggggattcccgcgcggacatgatctcgtcggccaccccgttgggtacgggggcggtcacgctggtccggctggtgttcatactcgcctgcgacgtcgtgttcggcctgatggtgaccaccgtgatgggcgcgcaggggtatgggacattcggcgtactgctggtcggatggctgtcgcccctgctgctggtcgccggcgtgggcgcgatgctcgcgatccgtttctcctcgggcgtcggcttcggcgtcggcctgctgttgattatcgcaatccggctgaatccgttcgggttcgcgggtctggcggacgcaagccggtccggtgcagcacaatcctccggacagctaggtctggccgtcgcggggctgatggcctgtgtgggggcggtggcgctggccggacgattgtccggggcgcgcatggcggccgcgaccgtctgaccgactcgaagccgataactcatctggtcgttcggcatgtcgcgtgaacttcaggacaggcggccgctacctacttggtgacgaacaaaaagaatgaccgtcaacttcatcggacttcaaggagggtcggcatgacgggaatgattcgcgctcaggcaaggcgcatcggcatgggattgctggcaatgcccgtggcctgtgggattgcggtggcggcagccggcgtcatggtatccggcgtgtggtcgcgtacgcaaacattgatggtggtgaactggctcgcccagctgatggtgatcggctcgggcgtgtgcgtggcggtcgcattgaccggtgacccgctggtcgaggcgagcgagtccacgcccgtgggttggaggcgcgtgcaaaccacacggttcgcgctcacggctgtatccactcttgtgggtgccgtgcttatgttcgcgccgttgcatgtattgggcctatggccgcaggatatgggatggataagtctgatcgcgccggccggcgcgatactggtcgtgggcctggccgggttcgcggccgccgcatggtccgcgtccgcacaggccacggtcatggcggtggtcgccgtatggatgttcctcgccctgctgtgggacccgtacgtgctcgatccggtcacgcaacgcagcatcccaatcgccgtctccatgatcgccgtagtgttcgcgtggcgtctgctgggcgacgaggaacgcaacgtgacgctcgcaaggagaagcatatgagtccttgcaccggtttccggcatctgacccgcgtccacatgatcatcgtgtggcggcaacgttcattatgggtcgcggctgtcccgctggccttgctcgcggttctgctgggcgtgatctccccggcaggaccgcatgaccacggtgcgggcgatttggcgttcatggccaaggcgatggccatgttcatgccgatcgcctacatggccgcgttcaccgacttccacacgcggcactcccgacttggcattggtcaattggaggattccacgcccatccccgcgcccatgctggccgcggctcgcacgctcggcgcgtttctgatcctcatcaccccgtcgctcctgctgctggagtgcgccggcgtcgtccagaccctgcacggctcgtggcgggccataccacaggcattggccgccggactcgcgatcaccgggccggccgtgctgaccgcgatgagcctgtcctcgctgctcggcgcgatcctgcccatgatcgtcgcgcgcatcaccggcgtgctcgcatggttcgcgctcgtgttctcctcgccgatgctgcccgtgccgaccgtcaacggcaccatcctcaacgtgatcggcgacgccgtcggcgccggatggttcgggctcggccccgtctacccggccacgggaggcatcctcgcggtcaccggcacgcccgccaacgcggccatatccctgatcgcgcagc

SEQ ID NO: 1032 - DNA, 17633 bp, Unknown
  R117_24m  MAG No. k141_69418
gcattgatcatggaatcgccggccatctgcatgacaaacagcgtggtgtcgtgcggcatggttcgtgacttggattgctgtgtcatgctgtgcctcccaccctgtattcgaacatctgttcgaatacagtatacggtaggacggcggacaatatcagcgttcggcgacgtgatatttaggcaggatgatttcgaaatcggcgcctcgcgtgtcatcgaccactttgacggtgccgccgtgcaattgggccgcccaacgtgcgatggacaggccaaggccggtgccgcccgactcggtgccgggacccgtcttgcctttgacaaagcgccggaagatatccgaacggtcggacggtgcaatctgggagccgaaattcaccacattggtcacgatggtgccttggctgtcatcctcatgggcattgaccagcacggtggtgccgtcggccgaatgcttcagtgcgttggcgatgatgttggtgaacagctggcgcaggcggtcctgatcgccttccatcgagatgtcggccggcacggtgacgcggatgtcgtgggcgtggccgccatcggcgatttccaacggctcgatggtctcgtcaagaaagtcggcgaagttgaacttttcgatattcagactcgccgcaccggcctccatacggctcaaatccaacaggaaggcgatgaggtcggagagacgctgcgtttgggtgaggatgctctccagattggcgggagtgggctcggtgacgccgtcggccatgttctcgaccatcgcctgcaaagcggaaacgggcgtacgcagctcatggctcacattggctatcatgtcgcggcgcattttatcggcatgttcgagttcgccggccatctcgttgaacgagcgagccagctggccgacctcgtcatgacgatcctgatcgatatccacgcggaccgtgtaatcgccatccgccatggcttcggccacatcgcgcatctggcgtaagggagcggtgatgccgcgggagaagaaataggtgatgcccaaggccaccaccaaagtcagcggcatggcgatccaaccggaccagccgaatttcaggaggaaccagcacatggcaaacgcgatggcagtggcgataacgatcagtacgctgagttccagcttcagagaggagaacaaatcaaccggcttgacgcgaggtttcatcgcatcaagccgggattgctgttgttttttggatgccatcacgcggtcggcggctcgaaagcgtagcctacgccgtgcacggtgcggatggtatcggcgccgagcttatggcgcagcgccttgacgtggctgtcgacggtgcgggtgccggatgcgtcgacccagtcccagacctcttcgagcagcttttcgcgggtgagcaccgacttcgggcggcgggccagcgtggccagcagatcgaactcggtgggggtcagatgcacctgctcgccgttcacggtgacgatgcgctgggccgggtctatgaccatcgaaccgaagtcgagcagcttctcgttctccgaattcttggcgatgaccttcgcacgctccacgcggcgtagcagcgccttgcagcgggcgatgagctcgcgcatggagaacggtttggtcatgtaatcatcggcgcccgctcccagaccgatgaccttgtcggcctcgtcatcacgtgcggtgaggatcagcaccggcaccggacgttcggcgacgatgcgtttggtggcctcaagaccatccatgaccggcagcatgatgtccatgattaccagatcggggcgtagctgggacgcggcctggacggcggaagcgccgtccccagccacgcgagcggtccatccttcagcggtgatgcgctgggcgatggccgtggcgagtgtgggctcgtcctcgaccaccagcaccgtgcgcggtgtcgtattctgacgcgctgtggtattgagcataaataaaccggttacctttcagcctgttgaccagttcagtcttccggcttcaagaatacaactcccagagccggaacggtgatcttcgccgagaacggacgcgaatgatattcgccctcgaccgcttcgaaggtgccgttgtggatgtcggagccgccgtacttggcgtcatcggtggtgaacacttcggtccacttgccgccggtgggcagcgccacctggtaatcgggccaggcttcgccggagaagttgaccaccacggccaaggtctcgcccttggtgccgatgcgcaggaagctcagcgtgttgtggtcggcatcgtcgctggtcagccactggaagccggccggatcgaagtcctggctccaaagtgccggatgcgccttgtagaaggcgttaaggtcggcgaccatggtctggacctgacggtgctcctgccagttcaggcaatcccaatcgatggaggcgtcgtgatcccactcgccccactgggccagctcgttgcccatgaaggagagcttcttgcccgggtgagcccactgataggcgaacatcgaacgcacgccggctagcttctgccagccatcgcccggcatcttgccgtacagggagcccttgccgtacacgacttcgtcgtggctgatgggcaatacgtagtgttcggagtaggcgtacaccatggagaaggtgatttcgttgtggtgccacttgcggttgatgggctcctcgtgcagatactcgagggtgtcgtgcatccatcccatgttccacttcataccgaagccgatgccgccggcggaggtgggggcggtgatgcccggccatgcggtggactcctcggcgatcatcatgacgccggggttgttcttgtacgcggtggcggtggcttccttgaggaagtcgatggcctccaggttttcgcgtccgccgtagatgttcggacgccaatggccgggttcgcggctgtagtcgaggtagagcatggagctgacggcatccacgcgcagcgcatcgacatgcaggtcctcgagccagaacagggcgttggccaccaggaagttgcgtacttcgcggcgtccgaagttgaacacataggtgccccattcggggtgttcgccgcgcagcgggtccgggtcctcgtacagcggggtgccgtcgaagcggccgagtgcgaaggcatccttcgggaagtgggcgggcacccagtccatgatcacgccgatgccggcctgatggaactgatcgaccaggtaacggaagtcgtcgggggagccgaggcgggaatccaccgcatagtagccggtgacctgatagccccaggagccggagaacgggtgctgtgccagtggcatgaactccacgtgggtgaagccttcctgcttgacatagtccacgagctgcttggccaggtcacggtaggtcagtccctgcttccagctgccggcgtgcacctcatagatggagaccgggccatcatgcgggttggtggtgcggcggtgctgcatccaggcgtcatcgttccactcgtaggtggattcggtgacgatggaggcggtgttcggcggaacctcgtgctgacgctccatcgggtcagccttcatctcccacgtgtaattggcgttcaggatctggaacttgtaggtctcgcccgcgccgatgccggggatgaagatctcccacacgccggaggagccgagctcgcgcatggcatgacgacggccatcccaggcgttgaagttaccgaccacgcgcacggcatgggcgttcggggcccacacggagaacgcggtgcctaccacctgctcgccgggcgtgccgtctgcgccgcccatcggatcgtcatagcgcagcacgtgcgcgccaagcgcctcccagagcttctcgtgacggccctcgccgaacagataggtgtccatgtcgccgattgtgggcatataacggtatgggtcgtcctcaatgagcactgcgccgctttcccactcggtcctgacgcggtagtcgggaatcgtgggctgcttcttggtgccggaggccggcacggtagccacgaacacgccgttgtattcgtgggtcatcgggtattcgccatcctgggtgaggatggtcacggacttggcaagcggacgcagcacacggattgtggcggtgtcggcatgcttgccgatgccgagatgcccgccgagaactccgtgggggttgtagaattcagcattgctcaccgcatcgaggtcgccttgggcgacaggcacggtgacggtatcttccttgatcttcgtttctttagccatgacccaaagtctacgtgcgttggagtcgaaaacgctacattggcgcgtcgaaaatggcgaattcttgcccttttcggtgtgtcttcgtggttgtgaacgctctcataggggcggtccaggccgcatggcataattattcgagtttttgtgtgtaagccgtcagttctcggagggtacatgtcttacaaagtcggcgatatggtcgtctatccgcgtcatggtgcagcgaaggtggaggccattaccgagcggacggtcaagggagtgacgcgcgaatatctgcagttgtccgtactctcttccgatggtttggtcatcaacgttcccgtggacaatgccaggaaggtcggcgtgcgtgacatcgtctccgcatccgaagtggccaaggtattcggcatcctgcggaccccgatcatcgagaaagagatgaactggtctcgccgttacaagctgaacgtcgaaaagatcgccaccggcgatgtcaacaagatcgccgaagtggttcgcgatctcgcccagcgcgatgtcgacgagcacggcctgtccgcgggggagaagcgtatgctcaccaaggcccgcgccattctgacttctgagatcgccttgtccgagaagatcgacgaggcggaagcccagcgtctgctcgacgtgaacctgggctacgagcccgctcagcccggtgacgacaagcatcacaccgccgagcccgaagaggccgcggccgatactttggctcgtgtcgaagccgagaagaagtccaagaagaagtgatttgattgttttgaggccccggtcgtgtccttatgcgatgcgccggggcttcgtgattcataatcgtttgctgccgttcgtctgggtagcgccatcgaagggaactgcatggggtctgcaggagtgctgatagggcaaggtttcgacgctcaccgttttgcgcctgccggttcaggccgtgaactgtggattgccgggctctactggccggtgcctgattcatgcagcgaggccgatgccgccaaatacgagggtatcgaaggcgattccgatggcgatgtggccgcgcacgccctgattgacgcgttgcttgccgccgcccgattgggagacattggttcactgttcggtgtcggtgcggacgcgcatggtgccggaaggcatggcatcgatatgctgcaagaagttgtggcgcatctggcatccaacgggtatacgccggcatcggcctcagtggcgatcatcggcaaccgcccgaaaatcggcacacgccgtgctgaagccgaagccgccctgtctgcggcggttggttgcccggtatcggttaccgccaccaccaccgaccatatgggattcactggccgcggcgaaggcatcgccgccatcgccaatgccttggtggagaagatataacaaagcccccgctatgaatttgccagcgggggcaagaaaaatgaatgagattacttccgcactgtctccacggccttggcgatagcccagaacagggtggaaagcgtcacgataatgaagctcgggggggcggggaacatcgccgacagcacgagtccggcccaaatcgacaccaggcacagcacgctggcgatcaccatcgccttgaatggggagccggccagaatattggcggtggccgcaggcgtgatcaccagcgcgaaaatcagcaaggtgcccactgccggcacggcaatggtgattacaccggccataatcgccataaacgccacgttcatcagcccgatcggcacacccttggcctgtgccacctgctcatccaacgagctgaacagcagcgggcggtagatgatggccaacaatgccagcagcaatacgtcgaacacggcgaagccgatgatctggccggtggtgatggtcaggatcgagccgaagaggatcgattgcatctgctgggaggcggaactcgacaatcgcgcgaagaacagacccaagccggtggcgaaggccagtacggtgccggttgcgatttcacgctcggaaacgcgcttgcccaaagcaccgatcaccagtgcgccgcccagtgcgaacacgcccatgcccagtgatacgggcaggccgagcaacaccgcgccggtcgcgcccggcagaccgatatgggccagcgcatgggccgcgaaggtggaacgacgggcgatggtgaagtatcccatgacaccggcggccagggcaatgcacaggccggcgatgaaggcgttggtcatgaatggagcggacagtgtgtccagccattcgggatcatacgaaaagttgatggtgctcatgtccctgtattttctccatgcctgagctgcagcccgttgacgggctgtggatcggctagcttgatgttatcgattctcggcgctgttggcggcactgccattggtggcgttgccgtgctcgtgatggtgcaattgcgccacttcggctgccgtgtgcatatcctgcggctggtcctggggctcatccggcgtcggggtcacgaacatgtcaccctgcggagtggtgaccacctgcacctgtgtgccgtagaggtgggtgagtaggtcggagtcgagcactttgtgcatatcggcgtagtgcgggtgcccgtcgagcaagtagacggcaccggtcagaatcggcaagagcatattgagatcgtgcgcaaccacctggatggtcatgttcagttcacggttcagcttggccagcacgtgtacggtggcgcgttgactggccagatcgaggttggccaacggctcgtcaagcatcagcagttgtggatcgcacaccaacgcctgggcgatggccacacgctggcgcaaaccgccggacagttcggacagacggtactgcgccttgtcggcgatgccggtgaactccatcgcctcgagcgttttggctttctgggccttggtgatggggtggatgccgaatcgggtgccggtcaggcccagcaacacggattgttcggcggtgagattggaatcgacattcgccacatagctctgcggcacatatccgatgcgtttgttcatctcgcctgcgggcttgcccagtacggtcaggctgccatggcaaagcggcaaaagtcccagctcggccctcatcatcgtggttttgccggtgccgttggtgccgacgatggccgtgaccgaaccggtgggaatggcaaaggtgccatgctgccagatgatatggtcaccacgcttgatggcggcatcgctgaacacgatgcaatcggaagtttcactcataacgcccgattgtggcaaacgatgctgacaatcgttctcaatatcgtgtacggatggtgacaaccaaagaaaagggttgtgcggccatctcgacaatggtcgcacaacccttctcgtgcaaggcgtctatcggcattgcatgaatccgatgccgttgtcctttgcttctaactatttgccggagtcggtctggtcgttgccggaggcatcgccggaattgccattggaggcatcggcctttgccgaatcctgagacgaatcactggatgtggccgccttgcactgacggatgtacttgggctccgtgctggaaccggtgctggccttggaatcttgcgcattggcatcatccgtggcggcgccgtcggcgctggaatcatcggaattcgcgttgccgtccgtggcgtcttcgcagccatagctcggatccaccgcgtcgatgatggtgttgatgagctggttgatccaggcgttcagcgtgtcggtatccttgggcatttgttcggagacgtcgactaccggcacatcggcacgaccggcagcgccagtgatcatattggtcgcgtcactggcttcctgcgtgttgttaaccagcacatccacgcccttgtcttcgatgagtttctggaaagactgcaggtccgcgggggccggttcgccgccggaagcggtcgattgcgtataccccttgggcgtctgattcttgaacccgagatcggccatcagataatagaccacgggttcggtggctgcataggtgaggtcggagtgggatctggtgaactcggacgcccatgtttccagcgatttctcatccgcctgccatgccttgagccgcttctggaaggccttcttcttgctggggagtgcctttacatatgcatcggtgatggccgtggccatgctggatcgagcgtctttggagaaccacagatgcgggttatcgccttccatggcacccatgacggaagcggcggatacgatattcgtggtcttggtcatcgatttggtggcccaggaatcgtagcccgcaccgttggccacgatgatttgtgccttggacagcttggcgacgtccgaggtctttggctcgaaatcgtgggcatccacattggtggagttcacgatggacgtgacttccacatcatcgccgcccagctcggcggccagcgagccccattgattgagggaggcgaccacattgatcggcccggtcggtgcgggaacactggtcttgttgtccggctcggtttcagtgggggaggtggctgcgcatgcggcggtcgcgaacaacaggacggcgctcaggccggctgcggcgagtcgcgtaagtcgtgtgatttgagtccccatggcacgccttcttcgtgagagcgaacgatatataatcctgacttgttccaacgatagcctatcgtttcgatagaatgcaccgaaactacgggggagggcgttgatgtccacaaaaatcgacggtaagcggattgcggccgaaatcaagaccaaccttgccgagcgagtgaacaagctcaaggcgcagggcatccaaccagggctgggcacgctgctggtgggcgaggaccccgggtcgatgaagtacgtggccggcaagcacgccgattgtcaggaagtgggcattacctcagtcaagaaggaactgccggcggacgccagcttcgacgacatcgccgctgccgtacgcgaactcaacgaagatccggcctgcaccgggttcatcgtccagttgccgttgcccaagggcatcaacgagaacgcgatcatcgacatgatcgacccggccaaggatgccgacggcatgcacccgtacaacctcggcgaactggtgctgcatgtgcgcggcgacatttcgacaccgctgccttgcactccgcgcggggtgctcgagctgctcgacgcctatgacattgatctgaacggcaaggaagtgtgcgtgcttggccgcggcatcaccattggccgcacgattggcctgatgctcacgcgcaacgccgtcaacgccaccgtcaccctgtgccacaccggtacccgggatgtggccgaccacatgcgccgcgccgacgtgatcgtcgccgcaatgggttcggccggattcgtgacgcccgacaagatcaaggacggcgccgtgctggtcgacgtgggcgtcagccgcgtctacgacgaagaagccggtcgctaccgcatcaagggcgacgtggacaaggcctgctacgacaaggcctccgcctacacccccaaccccggaggcgtgggccccatgacccgagccatgctcctggccaacgtcgtggaaatggccgaacgacacgcctagagtttcctaggaaatttgggcagagttgcttgtattgtgaatatctgtaggcctgtaagggtgtgcgtataactgaatatcgagaaattatccatccactattagaaaccatatatttacatggcagagaacaacactgaagtcgccaaggttgccatcaacgacatcggcaccgaagaggacttcatcaaggcagtcgattccaccatcaagaacttcgatgatggtgatctggttgagggcaccgtcgtcaagatcgatcacgacgaagtcctcctggacatcggctacaagaccgagggtgtcatcccctcccgcgagctttccatcaagaaggacgttgatcctgacgaagtcgtcgaggtcggcgacgccatcgaggcccttgtcgtcaccaaggaagacaaggaaggccgtctgattctgtccaagaagcgtgcccagtacgagcgcgcctggggcgacatcgagaagatcaaggaagctgacggcgtcgttgagggcaccgtcatcgaagccgtcaagggcggcctcatcgtcgacatcggtctgcgtggcttcctgcctgcctccctcgtcgagatgcgtcgcgtccgcgacctctccccgtacatcggccagaagatcaaggccaagatccttgagctcgacaagaaccgcaacaacgtggtcctgtcccgccgccagtacctcgaggagacccagtccgaggtccgcgagaccttcctgtcccagctcaagaagggccagatccgtgagggcgtggtgtcctccatcgtcaacttcggcgctttcgtcgatctcggcggtgttgacggcctgatccacgtttccgagctgtcctggaagcacatcgaccacccgtctgaggtcgtcaaggtcggcgacaaggtcaccgtcgaggtgctcgacgtcgatctcgaccgtgagcgtatctccctgtccctgaaggcgactcaggaggatccgtggcagcgcttcgctcgcacccacgttcccggccagatcgtcaagggcaaggtcaccaagatcgtccagttcggtgtcttcatctccgtcgaggacggcatcgagggcctggtgcacatctccgagctcgccaaccgtcacgtcgagaacccggagaccgtggtcaagccgggcgaggccgtgttcgtcaaggtgatcgacgtcgacctcgatcgtcgccgcatctccctgtccctcaagcaggccaacgactccgtcgacccggcttccgaggacttcgatccggccatctacggcatgccggccgagtacgacgagcagggcaactacaagtaccccgaaggcttcgacccgaacaccaacgagtggatcgctggttacgagaagcagcgcgaggagtgggagtcccagtacgccgccgcccacgagctgtgggaggagcacaaggagttcgtggccaaggagctggagaacgctgccgaatccgcagccgccgacggccagggcccgaaggaagagaagccggtcgaggagacctccaactactcttccgctgctccggctaccggtaccctcgccgactccgatcagctcgccgccctgcgcgaccagctgctcggcaagtgagttcgccatcgggcgactgacgcctgacgtatagtcaaaacccggtctcgcttcggcgggccgggttttgccgttgtgtgcatgaacctcgaaacatggccatgatggggggagcatgattcgaataggattgaccggtggtattgcggcgggcaaaagcacggtgtccacaagactgcgggagctcggcgcggcgcttatcgactatgacgagctcgcgcgccgagtggtggaaccgggcggcgtcggtcttcgtcgtatagcggaatgtttcggccccgacgcgctgaccgatcaggggcggctcaaccggcgatggatcgccgagcacgtgttcgccgggcccgactcggaacggttgcggaggaaactggacgatatcgagcatccgttgatctatgatcttgcgctgtctcgggagcggcaggcggtcgcggacaatccggatgccgtggtcgtgcatgatgttccgctgttggcggaagtcctggacgccatgcccatgcgattcgaccatatcgtcaccgtcgaagcgcccgaacaagtacgggtcgacagaatggtgtcgacccgcggcatgacgcgagatgatgcgcttgcgcgcattcgccaccagtccagcccggaacaacgccgtgtcatagccgacgcggtgatcgattccacgcagccgatgggtcgaatgctcgaagccgtcgatgcgctgtacgaacagtggctggcggaatcataatgcgatgatgcggtcggcgagagccgcggtctcctcgttgtgcgtcgtgtagatcacgatcgctccgttgtcggcgaaatcacgcaggtgacgcatgaccatggcgcggttgtcggcatcgagggccgctgttggctcgtccgccagtatgacgcgcagcgattgacggatgagaagcctcgcgattgcgactcgttgttgttcgcctccactgagtgtgtagatcggtctattgccgtagcccgtcagattcacggctcgcaatgcgcgtctgatgagccgacttctatctgccgatggtattccgacgctgcgcagagccagaatcagatttctgttcaccgtccattgctccaccagggcgtaattctggaacatgaatcccatgacgttgcggtgcatgagccgtcggccctttctggaggcaattgtttgcccatcataggtaattgttcctgaacttggctcttccaaaagacctaggacattcaacaaagtggttttgccacatccgctttctccggtcagggcaaccatgtcaccgggactgaatgtcaggttcagtccttcccataaggtgcggtcgtcgattcgatatgtcagattatgcgtgatcaataaggcgctcatgcttgatgttccttacgtggtaagtgattgctgatacaggtttgtggatggcgatcagggatgtttgatactgtcggcgcgtagccgcgaatcgtaaagcactgtggttgccagcgaaacgacgatgaatagtaaggaaaccgaggtcgtggaaacggcgttgtaacctcctatgagcaactggatcggaagagatgcactgcataacgccgctgctaggaacagtatcgattgaaaacggagatatgacggcgctccatgcatatattccacgaacataatttgacgtcggagtgtgcatagtgtcaaagccaccatgattgcgccgcccagcagacatgttatggatatgcaagctgtgatggaaaaatagttcatttcctgagttgttcgtgccaaacgagtttgtatctcgtcgtgccgattgacgaccgaagccaccaaagagtccacgcccttttcccgtaggatttcgagcagctgatggcgggagctgtaatcgaaggtcatgccgccggtggacaccatcgatgtagtggtatcgccagagagcagtgacgggtcaatgacaacaacaggaacagaggaaaggccatcggtgttggaaggggtgtcaaatgccgataagacagcatctcttggtctggattcaatggagatgctcgtgcgattgatggcgggcagactctttccctcttctgccgccaaactttgctcgaatgagtatgcgcgaagcacattgttcgtaatggattcgctgttccattgttcattctcgggcataatcacactgattcgtgcaagtgtcgtgttgtttcgtataagatgatgaagccttgccgtacgggaatccatgaggatgcagggctgtgggtcttgcgagctatccacccacgtgcatcctacccggaatgaggcgaatcgcgtatgttctgattgggaagtttgttcgacgaagtcgttccatgagggcatggaacgggctcggttttgatcgctgctataccacagttgcaattggaatccgtcgttggatgacaattgatgctccaatgttgttttcagtgtttgggattgccgccatttgaagttcgtaacgttcaaactggcagagctgagagcgagaacgatgattgccatgatgcagccggaagccatgagaaaacgtaaagggcgctttccttggattaatttgagtgcgttcggcaccagaacccttactagagcaatcgacaatgacaaggcaaccaatgctatgcacgttgtggcgatgatgatggagaggaatacctgaccggcgaatcctaagggagaagcgaaaggccagaagatcgcaccaatggaaatccaagtcatccatccgatgcagacgcagatgatgaaaaagaacgcatgccgcaggaattgcctcataataatgccggttgttctcatgccatgcaaggcttgtatcgcgcaaacgcgtgaagctgtcgacacggaaagcgcgccggacacaaatactacagcaagtccggcgaatatgacttgggcgatggaattggagaagaattgtttggtgatttgtgtgatgccgatgggggttgctctgttaagttcgaatccttggcgccgtatggatttggctactgaagcggtatcccgtggtgatccatagagaagccatcttcccaatgggtcggtgaatctgtctccgcgttgcacacgtgtgcgcggcccgaacccataatccgggtatggcgaattcgcatgcatgccgttgccgtctaatgcgccgaaaatagaaattacgcgtctgttggtaccgtgaccgtccggctcataggagactctcgcgagtacgacatgatgggtcgctgcgagaccggtcaatgtcgatagaggctgcccgtgcgcgtcggaaattccaatatcgtagctagggccggagggataggtttcttcgttattctgcgcatagaatcctgctgcgagagtgatgagagccacggccaatatactggcgattttataagtccagtgcatgatacaccttattcccggtaacaatgtgtttgtgcggcggacgataggaagttcgctcgccgcacattcaataaatggtgtggatgctgcgaaatgattcaagcatcaaatccatagaaagcttgatccactttgccgcataccgcgtaagtccttgcgtaggcctccggtgattttctttgcgatcatgagtgctccttgttgtccttcattgagcggctgttttgccgcatgcaacacggtaggatgccaatgaggagcgaacgaagtctgtgtgacgggaatcgtcacagtgttacgatttcgtttgacggaggcgattcggggagggggtacttatgaagaacgggcgcctgattcggcttgccttggtggacaacgatcgttgctctgcggagatgatggctttgcttattggcaggacgattcccgaggcgcatatgctatgggttacggataatcccagtcttgccttggaacgttgtctgttcgatccgcggaagccggacatccttatttgcgatctcatgatggacgggctgaacggagtgcggctgacggaacgtattcgacagcggaacgtgcaggttggcgtcatcgtagtcacttcgtatgacctggcaacctatggtgaggatatcgcgtgttgcggagcccaagcgttgatttcgaaaagagatttcgcagcgaccatacgcgaggcggtcaaatcggtgtttgacgggggaacataccctcatggttggggtttgcatagccttgaagagacattgcatacggtggatgccgcacagccggaagcggatggtgccaggctcttctccgatcgagagctggcggtgttgcgtctctatgcacatcatgtaccgaccgttgaaattgcgcgccgcttgggaatcggtgtcgaaactgtgtacagctatgtgaaacgagccatgcgcaaggtcggggtgacgaggcgcggcgaactccttgattactgtgagcgataccatgttctgtgacggcagccgttttcttagacgtcgcttccgcgatttcgggaagtcttggcatggcgagaagatcgcggcgctagcctgcgccttgtgcatagccgctgatacggtcatcgaatcgtgtatcaattccggtttgggatgcgtgggccctgtgggtgggtctgttgttcgtcatcctgtcgttgctctgcgtggcattcccgttcggcggcaatatcgcgttggcgatctcatggtgcgtggtgttccccttgccggtggatctgtccatgtcggtgagcgtggtgatagccgagccattaatcgtcctctcctatcaacgcatatggtgcggcgtggtgttggcggtgactgtgaccgtatctcgcgtggcgcagctgatatggcagtatgggttgccgatgggttgggatgccggggcgttggtgtccgttgtgccttggaccgtcatgccggcgttggcgtgcgttggaatcggtctgctgctgaattggcatcatcgtgagggggagagggagtcggaagcgcgtggcagggccgaatcgttggatttggcggcaaggctgcatgatgcgacgaccaatgatctctcatatctcatcatgagcatcgacaggatcatgtcggaacacccttcgcaaggagagtcgatggacttgccactgttgcgcgaagtggctcaacgggcgctcgatcagacgcatgatgtcatagcggttctcgcaaagcacaatgtcggtactgcgcgaatcccgcgatgccatgcgcgtcgctccggagaagccatcgttccgatcggtgcaggtcgattcgaggccgagatcgaacggcaccggcgggaactcgcagcgcttggtttccgaggcgaggtggttgtgtccgatcccttcgatctcctgagtcggtttgacgagaagactatccagttgacgcggtcgttgctggaagagacgtttgccaatatcgccaagcacgcggatcgcgaacaagggtatgtgctcgccatacaagtgcggcaagacggactgtacgtatcggtggctgacgttcccgccaagatggcggatggagcattggcggaatctccgagaacattgggcatgggatttggaatgtctcatctgcgtcaatcaattacgcggagcggtggttggctgcgcgtccaagaggaagacgggtattggagttgcctagcgtatattccgatatatcatcgggatacagcgtgaatcggaaggaaacagcgcatgggattcaacatcgaacgtgtggacaagccgtttgtggtcaaatcgccgtaccgaccatccggagaccagccgaaggccatcgaggaactggccacgcgcatcgagaacggcgagaacgacgtggtgctcatgggcgccaccggcaccggcaaaaccgccaccaccgcatggctgatcgaacggctgcagcgtcccacgctcatcatcgagccgaacaagacgctcgccgcgcagctgtgcgccgaattccgcgagctcatgcccgacaacgcggtgagctatttcgtttcctactacgactactatcagccggaggcctacataccgcagaccgacacctatatcgagaaagactccaacatcaacgatgatgtggagcgtttgcgccatcaggccacggccaacctgctgaccagacgcgactgcgtggtcgtggccaccgtctcctgcatctacggcctgggcactcctgaggaatacgccgggcgtatgctgtttctcaaggaaggccagcagatcaatcgcgacgacctgctgcgccggttcgtggccatgcagtacaagcgcaacgacatcgccttcac

SEQ ID NO: 1033 - DNA, 3501 bp, Unknown
  R117_24m  MAG No. k141_70765
cgaggtgatgagcaacttccccgcttcgattccggcgatgcttggcgcgtatgtagggctgacccccgcagaccggcgtcatttggttgaggccctggcgatactgttcaaggcgtccacggccaaacgcaggccgacgccagccccagcttccgcaccaagttctgcgaccgccgaaggaacagccgagaccccagcaggaaccgcgacaggaacagatagagcggccccggccagagccgataccgatgccgatgccggcaccgcagcttcgccctcagcggaggacgcaactgaaatcgccggttagctcatagacatgtccacaaataatagttatactgcccaataagttattagacagcgtgaccatatcacgctggtgcatcaggaggaagagatgccacgtccacgccatgattccgaggtgctgcccgccaaagaacgcctagagaacgctttctgggaattgctcgccgaccgcgactatcgcaagatcaccgtcaccgatgtggtgcgtgaggctggcgtgaaccgtaattcgttctattatcacttttccagcctgcccgaattggccgattcagccattctgcatcaggtcgaatcaattccgatcaaccgcacccccgaccccaatggcaatcccgaggaacaatggcgagaccgcgtcaccgccacgctctccgatccagagcaacggcaacgcctcgaccgcctggccctgttggcaggcccgcacagcacgcttgaactgaccgaatcgctgcgcgacttctgccgtctgcaaatgctcagcacattgcaacgcgaccccaagaaccttgacctgaaaaccgatctcatggtcgagttcaccgtgggcggcatgctcgccgtgctgcaacgttggcccgaattgagcgacgccatcgaaatcaaagacctgcttaaagaagatgtggccgtgctggccatgggcatatacctggccatgagccaaaaggacatgctcaattactggaatcgcatcttcgtgcacaatgcgcaggattcggccgcccccggcatgcaggccaccgccacgcatgccgcgccatcccccatctcaccgtcgaacggccccgcaggattccccgggtacaccgcttgaccgaaaaccagtgagtctggattgtttccgtcgaatgaacccccgcgtgaggtttctcacaaggcgcaatcagcctctcatgctggcgtttccagccctcacacaggaagatggaagcatgagcgaaacatcgaacaaaacccgtctggaacatgactgcatcggccagatggaggtgccggcgaacgtctactggggcattcacacccagcgcgctatcggcaacttcccggtctccggcatcaccgatagccaacatcccgagctgattcgcgcctatgccacggtcaagcgcgcctgcgccatcgccaatgaggaattaggcctgatcgacccggccaaggccgaggccattcgcgccgcctgcctggaaatcgaggccggcaaactggccgatcagttcccggtcgatgtgatgcagggcggtgccggcacctcgtcgaacatgaacatgaacgaggtgatcgccaaccgtgcgctggaaatcgccggccaccagcgcggcgattacacatacatccatccgaacgacgacgtcaacgagtcgcagtccacgaacgacacctacccggccgcctgcaaactcgcgcttatcgacgcgatcgggccactcgccgagtccaccaagaaactcgccaaggccttccacgatctggccgacaaacatatcaatgacgtgacgatcggccgtacgcaactgcaggacgccgtaccaatgacctatggtcaggagtttcattcgttcgccacgctgctgaaatccgatttggctgcattcgatcgcgtggtgccgctgctggcccagctcaacctcggtgccaccgccatcggcaccggcatttgcgcggatctgcgattccgcaagtccgccatcaagcatctggcgcagatcaccggcttgccggtcaccgccgcgcccgatccggtggccgccatgacggatatgggcgcgtacgtggccacgtcggccgccatcaagagcctcgccgtgcacctgaagaaggccgccgacgatttgcgactgctcaattccgggccgcgctgcggtttcaacgatctcaacgtgccggctcgccaggccggatcatcgatcatgccggccaaggtgaacccggtgatccccgaatgcgtcaaccagtgctgcttcacgatcttcggcatggacgtgactgtgaactgggctgtggccgagggccagttgcagctgaacgccttcgacccggtgatggtgcatgagctgctgaccggcatggcgttgctgacgcgcgccatggagacattccgcgtcaactgcgtgaaaggcatcgaaatccacgtcggtctgggacgctcgtatgcccagtcctcaccgtcgatttccgccgcgctcaaccattacatcggctacgagcacgcggccgacatcgccgccgaagccgtgcacaccggccgtaccgtgcgcgaggtggccggcgaacgcaccgacctgcccgccgagcagctggacgagattctcgatccgattcgtctggcccgtggcctcggccagacctgccgcgagcaccgggactaggcgtcacggcgacgtcatcaccacgacgatgctgcaccgcggtgccgcggtggtgccggtggtgccgacggcacgccaccggtatcgcaccatcggcaccaccgcaacggtcaaaacccgacgtgggcccgcatgtttacgacttcaccagaaatggtcgatacagtaggcgtatgactgaatatgcacaagacatcgcacgctggtttcaggtgaacgccggcaaactcatctggctggccattgtattggccgtcgtgttcgcggccgaccgcgtcatcagccgcgtgctgcgcagggttctggatagttcgcagattcccagcgcctcgattttcgtgaatctcacgcgcgtgaccatctgggtcaccggtacggcgatggtgctgcagccggtgttcggcatcaatccgaccaccctggtcaccgccctcggcgtcggaggcgtggcgatctcgctgggtttgaaggatacgatcgccaacgtcatcggcggcttcggcctgatgctgggccgcgtgatccagcccggcgacctggtgaccattcaaggcgtcacgggcaccgtgcatgacatcacctggcggcagaccgtggtgcgcacccgttccggagacatgatggtcatccccaattcagtactcaataccgccgccctgaccaagctcacgccggtcagcgaaggcatggccacgcttgaattcacggccaaggcctccggcgacccgtccgctatcagtcaggatattctcgaccgcgtaaccaaagccaccgccgacgtggcactggagggccagccaccgctggtcaagttcac

SEQ ID NO: 1034 - DNA, 5736 bp, Unknown
  R117_24m  MAG No. k141_73574
gcagatggcagcctatggggcttctggagccttatttggcctgtttgcatcattgctggtggtatatcgccgtatcggcgccgatatccgctccatgttgatctggatggcggtgaacttcgccttgccgttcgtggtcgggggcgtggcgtggcaggcgcatgtcggcggctttgtagtgggtggaatactcacatggctgctggtgggtggtgtgccggcgtggcgaggtaaaagcctgaaatggcgtatgcaggtttacggctgggccatggtggtgctggtcgttgtgttgattctgttgtgcaatatggccaatccttacgggtggatgagtttcggctccctgcactgatatggcttgatatggctgtaaaaaacgattgatgccgggtattgcggaacatgcagtgcccggcatcagtgtatgtacggaaagcggcgatgtggatattagcgatgtggatatcgtcattcggtgagtgggcatgcgctgtatgaaggtatccacagtaatgaagatatccacagtaatgagatgcgcgcaatgacgagttatccacgataacgagttatccacaatggtgacttgtgcacaagtgtgtagaaaagtgcataagactgtggataacttatgtggataagttaggaatgccgcggtattactgggtttgttgcagtggataactcgggtgtataactgttccctcgctgtggcgatgtatgccaagccaaagttatgcacgagatatacaccgagaaacgccgcttatccaccacttatccacatggttttccacattcggtggaaaactacatgggtgtgattcatccacaggctgtggataacgtagtggataagtcgtggataagtcgtggataagtggtggatagctgtggatgaacaggtgaaggcacgaaaaaggccggcctccgcatacgggaggtcggcctttcgcataagaactaagaacaacctaacgatagaaaaaacgatctaccgatagataagcgcaacgagtcggaactcagcgccatcccatcgtcatcaggaatccgatcatgatcagggcgaagccgatgcccaggttccacgcgccgatgttcggaatcggccaggagccggacggggagaggtagtacaccacacaccaaatcaggccgatgatcataaacgcgcagaacagcggcacgaaccaacgcgggttcgacttggtgcccttaatggtttcttcaacacgcttggtgttctccgcctgacggttcatcatgcgctgcatctgcggggtcagcgtggccttatcggcagtggcgttgagcacggcctgcacctgctccatattcacgccgtaagccgcgtcttcctcggcagaagcgttctctgcgttctgctcggtgtctttgttggcggtctcgtcagcagcggtgctggatgaggtctcgctctgccagtccttctggttgttcgagtcggtctcgtgcagctcttcgtcagccatcagcatagtctccattcaataggctaaaagtcataatagtggctacactcgaaagcggcgaccagagtcggcaagaagacaggaaattcatggccagacatgtaggtaagcacggcgcacggcactccctatggggtggtgtcgcggtattcgtcgtcattgccttgaccggttttctgctgagcaccaacgtgagggtcaatcgtacggttgccgccaccaacgatacggccgatctggtggagcaaggcgtgggcgaggccaaccagctgcagcaggacgtcagcgatctgaccaaacaggtcgccaatcttacggacgcgctcaaggccgatggcaccgacggtactgacagcacgcagaaccaaggcaaggactccagcaatgtggattccagcctgatgctgcccgcgctcagcggcagcggcgtaacggtaacgctggatgattctccgttatgggagaacgccgtcaacaacaatggcacgaccgccaatatcaacgattacgtgattcatcagcaggacgtcgaatcggtggtgaatgccttgtgggccggcggtgccgatgcgctgatgattatggatcagcgggtgctgttcaattcggcggtcatctgttccggcaacgtgctgtcgttgcacggtaagaaatactcgccgccattcaccatttccgcgattggtgacccgcaaagacttcgcgcagcgttgaacgactccgaagccattaccattcttaagcaatatgtgaccgcgtttggcattggctacaaggtggagaatgccgagggccttcagttccccggtaccgccgccttgctgcagcagttgaaatatgccacggtcgatacgtcaaagaccacagatgaggagcagactcagcaatgagacacggcaggcacaacagcggcgcaccggcgcccattgatctcgcgtccgtgtcggacgtacagcccttccccgaggacgacgccgcacgaatggcggcagacccggccaatgccagcagggcaaggtcccgtcgtgccgcagtacgcggcgcgtcttcgccccagcggagcctgatctggcaggcactcggcatctgcgccgaactgctgattaccgctgccgtgatttgcgccctgtacatcgtctggcagatgtggtggaccggtgtcgaggcggagcgagcccagaacgaaaccacccagtccgtcgactggagcgaccccagcaacaacgggggaacggtcaccatcgccaaagcccaggagggcgatgctccagtacagccgaaagacgcgaaatatggcgacttgattgcgcagatctacattccgcgcttcggctcccaatggcaccgcaacatcgtggaaggcaccacgctcgagcagctcaatcgccacggtctgggccattacgacaccacccagatgccggggcaggtcggcaacttcgccgtcgccggccaccgcaacggctacgggcagccgttgggcgatgtggacaagttgcaggaaggcgatcccatcatcgttcgtaccaaggattactggtacgtctaccactacacccggtacgagattgtgctgcccacggacgtgtatgtgatcgcgcccaatccggaagactccactgccaatcccaccaaacgcatgatcacactgactacctgtgagccgaaatactccacccccacccatcgatggatcagctatggtgagttggcgtactggaccaaagtgtctgatggcgtgcccaaagagctggctactactgattcgtccggtgcagtgaagttctccaccaccgaaaccccctcgatcgcttcccgcattggctcgctggacaaggtggtattcggcgcgctggtagtgtggctggttctgttcatcgccgctgcggtggcatggcgctggccggtgctgcgcgagattcgcgcgggtgagcgtcgccgcccggatgtcagcatctatggcggactgttgcgcctgcagcccggcgtggcaccgattcgatggctgctgctggctctgctgctgttcgcagccgccgcggcgctgttccagtggggattcccttgggccgccgccaatatcccattcctacagcagatgtcgaacttcgtggcagtgagctgacggcagcctagtactatagcttgcagtacacgtccctcaaggagagccctatgaccgattccgcgcatattttggtggtggataactacgattccttcgtctacacgatcgtaggctatctgcaaacccttggcgccactgttgatgtggtgcgtaacgacgctatcgacccagccgcgccgggtgtactggacggttacgatggcgtgctgatttctcccggccctggcgctccggccgaatccggtgccagtgaggatatgattcgcctgtgcgcggccagcggcgtgccgatgtttggtgtgtgcctgggcttgcaggcgctcgccgaggtgtatggctgcactgtgggccatgcgcccaccatcatgcatggcaagaccagcttggtggaacatatcgatgacgagattttcgagggcgtggccaaccccatgaccgccacccgctaccattcgttggccgtcgagcccgattcggtgccggatacgctggtggttaccgcgtggacgcagggcgaccacattattcagggcatcaaggtcaagggcaagccgatgtacgccgtgcaattccatcccgaatccgtgatgacccaggacggctaccgtctgctggccaactggcttaaggtctgcggccaagacaacgccgtggccaagtccgccggccttcagcccaaggttacgaagtagcttttccgcgcgcggcgacgctttcccgggaatgttgcgctgggatagctctttatacagcaaaggggaggggtgcagaagcccctcccctttgcgttgtgtgattgcgttgtgtgattgcgttgtgtgattgcgttgcgtgtttacgttgcgcatgtgttgcgctatgtgcgttgcgtatgcgcaacacacacgcccggcgctcactcactcacgggttccgccccccgttgccgttgttggcaccgttgccgttgccaccgtctccggtaccggtgtcgcctccggtgctgccggccttcgtggtaatggtgacggtcgatcccgcatctacttggctgccagcgccaggattgatgctgactaccacagcggtgctgtcggttgggccactggcctgagccttgaggcccacggccttgagcatgagttcggcggtggcgtagtcagtgccagcggtgatattcggtacagcgaccttttccttgcccgtggacacccagatggtgatggacccgccctgcgcgatggaagagcccgaatcggggcttacgcgggtaatcagaccggcctccaccgtatcggagctttcctgctccacggtgaagctgaacttgccctcatactgctgtagcacgctgtccttcgactgaccgaccaaattgctcggtacggtggtcatgccggaagaaacatatatggtgatggtggtgcccttgggaaccgactgaccggcggcaggatcggttctcgtcaccatatccttggcgatgtcggcgctgtcttcggttttgacggtggcgttcaccttgaacccggcgctttccagaatgctgcgcgcctcttcctggctgcgctccttgacatccggaacctgagtggactgcgggcctgcggagaaccacaccttcacggcagatcccctggccaccttggagccggcgtccgggctcatcttggtgcaggtgccttccggctcggtggagtcggtgtcttgcttttcggtcatcttcaagcccaatctctcaagcttgagcttgatgttgtccttggacgtggaagcgttgcacacttcagggatggtgacggtgtcttcagaggacttgttgccggagccgttcatggcgaacatgatgcccacaatgacgagcaccgcgacaatcgccgcgatcgccgaaccgatgatgatcttcttgcgcttcttggccttggccgccgccgcacgctgctgcgcacgggactgcaacgccgctgagttggcaccattggccggtggaatctgctcgaactgaccggtcaccgggttgaatgcctgggtgggctgctgctgcggttccaccggcgtggtgggcaaatcacgttcggcttccttgcgggccttcatattcgacaggtccgtcaatgggttgaacgcggc

SEQ ID NO: 1035 - DNA, 21428 bp, Unknown
  R117_24m  MAG No. k141_73899
agcgtcgtcgtgcagggcgccgtaggcggaggtgtggatgaccgggcagtcgcgatcgaagccgttctcgtcgaggaggtcacggacctcttcttcgacgagctcgatgagctcttcatcgtcgaccatgtcgcacttgttgagggcgacgaggatcttcgggacgccgacctgacgggcgagcagcacgtgctcgcgggtctgggccatcgggccgtcggtggcggccacaacgaggatggcgccatccatctgggcagcaccggtgatcatgttcttcacgaagtcggcgtggcccgggcagtcgacgtgagcgtagtgacgcttctcggtctggtactcgatgtgggcgatgttgatggtgataccgcgggcggcctcttccggagcggagtcgatctggttgaagtcgtactccgggttgacatccgggaactcctcgtgcagcaccttggagatggcggcagtcagggtagtcttaccgtggtcgacgtggccgatggtaccgatgttaacgtgcggcttagtacgctcgtacttttcctttgccattacttttgtcctcctggacgtctcgtgagtttcctgcgccctttcgcacagggactcgcttattctactgggtttctgggttatgtgccactttgaagagccagaacccagtcagcggtatacgatactaccgctgactggagacaccggccacttcatgatgtggcgcgtgtcactcgccgcgctgggccttgatgatctcctcggagacgctcttcggcacctcgtcgtaggagtccatctccatggtgaacatggcgcggccctgggtcttggaacgcaggtcgccgatgtagccgaacatctcggacagcgggaccttggcgtcaatgaccttgacgccgacaccgtcggtcatggactggatgttgccacggcgctggttcagatcgccgatgacttcgcccatgtactcttccggcgtacggacttcgaccttcatgatcggttcgagaatgaccggcttggccttcggggcagcttccttgaagcacatggaacctgcgagcttgaaggccatttcggaggaatcgaccgggtgcatctggccgtcggtgacggtggccttgacgcccacgaccgggaagccggcgagaacaccggactccatggcctccttgacaccggcctcgatggggccgatgaattcggcggagatgtggccgccggtgaccttgttctcgaactcgaaggtcttgccctcggtggtgtcgagcggctcgaagttcatcaggacctttgcgaactggccggaaccaccggtctgcttcttgtgggtgtagccctggtccatgacggccttgcggatggtctcgcggtaggcgacctgcggcttgccctggttgcactcgaccttgaactcgcggcgcatacggtcgacgatgatgtcgagctggagctcgcccatgccggcgatcagggtctggccggactcttcgtcggtcgtgacctggaaggtcggatcctcttcggccagcttggacagggcgatgcccatcttctcctgatcggccttggtcttcggctcgacggccacctggatcaccggatccgggaaggtcatggagtcgagggtgatcgggtcgttgatggagcacagggtgtcgccggtggtgacgttcttcaggcccacgaaggtgtagatgttaccggcgtcggcgcggtccatcgggttttccttatcggcgtgcatctggaagatcttgccgatgcgttccttcttctcgcgggtggagtcgagcacggagtcgcccggcacgactgagccggagtagacgcgcacgaacacgagcttgccgtagaacgggtgggtggagatcttgaagacgagggccgagaacggatcggtcttgaccgggtgacggtcgatctcgacggactcgtcgccgggcttgtagcccttgatggccggcacgtcctcgggggacggcaggtagtcgacgacgccgtccagcatcggctgaacgcccttgtccttgaaggcggagccgcagaagaccgggaaggcttccttggcgatggtgagcttgcgcacgccggcgcggatgtcttccttggacaggtcgccgtcctcgaagaacttgttcatgagttcgtcgtcggcttcggcggcggcttccacgagcttctcgtggtactcctgggccttgtccttgagatcgtccgggatctcggtggtgtcgtacttggcgccgagctcctcggtgccgttccacacgtaggcctgcatctcgaccaggtcgacgacgccggtgaagtcgttctcggcgccgatcggcagctgcatcacgatcggagcggcgcccagcttctccttgatggtgtcgacggagtagtagaagttcgcgcccagcttgtccatcttgttgatgaagcagatgcgcggaacgccgtacttgtcagcctgacgccacacggtctcggactgcggctccacgccttccttgccgtcgaacacggcaacggcaccatcgagcacacgcagggagcgctccacctcggccgtgaagtccacgtggccaggggtatcgatgatgttgatctggaacttgtccttggtgtcgtgggactgacggctccagaagcaggtggtagcagcggactggatggtgataccacgttcctgctcctgcgccatgaagtccatggtggaggcgccgtcgtgggtctcgccgatcttgtagttcttaccggtgtagaacagaatacgctcggtagtggtggtcttgccggcatcgatgtgggccatgatgccgatattgcggacgtcgtggaggtccgaaatctcttcagccatctttttccttagttttactcagggcgagtgattaccagcggtaatgcgcgaaggccttgttagcctccgccatcttatgagtatcctcgcggcgcttgacagaagcaccgaggccgttggaggcatccaggatctcgttggcgagacgctcggccatggtcttctcacgacgggcgcgggagaagtcggtcagccagcgcagcgacagggtgttggcgcggttcggcttgacctcgaccggcacctggtaggtggcgccaccgacacggcgggagcgaacctcgagggacggacggatgttgtccagggcgcgcttgagcacagccaccggttcctggtcggacttctccttgaccatatcgagcgcggagtagacgatgtcttcggcgatcgacttcttgccgtcaagcagaatcttgttgatgagctgcgccaccacggtggaaccgtagatcggatcgggcagcacgacgtgcttcttggaaggtcccttacgtgacatatctcttacttcgccttctttgctccatacagggaacgaccctgcttacggtccttgacaccctgggtatcgagcgcgccacgcacgatgtggtaacgcacacccgggagatccttcacacggccgccgcgcacgagcacgatggagtgctcctgcaggttgtggccctcgcccggaatgtaggcggtgacttcgatgcccgaggacaggcgcacacgagcgaccttacgcagagccgagttcggcttcttcggggtggtggtgtagacacgggtgcacacgccgcgacgcagcgggctgcccttcagggccaaagtcttggacttcttcggctttgcctgacgtcccttacggacgagctgttcaatagtaggcaacttgaattctccgattcagtggtttctcttgcttttgtgtgaccgccgcactgcgcccacacttttcagcacactcgcttggcatccgcctgttggcgacacccgacgaatcggaaaagatagcccagtccaccggcccgatggccttcgcccctcccgtcggcgcattgctgcgtgcgatcagcggtttgaaggatatcccagcatgctcgcctgttacataaggcgcgctgctggcacacacgaatatctatactacgattccgccggacaacgacgcgccgggcctcgactcactagcttgggacaatccgcgccctgtacttttcctctccttctggcgcaacaatcccgggaatgcgtcgcacaacacacgcacacacgccctcccaacgcaacattcccgggaatgcgtcgcgaaaaagcaaacgccacacagcaggtgcccccgcggagactatgtcacacgggggcaccgccaaggaggttacattatgtttcttttcaccacatgccgcttctgtgttatctgtttccagcacatcctcgtgctcttccatatccgatgggaacctctagcgacccggcctctttgccgtatcaccttgccgctttctgcattactaattatagcaaaaccgccctcgcgaaacgcccgatacattaatcgggagtaagcgggagcggctatgttatgcgaggtaggaaaggtgagtgaccgactgactggagtcgtgccttacccggcctttctcaccatctcaggatttcaggcagcgaccttggcggccttgtcggcgtcgaacgggtgggccacggaaacggtgctcttggcggagcccttctcgccgttgtcagaatcccaatgaatctcgtgccggtcgtcatggttgcgccaccagctggacaggatggagccggagatgttgtgccacacggagaagaacgtggacggcacggcggcgagcgggttggacgcgaaggaggtcagggccagcgtggcgcccagggcggagtcctgcatgccgacctcgaacgtgatggccttctgctgcgcgtagcggaagcccttcgggtagatcctgtacatcagcttcgagaagccgaagcccagcgagtagccgcacagattatgcaggatgaccaccgggatggccatcagggagctggccacgaacagcttcggaccgttggcggcgacgaccacaccgatgatcagcaggatggccacctgggagacgatcggcagggcgaccgtgaccttctcgatcttcttgccgaagatcatgtggcagatcacaccgagggcaatcgggaagagcaccaccttgacggcattgaggaacagggattcgaccggcacgctcacatactgggaggccagcagctgcatcagcagcggaatcatgaacggggcgcacagggtggagaggatgccgatggagacatcgagggccacatcaccacgggacaggtagctcatcacgttggaggaggtgccggacgggcagcagccgacgagaatcacgcccacggccagcgggccggacaggtggaagatcgcgcacagggccacggcgacgagcggcatgatgacgaagtgggccaccgtgccgacgatgaccatcatcggctgggtgaggatgcgcttgaaatcgtccagtgtcagggtcagccccatgccgaacagcacgatgcccagcatgtagccggtgtacgccttgccccacaggctggcggccggcacgaagtagttgaagacggcccagacgatgacgatgaccgtaaaccacttggtcagccaatctgcaaaggctttaaccttttccatggtgtttctcttcccttgttcggtgtaggtaacatcgcatgaaactaggcgggtcgcggttgatatgaaacataatgctcacattgtgaacgctcacgtaatcatctctgcaatccccagtcgcaccatcacgccgttgtgtgccctgacttttcatcaatcgccacacaagacccactcgtccacatcccaccatttgagacagcccacagcctggccccaagaatgaaaccaaccacttgattccatcgcgacacaccgatgagcacacatccgcaaagttgtgtatagtattcacctgttgtgcgaattcagcttgctgaatacgacactatggtggccatagctcagttggtagagcatctgattgtggttcagaaggtcgcgcgttcgagccgcgttggccaccccagtaaaacccttccgttcgcggaagggttttgtttttctccatgaattccccgctcctgccgggaaccgccgcgttgtacactcgggcatatccaattcatctaacacaaggacaaaaggtccgtcatgctgtcttttgagaacgattactcccgcgccgcccatcccgcagtgcttgaagccgtggctgaagccaacaaccatctgtattcgggctacgggtccgacgaactgagcgatcaggccaaggccaagatccgcgaggcctgcggccagccggacgcggatgtgtggttcctcgtcggcggcacgcagaccaaccaggtcgtcatcgacaccatcaccccggcgtatgcaggcgtggtcgcggtcgcctccggccatccgaacgtgcacgaggccggcgccatcgagttctccggccacaaggtacttacgattccccaacacaacggcaaaatggatccaaccgaactggacgagttctgcaagaccttctatgcggacggcaactacgagcacatggtgttccctggatccgtgtacgtctcgcaaagcaccgaatacggcacgatctactccaaagccgaactgcaggccatcgccgatgtggcgcataagtacgatatgccgctgttcgtggatggcgcgcgactcggctacgcgctgaccgccaccggttccgacatgacgctcacggatctggcgaccatcgccgacgtgttctacatcggcggtaccaaggtgggtgcgctgttcggcgaggccgtggtgtttaccaagcacaacacgccgaagcacttcctgacccgcatcaagcagcacggcgccttgctggccaagggcttcgtgctgggcgcgcagtttgacgccttattcaccgacaatctgtacttcaagatcgcccgcaacgccaatgaggcggccgatcgtattcgcgaggccctgcgcgccaagggctacatgctcactttcgaagcgcccaccaaccagattttcgtgacgatggatcagccgaccatcgaccgtctggagcgcgaggtcaagctcggcttcaccgagaaggccgacgacacgcataccgtgatgcgcatctgcaccagctgggccaccacgcctgaagaggtcgatcaacttattgaggtgttgtaaaacccttcgctaatctctccctccgtcatcgcttcgcgatgccacctccctcaccagagggaggttttttcgtagctcccgccgatgagggagctggccgccgcaggcggactgagggaaaacctctccgcaaacgagaaggctcctactcccctatcgccttgcgttccatatccacgaacttgtggaccgaggcttccacggaataatgcgccttggtgtattcggcgtatttctcgccccattcggcgcgctcggcctgatgtgcgatccaccaatcgatgcgtcgggccagcagggccgcgtcccgcacggggaacaacgactcgtcgatcagcgcgaactggccggccgccgacagttcggacgcggcgatcaccggcaccaatccgcacgccatcgcctcgatcacgctcaccgattcgatgtcggcaatcgaacaatgcacgaacaaatcgcccgaacgcaacaaatcgggcatatcggcgtgcttgtggaatccgatatcggccttgcgcgccagcaaacgcccggcgcggaacttgagatactgcttgagcggcccagtaccggcgatcaccagctgaatatcgccggcgtgccgggacatcgacaccgccttgatcagcgtaatctgatctttctcgctggccagtcggccggaagcgacgacacggaacggcacgggagccgaggcatccggatcggccggcttcttcggagaatacaccggtgaataaccattggaaatcacgtgcaacttggctttatacccgtgcgcgcgcaacaggctcgcggtcatttcggtgggcacatggatgtggtcaatgtgcttgtacagccagtgcttgaacagccagtacaggaagctggaaataccgggaatgcgacgtagcgggccggccgaatacagcacgttctccggctgcaggtggaatccggcagtcacgggaatgcccatttggtgggcgactttagcggcacgacggccgaatttgaacggcatatagatatgcaccacatccacgccttggaaggcggtgcggaacaacgtgtcgctgggttcggcgaattgcatgagctgcttggcggccacccacgagacgagcggcaccttattcacgcgcgccggatattcgggcgcccctataccgacaagcctcacatgatggccttgccgctccaattccgcagcccattgcaaagccgaattggaggtgccgttgccctgattgcccaccgtatcgaccacaagagcgatagtcagcggacgatcaatgctctcttcaatcccgttttcgcgcattgcctcatcctaaaccaccgcgaggcaatggcgtcggccgcgctgcttggataggccggaaatggtatgggctgccgcattttgcctaatattgaatcacgcgcttcgcagcgcacgatcggcgcgggccacggcctggaacaactcggcggtgtgcttgagcagactgatgcgcacccagccttcgcccgcctgaccgaagcagatccccggcatcagcgccacgccggccgtgttgagcagccaatccacgaatgcggcggaatcgccatgccaccgcgccagccggccaccatatacattttggacagcgagccaagttccagcgccacgtccagcgcgcccggagtctccagcaggctcagcgagcgtacgtcaccgaattcgagccccacataggcggaatcgttaagtacttcgactattgccagcgtgccggcttgtagcctgaaatgccggaaccggcacgccgctattcgctatatgtcgcatccaaaaatgttggcccgaccgccccatacttcatcggccggtaattgctaaggtacgacggctctgttacgcacgcaatggcatgtctatacgcagtatttatggcgggttacgggcatctgaatcttcatggggcggcaacctgcccatggggcggtatttaccccatggggcggtgaaattcccatggggcggtaaggcaaaacggcttaattccgcggtttcacaaaaccaacaaaccgccccatggactcattaccgccccatggggaatttaccgccccatgaagccggatattccgcccgtaattttgccgcgcgaggcactccgctcacgcgacataccgaaatcatcgcgtcatggcagaatgtgggtatgactgagaacgccgtgaatactgccgtgacttccgcctcttcccccgcaacctccgctgagacttccgccgtctcccccgcaactcgcgcagccaaccacccgctgggcacaccgctgggcaagcaccccacccgtgtgctgtttttgggcgctggcgagctgggcaaggaggtcacacttgaactcatgcgactgggcgcatgggtgtgtgctgctgactcctatgccggcgctccggcccagcaggtggcgcatgaataccgcgcgttggatatggcgaatgccgccgaattgcaggcattgttcgatgaaatcaagccggacatcatcgtgcccgaggtagaggccatcgccaccgatgtgctggccggtgctgcggccgcgggcgcccaggtggtgccgagcgccgaaatcgccgcgatctgcatggaccgcgagcgcctgcgcgtactggcccacgaagaattgggcttgccgactacaccgtatcgttttgccggctcgctggaagagctgcgcgccggagcttcggaagtcggctatccgtgcgtggtcaagccggtgatgagctcgtctggtcacggccagtcggtggtgcgttccgccgacgccatcgatgccgcttggaccgaagcgcaggagggccgccgcgccgccgatgagggcgatgtgtcgcgcgtgatcgttgaggcgcttgccccgctggagcgtgagctgacggtactgaccgtttcttcgtccgccggcattgtgacgtgcgcgccgatcggccaacgtcaggagtccggcgattaccgcgagtcctggcagccggctaccgagcccgatggcgaggccgagcgggcgcgcgacatcgcatgtaccgccgttgaaggcttggtggccaaggctcaggcgaccggcgaaaccggttggggcgtattcggcgtggagctgttcgtgctcaccgacggctcgattctgttcaacgaggtctccccccgtccgcacgataccggtatggtgacgatgacctcccagcgtctgagcgagttcgcgctgcacgcccgcgcgattctcggcctgccgatcacccccgagcatgtggcgctcacgattccggccggctcggtggcggcaagccatgcgattgtggtggccggcgacggtgaggccgagttcaccgatgtggccgctgctctggccgaacccggcacggacctgcgcatttttgccaagcccgaagtgcatggccaccgccgcatggccgtggcactggccgtcggcgagtccgaagccgacgcccgtgccaaggccggccgtgtggccgatgcgttgacgattaccgtggagtagtccacggcctgatcagctcagcatggcctcaatattgttgccgtccgggtcgtggatgaacgcggcgtaatacgtggggccatagttcgggcgcgggcccggagcgccgttgtcggtaccgccagaggcgagaccggcctcatggaacgccttgacggcggcctcatccttggcgcggaacgccacatgagacggcaccaccgggttgccgtccttcggagactccaaccaaacgctgtcaccatcctcgtcattggcaaagcacacggcggtcgggtacgccactttcttgacgtagcccagcggggccagcagcttctcgtagaaatccgcgtactgtgcggcgtcggaaacaaacaaaccaatatgatcgatcatgacgaacctccttgcaccatttcgtcactcccattatcgtgcgtgcgcggccgtacactcacgttttgtctattgacgaacatctgagtgtccgcgtgcttgcgtagatactgttactccgaacgactatgcgaccggcaatgagtcgattgtcggaccaataccatccgcctccgccatcccaacagcgtatggtcgttcgatgcagcgacgtatgatgcgctggccgcatcgtagcgtcatgccgagtgttgttgtagccctcgattggtacccttttaccgttagttcacccagaaattccactcctgaaaggtgagtcatggagaagctggaaaagctctacgagggcaaggccaagcaactgtacgcaaccgacgatcccgaggttctgtgggtcgaatacaagaacaccgccaccgctggcgatggtgaaaagaaggaagacttcaccggcaagggccgcctgaacaacctcatcaccaccatcatcttcgacctgctcaagaagcgcggcatcgacagccatctcatcaagcgagtgaacgacaccggccagctggtgcgcaaggtgaacatgttcccgttggagatcgtgctgcgcaacgtggccgccggccacttctgctcccgtctgggcgtggaggaaggcctgccgctcaaggagccggtgcttgagtacttcctgaagaacgacgatctgcacgatccgttcgtcaacgacgatgacctggtggccctcgacgtatgcactcgcgaggatctcgccgagatcgccccgctggcccgcaagatcaacgaggccctgatcgagatcttcgccaagatcgacgtcaagctggtcgacttcaaaatcgaaatgggccgcgccaccgacggcacgctgctgttggccgacgagatcaccccggattcctgccgtctgtgggaccagaaggaccactccggcaaggtcgagcaccttgacaaggacctgttccgccgtggtctcggcagcatcatcccggcctacgaagagatcgaggagcgcctcgccgaactcgccaagtccgaaggcatcgaagtcgccgagtaagtcgtttaggtgcaggtagcagaaacatacagctggctcctctctctgaggggagctgtcgccgataggcgactgaggggaggtcaagacgttcaccgccatgacaactcccctcagtcagctccgctgacagctcccctcggagaggggagccaagttcttttaccgcacttcttcaatttttcaatattttcaagaaaggatttccatggtttttcgcgtgtacgtggaaaagaagcccggctttgatgtcgaagcccagcagcttgcgggcgaactgcgcacgatcctcggactgaacggcctcaaggccctgcgcatcgtgaaccgctatgacgtcgaaggcatctcccaggagctgttcggccagaccgtgcccaccgtgttcagcgagcctcaggtggacaatgtggcctacgacctgcccgacttcgccggcgccaaggtcttcgccaccgagttcctgcccggccagttcgaccagcgcgccgactccgccgccgaatgcatccagctcatctcccagggcgagcgcccgacggtccgttccgccaagctgtacgcgttggaaggcgaactgaccgacgccgacgtggacaccatcaagcattacgtgatcaacccggtcgaggcccgcgaggccagcctggagaccaaggaaaccctgaagacccaggtgccggtgcccggcaaggtcgagaccatcgccggtttcaacgagatggacgccgaagccggccagaagttcatcgacgagcgcggtctggccatggatctggccgacctcgaattctgtcagaagtacttcagcgaggagggccgcgagcccaccatcaccgaaatcaaggtgatcgacacctactggtccgaccactgccgtcacaccacgttcggcaccgagctggacgaagtaaccatcgatgacgccaccgtcaaggccgccttcgagcgttacctggcgatgcgccacgagctcggccgcgacgccaagcccgtctgtcttatggacatgggcactatcggcgccaagtggctcaagaagaacggtgtcctgaccggccttgacgagtccgaggaaatcaacgcctgcaccgtcaaggtcaaggttgacgtgaacggccacgacgaggactggctgttcctgttcaagaacgagacccacaaccaccccaccgaaatcgaaccgtttggtggcgcggccacctgcatcggcggctgcatccgcgatcctctgtccggccgttcctacgtgtatcaggcgatgcgcgtcactggcgccgcggacccgaccgtgccggtctccgagacgctggaaggcaagctcccccagcgcaagctcgtgaccaccgccgccgccggctacagctcctacggcaaccagatcggtctggccaccggtcaggtcgacgagatctaccaccccggctacgtggccaaacgcatggaggtgggtgcggtcgtggccgccactccggccgaccatgtgcgccgcgaaaccccggcccccggcgacaagatcatcctgctgggcggccgcactggccgtgacggcatcggtggcgccaccggttcgtccaaggcgcataacgtggaatcgctcgaactcgacggcgccgaagtgcagaagggcaacgctccggtggagcgcaagctgcagcgtctgttccgccgcggcgatgcctgccgtctgatcaagcgctgcaacgacttcggcgcgggtggcgtgtccgtggcggtcggcgagttggccgacggcctgttcgtggacctcaacaccgtgcccaagaaatacgagggcctggacggcaccgagctggccatctccgaatcccaggagcgcatggccgtggacgtggccgccgaggacgtggacgagttcctggcctacgcccgcgaagagaacctcgaagccacggtgatcgccaccgtgaccgaggacccgcgcatggtgatgacctggaacggcgacaagatcgtgaatctgtcccgtgagttcctggcctccaacggcgcttccaagcaccagaccgtgcatgtcgaggcacagcagtcctacgagaccccgtggggcgagggcacgctggccgagcgtatgaacaagctggtcaccgacatcaacgtggcctccaacaagggcctttcggagcgcttcgactccaccatcggcgcgggcaccgtgctcatgccgttcggcggcaagcgtcagctcaccccgaacatggccatggtcgccaagctgccggtgttcggcgagaccaccaccgcttcggcgatggcgtggggcttcaacccgtacatcatgtccaagaaccagttcaccggcgcctacctgtccgtggtcgagtcgctggccaagctggtcgcggccggcttcgagcatgagaaggcctacctgagcttccaggagtacttcgagaagctgcgcgacgagccggaacgctggggcaagccggcggccgccgtgctcggcgcactgatggcccaggtggacctgggcgccggcgccatcggcggcaaggactccatgtccggttcgttcgaggatctcgacgtgccgccgacgctgatctccttcgccgtggccgtgggcaacatgaagcgcgccacctcccctgaactcaaggacgccgatcaccgtatcgtgcgcatcgcgccgcgctacctggccgacggtctgaccccggacaaggatgcgctgcttgaggtgttctccgtgatcgaggagctcaccgacttccacgatgccctggccgtctccacgccgggctatggcgccaccgccgaagccctgttcaagatgacgctcggcaaccgcatcggcgtgactctgaacgacagcatcgccgtggacgacctgttcaccccggcatatggttcgttcatcgtcgagctggcagacgatgccaagcttccggccgtctccaatttggtcgagatcggcgaaatcggcaccaccacctccgagtacgtgttcaaggccgccggcgagacgctggacctggacgctgtgcaggaagcttgggagtccggcatcgaatccgtgttcccgtaccgttccaagggcgaggacaagggcgcgaccgtcgagaccatcgacttccacgcgccgaagaagaccgtgtacgtcggctcttccgtggccaagccgcatgtggtgatcccggtgttcccgggcaacaactgcgagtatgattccgccgccgccttcgagcgcgccggcgccgacgtgaccacgctgatcatcaacaacctgacaccggccgcggtcgccgaatccacgcaggcgttggtcgatgagatcaacaagagccagatcgtgatgatcccgggcggcttctccggcggcgacgagccggacggttccgccaagttcatcaccgcgttcttccgcgcgccggccgtcaccgaggccgtgcgtgacctgttgaagaaccgcgacggccttatgctcggcatctgcaacggcttccaggcgctcgtcaagctgggtctggtgccgtacggcgacatcgtgccgatgaccgacgcctgcccgacgctgaccttcaacaccatcggccgccaccagagccgactggtccgcacgcgcgtagcctccgacctctccccgtggctgtccaagacttcggtcggcgacatccacaccgtggccatctcccacggcgagggccgcttcgtggcctccgacgaggtactcgcccagctcagggccaacggccagatcgccacgcagtacgtggacgagaccggcacccccggcatggatctggatgtgaacccgaacggctcgctgctcgccatcgagggcatcaccagcccggacggccgcgtgtttggcaagatgggtcactcggagcgttccggcaacggcctgtacgtcaacgtgcccggcaacaagtaccagccgatcttcgaggccggcgtggaatacttcgccgcctgataatcggcgcgtatcgcgtctgatacggcacacagggaaggaactctcgggttccttcccttttttgttcatgccggtcatgggctaaggttggggtgttcgcactaccgaatccgccgctgaaaggacctgtcgtcatgccgatcaacgaggcattgttcgccgcgatgaaggccgccagctacatcaagcccaacgcgggcaagtcgtacaaattgcagcgcgtggcggaagagcttatcgccaagcaggcacccgccaatccgaaatgccgtgtcgaggacgccttcgcgcctatggcggatggatatgccgtaccattgcgagtgttcacgccgctggtcgcctatggagcgcccctgcccgaagccctggaggaatcttccgccaatggcacgccagtggcctcggcaatatccgcgattctgcccgccgtattacccaaagtcctacccaaaatacccatcaaggaaagcacgtcgagcggcaacaccgacggtatttccggcaatgccaacacggaacttccctcagtcacgccgcgtggcacgatcctgtttttccacggtggcggttggaccacaggcggcatcaacctgtacacgcaggcttgcgcgcatatggccgtacgtctgcaacgccgtgtgatctcggtcgagtaccggctggctcctgaataccgcttccctactgctgttgaggattgctatgaggtagcccggcagctgtttgctggggaattgccgatttctggggtgggtggttctgttgatgttgaccacccccagtcggctgcgccgacagcccccaccggcgggggcgatatatctgcgacaatcccagcaccggatcccgacagcatcgtgctgtttggcgacagcgcgggcggcaatcttgcggccgccgtctcgctcatggcccgcgaccgcggcgagttcatgccgcgcacgcagatgctgctttacccggtggtcggcaacgactacaatcccgagaccagcccgttcgaatcggtgcggaccaacggcaccgactacatcctcaccgcacaggacatggccgactacatcgacatgtaccgttcgtccgtggccgacctgaccaatccgtatttcgcgccgctcaccgcgcatgacctgagcaatcagccgcgcacgctggtgttgtccgccgaatactgcccgctcagagacgaggacgaagcgtacgcccgtcgtctgcaattggtgaacgacaacgtctcctgttaccggattcacgacggcatccacggttatctgctcaacacgtcggccgtagggctggtgtccaccacttaccggatcatcgagcatttcctcgacgacacaccgctggtgccggctcccggcaccggcaccaccgccaacgcaccggagggaggcgacgcatggcaagacgtacttggtaccgactagacaacatcggcaagttctactcctcccaggctggccgctcctcgcagaccgtgttccgctattcggccgagctggcggacgacatcgccccggacatcctgcagcacgcgctcgaccatgccatcgcccagttcccgagcttcaacgtgcacctgctcaacggcatgttctggcattacctcgaacagtcggacggccggccgctggtggagccggaacatctgccgatatgctcgcgactgcattacgggcccaaaagcatgctgttccgcgtgagttatttccgcaatcgtgtcaatctcgaggtctcgcacatcatttcggacggtcgcggcgccatcaacctgttcaagtcactgttgcacgcctacatcgccgagcggtacgacgtgccgggcgtgccttcggattacgacggctcggacagcgacaaagccgaaaacagcttcgacaaatactacgagaaagacaaggccggtgccgcgcccggcacgaagatctaccggctggccggccccatcgaccgggacgcgcccacgttcatggaatatcacgtcagcgccagcaaggtgcttggtgcagcgcatcagtgcggagtgagcctcacctcctacctcatcgccgcgatactgtgcgcgattcgcgacgtcatgccctcgcgcgcccgcaatcgcgcgattcgcgtggatattccggtcgacttgcgcgccttcttcaggtcggagaccgtgcgcaacttctacggcatgacttacgtggcgtacacgccggccgatatcgaagccgatgaggactccgcgaaaacttccgcaacgggcccagacgcgaccggcgacggccagcagtccgccgcccgcaccgcgcacggcaacggtatgggtggattgctgaccgatgagccgttggccgacatcgcccgccatgtgcaggagcagctcgaccatgccaccagtcgcgagcgcgtcgaatcgcatatgaaccgcatgattgcgctggaaaagaatccggcgctgcgtctcgcgccctcccctgccaaggactgggtgctggagctggcccggttcatcgccgaccgcgagaccacgaccaccgtctcgaaccttggccgagtcaccttggacgaacgactcgcgcgccatgtgcgttcggtgagcttcctcaccacaccggccagcctgaatttcacggtctgctcgtttggcgacgacctgagcatcggcatctccaccgtctaccatgatctgaacgtcatcaagaacctgtgtcggattctcgccgcgcagggcatcagcggccgtatgaacatcgccggcgcgcatgtggagaaaggagcgtcggcatgaagcattgcgatgcctgcaacgtcgatttcaccggcgatatggcccgttgcccactctgtcagaacgaattgcacggcgaggcctctcccgccgcattccccgcgcagcagatctatctgcgtccgaggcgtttggcggtggagatcatcacgtttgtaaccggcgcgattctgctgctgcatggcttcttcagctatctgttttcgtggccgataccgattgccagtgcatcggcagccgcgctgatcatcagcgtgctgttcatcaacagtgcgattctgcacgcgccgcggccgcttcgcctcatgtttcgatatttctatatcatgctggcgattgcgctggtctggtttgtggcgacgatgaatcatgtcgtcaccatgttcgtcataccgatcacgtgtctggtttcgctggtctttgacgtggtgctgcttatcgtgctgcgggccaaggccattgaccagtacgccaagtatctggcgttcgacatcgtcgccggtctgctgcctctgacgttcattccgctcggctgggctccgtgggatgtgctggtgatggtcagcgggctggtctccctgctggtgctgctcggcctgctcgtcttcgcccgccgtcagctcttctcggaattcggcaaacagttctcggcctgattgcctcgtgcgctcaatcgcccgacttagaatggaaaccatgagcgaacatgtggagcatgggtttgggccggtgtgggatggtgagtcccgggctttgattttgggatcgatgccgagtccgaaatcccgagcggcggcgttttactatatgcatccgcagaaccggttttggccggtgatgcaggcgctgtttgccaactccgctgatcctgccgacgccgtcggcgattcacctgagtcccgtcgtgcgtttgctctgcgccaccacattgcgttatgggatgtcattgcttcttgcgatatcaccggagccagcgatgccagcatccgcaatgccgcgcccaacgacttgacaccaatcttgcgcggagctccaatcgcccacatcttcacaaccggcgcgaaatcagcgcaactttaccgcaaacttatcgagccgcgcctgaccgaagccggtatcgccatcggcatgacccaactgccctccaccagcccagccaacgcctcaatgcgtttgccggaccttatcaccgcctatcgcgaagcttttcaaaaggcaaacgtactagagaatgcgtattggaaaaactaagtatggcgagaccatcaatctcggacggcaaacccagcatcacgaatcctatcttgcatctcattggcaatagcaatacagcgcgcccgcgaaataccagccttcacaccgacaccagtcaaatccgcaacagtgatgttcttcccctttccgttcaccgaagtagtgtgctcgccgttgattccagggttttccgttaaatcatatccaggcgacaatctccacgcttggcgagaacgatcatagagataagagaaattcttcgcatgatcgtcgcggtttccgatgaacacgttaaagcacatgagacggtacaaccgctcgcactcctctgcgctgttgcacacacgcatagtcagccgcatcaatagtccgtaatccaaattgggaatacgatgcgacgtttccagcaatccgccggcggaaatcatatgcaccttatgttcggtgccatcgtcatcccgcgtacggtcaaaccgccggacaccaaaatatccagaacattgcgctgatgcgaacagacgagtttccggcatatcaatgccgcactcgcgcgcaagtacagaaatttgatactcctgttctccgatattcgccgagtctacggatgaggggaatttgataatccattcttctccatcaacctcagtcagaattttcggccgcgcgccaccggacgagccaccaagggcaaaaagctgatccaaatcctcagaaaaatcagtttccagaagattcgcgcactctctcgctatatcgtccaagtcggtagctgcaacaccattttcaatgtccgccgctggttcatattccaaggctcccataccgcttgatcccacaatggacagcctcgtcaaggttccgatagagtaagggtctattcctctctgacgcagaagacgatccgtgagcaaacgcccccacccgtccggcatactgtcatcgaacgccccaaacaaaccatgcaatggatctcttttggcgacaaagaccccctcacgcaatggcagactcagcggacttatgctgaatccactggacaaccacgagctttcgtacgagaacgccactgtttttgccggcgacagtgtcagcgagccaacaatttcaccatccaaaaacacccgtacccgatcaaccgataaatccaacggcactgtctcgctcatcgcgcttccctctcccgcgcagcaatgacatcatcgatagttgcatagtacggctgtgaaaacagtgtctcaaaatcctgctcgcaactcagcgcaaacgcgatattgatgagcgccgtcaatgagatttcgtgctgctgctcgaaccgtctgattgagccaagactcacaccggattttctagccagagccgtttgcga

SEQ ID NO: 1036 - DNA, 18684 bp, Unknown
  R117_24m  MAG No. k141_75406
gccgccgcattgaggtagttgaagtcgccatcgatggacagatggtagtcgccaagggtctgatctccgtcggcgatgtggaaggaggcgtgcgccgtgtcggcgggccaggcgacgacgtccgcactggtgccggcattatccgcgtcatgcagggcgaaggtggttgcgccgatgccggctgccgccgcgtcctcccgcaacagatcggcgtgcagactgtccgcgccgagtaccagcgacttcgcgttggcgatgatctggcgcttgcaatacaggtaatcctcgaacgtggggtgttcgatcgggctgatgtggtcaggggagatgttcaggaacgcggccacatcgaaagtcaggccatagacgcggtccaccttgtacgcctgggaggagacctccatcaccagatactccatgccgttatcggccgcctcgcgcatcatgcggaaggcgtccatcgattcgggcgtggtcagatcggactcgacgtaggtgtggccgtcaaggcaattatcgaccgaggagaacaatgcggccttgccaccggagacggcgttgataagcgcctgcgtgaagtacgaggtggtcgtcttgcccttggtgccggtgacgccgatgaccgtgagctcgttctgcggatatccgtagaacgcggcggacagcaggctcatcgccttgcgtgcgtcgttgacgatcaggccgggggcggcggttgcggctgagtactcggtttcggccacgtatgcggccaggccggcttcgtcgatgccgttcagatactcggccttgaatcggcccttgcagcacagcagggtgcccggcgtgaccttgcgggtgtcgtaggtgatgccggcgaacggttcatccgccgaagcgatacggaccgggtcgtcggtccagacatccccttggatgatttcacgcagcagatggtgttccttgagcaggtcagcggccgaagccaaagtcaaagccataattgttactccctattatctagccgatacgccattctacaggtggggtgtagcgtgttgtggctcacacgtcatcgaccacgatatgggcacatgatttgattagaatggtgaaccgtgacgacaagcgaagcaactacgcaatccgggcagtcagccggatcgggcgagtccatggcagccaagcgcgccagatttgaacagctcgccatgcccgccgtcaatgcactgtaccggcaggcgatgaggctgaccaacaatcccgatgacgcgcaggatctggtccaggacaccttcgaacgcgggttcaaggccttcgactcattccagccgggctccaacttcgaggcgtggatgaccaccatcgagcgcaatgcctacttcaaccagtatgccaaggccaagcggcgcccgcagcgtgccaacgactccaccggcgaatacgacgattgggacatttacgatgccgccgaacatacgtcggacgggctcaagtccgctgaagaggaatatttggacgccttcgcgcccgaggaaatcatggccgcgctcgccaaactctcgccggaacgccggcaggtgttcatcgacgccgccatcgacggcaagtcctaccaacaggtggccgatgagcagggcgtgaaaatcggcacggtgatgagccgcctgaatcgcgcccgcacgcaactcaagcgtgagctcgcctcgtatgcgaaagagcgcgggtatgcgactggttcgtcggctggttcacggactggttcgtcggctggttcaccatccgcgaagttgagcgaaaacgttggtcgaatcgccgattccgaccataatgaaagtagtgaacaaactgttggcagcaatggcgacacgcaagccgtagtgagacatagtcatgcgactcacgcccacacgccacaacagtcaagcaagctttcgggaaaggagatctgatgaacgatcagccggtagagcgtactcgccatatctccataacccgtacggcggccgatggcacggtaagccagaccgaagtgcatatcacggcggtgcatcatcgttcagtagataccggctcggccgctgcgtcggtccagacagacgtgcatatcgttacggagggcgactgttttgacccccgtacctgctgcgacgagcgtgaacaggcgttgattgccgcgttgcgtgcctacttgcgcccggatgtggcacccgaatgtctgatggcccggctcaaggccacgcttgatcactgctgcggcgaagataagtaacgacatatacaacaaggcccgtctgatgtatcatcagacgggccttgagcgttctataagaaacgcgaagaatcaggcgttaggacgcttgccgtggttggcggccttcttacgacgatccttgcgcttacgtccgcgcatgcccatgatggactcctttgctgcagtaaaaaaataagccttcggaattatgccacataagtacgacgtgatgcaacacgggtgtccatgtggcgatgatcgtcaggcttggttattcggtttttcagatttgttcggcgtggaaggtgaccacggtggtgtagtcatcgcccggctcgagcacaaccagatccttgccggtgcggaaggcgtcggcgtaggcggtcatcggttcgacggccacgccggcctgacgagccttcccgccgatttcgttgccggtgcacacctgccaggagttgatggtcttgtcgccggtcagcgtgaccttgatgccgtcggggcgggtgaacacggcggaagtgctgccatcttcgccgcggttggtgatatcggtccaggcatcgtcgaagccacgtccctccagcgtggggttatcgcgcaggtcgaagatgccggaaaccggctcttcaccggtgggcagcaggtgttcgtctacggtcacgtgggtatcgcagtgcagctcaagacggcaggactcgttgtcggcggtaatggcctgaccggtggcgtgcttgccgttggccagccacgggtggatgccaaatgcccatggggccttcacgctgtcgttgttgtgcacggtgaaggtttccgtgagaccgttctcgtcaagtgcataagtggcggtgatggtgatatcaaacgggtagccggcgatgtcgggggaacgccaggagagcgtcacatgtgattcctgcaaatcaacgagctcccacatgtagcggtaggcgtagccgtgcagggaggattggcggtcgaactcgtcgatcggcatctggtagtcttcgccatcgaaagaatactgaccattggtcacgcggttcgggtacggtgccagcacccagccgttgcagcaggggatgaccttgttcgggtcgaaggggacgatgaggtcttcgccgcgccacttcagctcgcgcaggctggcacccagttcggtgacgacggcactccattcgccggacgagatgacatattggttaccagtgcgaggcttcaaagccatagtgcacactcctttgtgaaacagattgttaccgctcacaatcgtatcgcataagtcccaagacgcggcggcacataaggataaaaaattggctcccctctggaggggagccagcgtaacggaactacttctggactacttcgtagcggaccacagtggtgtagtcgccattgggggcgagcgtcaccaagtggtcaccagtgcggaaggcattggccggggcggtcatcggttcgacggcgataccatacggatgctcggcgaacggcgcgccagtggcggtgtagcactgccaagcattgatcgtctcatcgccaatgagcttcacttcaataccgtccgggcgggtgaatgtggtggtggtcgtaccatcggcggcacgctccacgtcgacccaggcatcatcaaaggcgcggccttcgagcgtcgggccatcgttcaggtcgtagatgccggtaaccggttcggtgccggtgggaatcagcgcctcgttcaccgtcacatgactggcggccttgatctgcaggtggcaggcggcggagtcggagtcacgctcggcggaagtcgcgccctgcttgccattggccagccacggatgcaggccgagagcccacggtgccggctcgtcgccatcattgcgggcattgacggtcacggtcatgccgttgttgccgagttcgtatgtgacggtcacggtcacatcgaacgggtatccgtccaggttggggaagcgcagtgaaagcgtcacggcgctatcggtcaacgattcaagcttccacatgtagtggtaggcgtatccgtggttcgcgttgttgcgcggtgcgggatgatattcgttgaccggcgcgcagtaatgcttgccattgaaatcgtattcgccgttttcgatgcggtttggccacggggccagcacataaccgttacaggtgggggtcaggtcgttgactccgaacgggcagaaaatttccttgccttgataatcgaatcggcgaatcttggcgccgagttcgcagatgacggcggaataatcgccatagtgaatcgaatactgatttccggtgcgtggtgttttactcgtcatggaatcactcccgtagtgaggttggtgggccggtagctcctgctatcgctggccccagtctagcgcgtctcctctatcgaggcggggattggcgatagccggcatataataaacaattcgtacagacacggtagcaatacgtggagtgacgagtctcacaccatcatgcgagaagcacgtggattccttggaaaccggtgattcgtgggagacgcggaatagttgtgacggcagattcctgtaatccctgccttacactggaaaaacactattgacgttcaggaggttccgatgaccaaaagcgttgtgctcgctgatccgcgaggcttctgcgcgggtgtggaccgtgcgattcttaccgtacagaccattctcaaagccgcggaggcttccggaaagcggacgcgcgaggatgggctgcccccggtatatgtgcgccggcagatcgtgcacaacaagcatgtggtcgaggatttggccgggcaaggcgcggtgttcgtccaggaattggcggagattccggatgctgctgcccaagcgggtattccggtggtgttttccgcccatggcgtatctccggtagtgaaggcggaagccgaacgtcgtggcatgcatgtggtggatgccacctgccctctggtgggtaaggtgcaccgtgaggtgctgcgtttcgtgcgcgaggggtatgaaatcgtctatatcgggcacaagggccacgatgaagcagtcggcgtggtgggggagaaccccgaacatgtgcacttgatcgagcatgaatcggatgtcgattcgttggattttgcgcccgacaccaagctggtgctgctctcgcagaccacgttgagcgtggatgagaccgccggcaccattgccgcgctgaaggccaagttcccgtggattcaagagccgccgagttcggatatctgctatgccacatcgaatcgtcaggctgcggtcaaactggtggcccagcagtccgattgcgtggtgattgtcggatcggccaactcctcgaattccgtgcgactgatggaggtggcgcaggagggcttggggaagcgcggcaaagcgtatcgcgtggatgatgccagcgagcttgatccggcgtggttcgtcggactggagtccgtgggggtctcctcaggtgcctccgtgccggacgaactggtgtccggtgtgattgacgctctgcaaaacttgggtttcaccggtatgaagtccgtcgaaaccatcaaggaaaacatgcacttcgtgctgccgtcggagttgcgcaggaagaagtagtcatccttggctcccctcaccgagggaagccaagaacggtcaccacgtgccgattggtgcggcaacggcgttcaagaccttgagcaggtcctgcgggttcacgcctacggacagtccgcgtttgccgccggagaccagaatctggtcgaattgcagggcgctttcatccaacacagtcttatgacgtgtcttctggcccaacggcgagatgccacctaccacatagccggattcacgcattgccaccttgggatcggccatagaggccttcttggcacctacagccgcagccagggccttcaaatccatatgtccgctgaccggtaccacgcccaccacacgctccgaaccggtgtccgccatcaacgtcttgaacacctgatgctcgtcgaagccgagcttggtggccgcctccacgccgtagccgtcatccatatggtcgttggagtgctcgtattcgtatacgtggaattccacgcccgccttctccagttggactgtcgccggggtggaacccgcgcccttatcatgcttgcttttctttgccatgattaccgttctactacgaagagacccccgcacaaggcgggggtctcacagcttagttctcaaacgaaccgtagcggcctagaccgcagtggttcactcggagatctcagcgaagtacagcagggtacggatcatgttggaggtgaagccgtactcgttgtcgtagaaggacacggtgcgagccagggtcacgccgtcaatggtgttgacgtcggtctgggtcgggtcgaacacgccaccgtgggtgtcgccgaggatgtcggaggagacgatgccctcatcgttgtagccgtagtaatcggtgtcggagaaggcagccttgaaggcttcgttgatctcgtcggcggtggtctcggtgttcagaacggtggtcagctcggtgacggagccgtccggaacctggacgcgctgggcatggccctgcagcttgccgttcacggacggaacgaccttgccgatggccttggcagcgccggtggagtgggcgatggtgttgatggcggcggcgcgcaggttgcggccggtcttggtgccacgcgggccatcgagcagcatctgggtgccggtgtaggcgtggatggtggtcatgaagccggccttgatgccgaacttctcgtccagcagcttgaccatggcggccatggagttggtggtgcaggaaccggcggagacgatcacgtcggaagccttgaggatgtcgtggttcacgccgaacacaacggtcggggtggtgtcatccttggccggggcggagatcaggaccttcttggcgccagcgttgatgtgagcctgggacttctcggcggaggtgtagaagccggtgcactcgagcacgtactcgacaccgtcgttcttgacccacggaatgttgttggcgtccttctcggcgtagaccttgtattccttgccgtcgacgatgatggagtcttcggtggccttgacgtcaaccggagtgccatcgtcatgacggaaggtgccgtgggtgctgtcgtacttcagcaggtaagccagggtagccggggtggtcagatcgttgatggcggcaacttcaatgtcaccagcctggccgccgcgagcctgcagctcgaagatgcgacggaaggcgagacgaccaatgcgaccgaagccgttgataccaatcttaactgtcatgtaattctcccttgtagggtggccttggcgcgctttggcacaccgggccattgtttaccaacagttgctactgtaatgccgactctgtacacatggcaacgtttcagcgtgcgttttgggtaaaaatgccgtattttttgtgagcgctcacaatttggattgcccgcaaccgacatgtgattttcctctcctttggaggaatgtctcgaatcatcacgagcaagcgcgcggcatgcaagtcagcgaaccagcagcttggacacttcggtgtccagctcgccgatatcgccgccgaattcatggaatctgctcacctgtggcaacgccacttcgatggggaaggtgacgatcagtgtgccgcgtttcacgctgatggccgcgtccacgccgtcgcggaactcgttgctgaccccctgcaccaccgtattggtcagcgtgccgtctttaagctcatatttcagccccggttcgttcacgccaagcgaaacatcggagtgggagaacgccgacaccatgcggccgtcctcgggcaccggatgcgcggggaacgaaagcctgccatcggtgatggccgtgacgatgagcccgtcgccatacagatacccgcttgccccgtgtcgggccagcagcgccatcagttgaatgccggaaatcgtatggtcaatacggccgccaagcccgccgtacacgtgaaactcgcggcaacccgccgaccagccgaccttcagcgcggaaagcatgtccgggtcgtccttcaacgcgggcagcgcgatggtgcgcacatcggtgcggggcggccggccctccagcgaatcgaagtcgcccaccaccacatcgggcacgatgcccaactcgcgcgtatggtcgagtccgccatcggccgcaatcacatacgcaccggtgggaaccacgggcgtgcccgcatagtattcgcccgcaccaaaaatcacgcatacctgagtcattatgcctactgtagccggtatccacccatcgacacacggtccgcgaatgtccgggcatgtggtaagattcctatttggcttgagaaatcaagaaagcggggcaaccccacctggaagcctttcaaggcctcgggttcaaggcaaacagcctagcgattgcgatatacaacgcgcaatcaggaatgacgcaaagaactgatatgcgtctgcagaagatgagcgcatattggcgctggttttggcttgccatgaacccaaagcattgaacaggactccagcaaaggacctcgccacggaattaaagtagaggattggagtcatcatcagcgacgaaccacgtattaacgacgagattcgcgtcccgcaggtacgcctgatcggcccgaagggcgagcaggtgggcgtcatcgcgacttccgtcgcgctgaacctggccaaggaggcaaacctcgatctcgtcgaggtggccccgaacgcgaagcctccggtcgccaagctcattgattacggcaagttcaagtacaacgagaagatcaaggctcgtgaagctcgccgcaaccagagcaccgcggaaatcaaggagattcgtttccgcctgaagatcgacgaccacgatttcgacgtgaagaagggccatgtgacccgcttccttaacggaggcgacaaggtcaaggtcaccatcatgttgcgcggtcgtgagatctcccgcccgattggtggtgtggaactgctgcagcgtctggccgacgatgtcgaggaatacggcaccgtcgagtccaagccgaagcaggagggccgcaacatcatcatgacccttgcgccgaagggcaagaaggtccacacccagtccgagcagcgtcgtcgtggcgccgagtcccgcgccgagcgtcaggctcgccaggcggctcgtctcgcggccaagcaggagtctcaggctcaggccgcggccgacgcgcagtccgcgatttctcagaagacttccgacaagaagcaaaccagcaaggagggcagcaatgccgaagatgaaaactaattccgccgcttccaagcgcgccaagatcaccggcaccggcaaggtgaagcatgtcggttccgccatgcgccacaacctcgagcacaagtccgctcgcaagcgccgtgaactgtccgccgacgatgtgctgcgcggcggccaggccaagaagctgcaccagcttctgcagaagtgagcatagggcttacccggaaataataagactttagaaagctgaggaatagattatggcacgtgtcaagcgcgcagtgaacgcccacaagaagcgtcgcgttgttctcgagagggcttccggctaccgtggccagcgctcccgcctgtaccgcaaggccaaggaacagctgctgcactcctttaactacaacttccgcgaccgcaaggctcgcaagggtgatttccgtaagctgtggatccagcgcatcaacgctgccgtccgcgctgagggcatcacctacaaccgcttcatccagggcctgcgtctcgccggcatcgagctggatcgtcgcgctctggctgagatcgccgtctccgacccgaacaccttcaagaccatcgtggccgccgccaaggccgccctgcctgaggacgtcaacgctccggttgaggcctgattgcttgaagtcgtgacttcacactagaaaccccgcttccgagcggggtttcctattattagccccccctctgacgaggggggggctcccgcgcagcgggtggggaagagaacaaacacatgaccaacggattcaccagactcaccgagcagttcctcgtccacatcggcgtggagcgaggactcgccacggccaccgtcaccgcctacgaatccgatatcgccaaatacattgattggctcgaaacccgcggcatccacgaaccggacgccataaccaaacaagacgtcgaagactacatcgccgcccttgaccaggcgggggagtccgcccgctccaaagcccgaagactggcctcgatccatgaattccatcgcttcgcgctcggccagcacgcggtgactgccgacgtttctgccgcagtcaaggcacccaaaggtgccagcaccctgcctgacgtactcaccgtggacgaggtaacccgtctgctcgacgcggcggcagccggcggctcaaccgatccggtggtattgcgggacaaggccctgctcgaattcatgtacgccaccggctgccgcgtctcggaagccaccggtgtgaatctggacgacatcgacctggacgagcacatcgcgcgactcatgggcaagggctccaagcagcggcttgtgccattgggcagctacgcatgccgggccatcaccgcatacctcaatgcggggcgtggcgagctggaacggcgctccagcgccaagattcccgagagacgcgcactgtttctcaacaaacgcggcaagcgcatctcgcggcaatcggtatgggaaatcgtcaaagcaaccggggagcgggccggcatcaccaaaccactccatccgcacaccttgcgccattccttcgccacgcacctgatccaaggcggcgcggacgtgcgcaccgtgcaggaactgcttgggcacgccagcgtgaccaccacgcagatctacacgcacgtaagccccgaaaccctgatcgaaacgtatctgacctcacaccccagagcgcggtgagacacaccattttgcgacgcgtccgcccatagcggaatcgcggcgggggggggagcaccaaagtcggccggaaattcaaggcgtgacaatacagtacataacagcgaaccgtcagccaggaagaggtattcatgctgcagatcaaatcgatctcgaagcgctataaaaccggtgatttcgttcaacaggcgcttgacaaagtcagcctgaacctacgcgacagcgaattcgtcgcgattctgggtccctcgggttccggcaagaccaccttgctcaacatcatcggcggcctcgaccggtatgacgacggcgatttggtgatcaacggcatctcgacgcgccaatacaaggatcgcgattgggattcgtaccgcaaccacaccatcggcttcgtgttccagagctacaatctgattcctcatcagacgattctgtcgaacgtcgaactcgcgctgacgatttccggcatcggcaaggccgaccgtcgcgaacgtgcgcgcaaggcgctggagaaggtcggactcggcgaacacatcaataaaaagccgaaccagctgtccggcggccagatgcagcgcgtggcgatcgcccgcgcactggtcaacgacccggacatcgtcctggccgacgagccgaccggcgcgctcgattcggacacgtccgtgcagatcatgaacctgctcaaggacgtggccaaggaccgcctcgtggtcatggtcacccacaaccccgaacttgcggaacaatatgccacgcgcatcgtcaacctgcgcgacggcgtgatccgctccgactccgacccgtttgtcgtggatgagacggccgaacagccggccgtgcacaagacgatgggccgcgcgtcgatgtcgttcgtcacgtcgctggcgttgagcttcaacaatctgaaaaccaagaaggcgcgtaccctgctgacctcgttcgccggctcaatcggcatcatcggcattgcgctgattctatcggtgtcgactggcgtgaacgcatacatcagcgacatccagcgtgacacgatgaccgcctacccgatcaccatcgactcccagaccttcgacctgagcagcatgatgggcggccagatgggcggcgatgacggatacggcggcaagacgcacagaaccgacggcatctacccggacgaccgcagcgtcaagcaggcatccagcctgaccagttcgattaccgaaaacaacctgacccgcttcaagaaatacctggataattccaagagcgagattcaccagtatgtgggttccgccggtatccagtacacgtatgacgtgaaattctccgtgttcgaccacgaccccgatggcacgctggtcaatgcggacggcgtgacgatcggtgccagcgactccacttcaatggcctcgcagatggcgtccacaagctcgtccggcatgtccggcacctcgtcgatcacctcgcagcagatgtcgatgctgaccggcaaaaccgatgagaacgccgcgcccgactcgttcaatgagatcatgcctggagcggacgacagcaagctcgtaggcaaggtcatcaccgacaactaccaagtggtcaacggttcatggccgaagtccaaggacgaggtggtgctggtgctcgacgacaacaacagcgtgccgctgaccacgctgtacgagctcggcctgctgcccgcctccgactaccacgagatgatgtccaagctcaacgccggcgacaaggtcagcactccacaagacaagatcgactatgctaaggcgctcgaccagacgctgtacatgattccggcatccgaccagtacgtcaagggcgatgacggccactaccgattcatcggcaacgacaaggatgtaatcgaacagcgcctcgaaacggccaccaaactcaaggtggtgggcgtcgtcaaggcgaagaaggatgcttcggccacaccgttggccgctggcgtgggatacacgcgcgctctgaccaatgatctgatcgaccgtgcggcctccagcgccatcgtcaccgatcagaaggccaacccgaacacgaacgtgctcaacggcatgacgttctcgccctcggacgacgccaccaaggcggccgacgcgcgcacctacgtggtttcgctgggcgtgacgcagaaggcgaacatggccaagtcgatgatgagtgccgggcagcggtccggtacgggcgcatcggatgccgctggtgctggtgctggtgctggcgctggcgcggcgggtgccggcgatcaggccgacgcgatggccgcgatgagcgaacagcagctcgccgacagtttcgactcgtatatcgccacggcttcgaacgacgtgcttgtcgcgatctacgaccagtacgtgtcgaccggcacctacgacgacaacctcgccgcattcggtgtggtgagtcgtgacgcgcccagctcgatcaacgtctacgccgacagcttcgaagacaaggaccacatcgccgacgcgattaccgactacaacaacaccgtctcgaagaaagacaagatcacctacacggattatgtggggctcatgatgagctcggtgaccaccatcgtcaacgtgatttcctacgtgcttatcgcgttcgtgtccgtctcgttgattgtttcctcgatcatgatcggcatcatcacctacatttcggtgctggagcgcaccaaggaaatcggcatcctacgcgcaatgggtgcctcgaagcacaacgtgtcccaggtgttcaatgcggagaccggcatcatcggcctatgctccggcctgttgggcgtgggcttgaccgtgctgctcgatattccgatcaacgccgtgttgcatcacttcatcggcaatgcggacgtcaatgccgccctgccggtgaccggcggcgtggtgctggtgatcctaagcgtggtgctcacgctgatcggcggcctgattccctcgcgcaaggcagccaagcaagacccggccaccgcactgcgcaccgagtaagcgcatcgacatagtacgagacgagatccataaacctcggaacactggaatgcccgctgcaaaacggtgttccgaggcgagcccggcgagtacattaggataggcgagcaggtattcccggcaaagggggcgaggggcaacgatggacgactggcgagacacccgcgataaagacagcgcattccgtcaaggaacgctgcctatggcgggaacgtatgtcgttgcacccccagcgaacccggatgttgataaggtagacagtatgcctaccgatttgcttggacgtgaatacgaaaccttccccgcacccgaaccgctgcaacagcacggtccggcgcgtgtcattgccatgtgcaaccagaagggcggcgtaggtaagaccaccagctccatcaatatcgccggtgcgttggcccagtatggccgccgcgtgcttatcgtcgatttcgatccgcagggcgccgccactgtgggactgggcgtcaacgcgaataccgtggagaacacgatttacaccgcgctgttcgatatttccgtggacccacatgatgtggtgcagcacaccgcattcgagaacatcgatgtgattccggcgaacatcgatttgtccgccgccgaggtccaactggtcacagaagtgggccgggagcagatcctgaacagtgtgctgcgcaagctcaagtcggaatacgatctcatcatcgtcgactgccagccatcgctcggcctgctcaccgtgaacgcgcttgccgcagctgatggcgtgatcattcccgtggccgccgaattcttcgccttgcgtggcgtggccctacttatgcagtccatcgaaaaagtgcagtcccgcatcaatcccgcattggaagtggatggcgtgctcatcaccatgtacaccaagacactgcactgcgaagaggtctgccagcgcatttacgaggcgttcagcgaaaaggtgttccacacgttcatctcccgctccatcaaactgcccgattccacggttgccgccgcgcccgtggtggtttatgcccctgagcacaagacatcaaaggaataccgtgaggtggcacgtgagctcattgctcgcggcatcgtggcgtaacgattgtttcgataaacgatgaatgagacttccctttctcggctcccctctctgagggaagctggctcgcgtagcgagactgaggggagctccgcggaagccgaaatcagcacggaggaatccgccacttccggcttccgggtcaacctcgaggtctattccggtccgttcgatgccttgctcggcatgatcgccaacaacaaactcgagctgaccgaagtttccctctcctcgatcaccgaggaattcctgacatacgtgcgcgggctcgacttcacgaaaaacatggatgaggccagcgcctttctcgacatcgcctctattctggtcgaggccaaaagcgtggcgattctgcccggcggcgaagacagccagcacgacgagcaaagccttgaagcactgcgcgaacgcgatttgctgttcgcccgactcctccaataccgcgcctacaagcaggccgcaggtgacttccgggcgcgtatcgccgccaatgccggccgattcccgcatccggcggccatggacgagggcattgccgccatgttgcctgagctggtatggacgctgaccccgctcgaactcgcccaactggccgcccaggtcatcgccaacgcgcccgcctccgaagtatcgatccaccagctgcacgtgccgctggtcgatctgcgggcccaatcgctggtggtgcgcgaccggctgattgcagcactggaatccaagggcgaccagtcgatgtcgttcagcgaattgacccgggactgcacttctcgtattgaggtggtggctcggttcatggccgtgctcgtgttcttcaaacaaggtgtgctgcagtatcagcaagatggtccgtttgccgaactgcacctgaggtgggtatccggcgtagacgaaacgatgaacgacgtgaacatttccgaaggcgattttgcgtaaggacggcgactggtgactgaacggattgacgcaacgaatgcaaccgagcacatggcggatgccgaatcgacggctgaatccgcaaaggccgaggtgaggggagtggaggagacgcgccccgaatacgtggatttcacggtagacgattttcccggcgggctgcccgcatgtctggaagcgattctgatggtcgccgaccagccgcagaccgccaccgagctggcccgcattttggcattggaccgcaacacagtcgaagaggcattgcaagccctgcacgatgactatgagggcgatgaatcccgtggcatccgcccgcgcggcttcgaactacgccgcaccgctcgtggctggcagttcgccagtcgcgccgcgtttgagccggtcgtctcatcattcgtcaccgacggccagactgcgagactcagtcaggccgcactggaggcgcttgccatcgtggcctatcgccagcccgtcacccgagcccaagtggccgcgatccgcggtgtcaactccgatggcgtgattcgctcgctcacggtacgcggccttatcaaggaagacggcgtggaccccgaatcccgcgcagcccttttggtcacctccgaatccttcctcgaccaaatgggcctgaagagtctcgacgaactaccctccctagcgccgttcctcccgtccgtcgccgaaatgacacagtcgaaatcgggggatacggacgtgatttcgtagcgattggggcccgctacctgaccaatattcgtgcgctagaccatccaatatgtgatttatggtcattgtgactataagtagtgctatgctctcaatgcagggagaacaaccggtatggaaagaggcatggcatgggattcggcaatgtgtccgagcgccgcagcgcaccgccacaggtcggcgtgtcagtggtgattctggcactcggcccgaaaggcgataccggcaacagtgccgccgattccggcaacgccgcgaactcggcccattcccgtctctggctgcccctggtcaagcgcgtccgtcagccgttcctgggctgctgggcattgcccggcggcgacctgcgctccgaccggtcgttggaacagtccgcctacgcggccctcgaatcgaccacagacctgcacccgcgatacctcgaacagctgtacacctttggaggcccgacccggtcccatggcggattacccatggtatccgtcgtgtactgggcgctcgtcggccagaccgaggccgcgggcttcgaggacggtgacaacgtacgatggttccccgaagacgaactgcccgagctggcgttcgaccatcgccagatcatcgactacgcgctgctccgcctgcgctccaaaatcgaatactccgacgtggccacccgactgctcggccccacgttcaccctgcgccaactgcacggcgtctatgaggcgattggcggcgaaaccctcgacttggcgaacttccgccgcaaaatgcttgcctcgggcgatcttgaagacaccggggagaaggtgcgcgaaggccgccaacgaccggccaccgtctaccgctacatccccaaacgacctgtcgagaatggcatgccccacgaatccgatggcgacgacatcgtggaactgtccagacaaggcgagcgtgaagacgctctcgacgcgctgatcccatccgcgcgcatctgatttttcccgccgacccgcttcgggccggcatcacagacgtatatagggaaaggaaccactatgaccgcactattcactgcgccgtccgttgacgagatcatcgccaagctgggcgcgcaaagcacctgcgatgcaggactgacccaggacccatggcacttcgacaccaccacacccagctacggtcccggtgcctcgatgcttgaccgtctgcccgccaacgcgccgcgccagcaggtgctgccggacgagtaccgcaaggcctccgacgaggaactgcagcagcgcatctccgacgccaagcagcgtctcggctccaaactgttgattctgggccacttctaccagcgtgacgagatcatcaagcacgccgatttcgtgggtgactccttccagctggccaagaacgccaccgaacgcccggacgccgaccacatcgtgttctgcggcgtacacttcatggccgaaaccgccgacatcctctccacgcccgaacagagcgtgaccctgcccaacctgtccgcaggatgctcgatggccgacatggccaacatcgaccaggttcaggaatgctgggaccagctcggcgagatctgcggcacccagccggactccgatggcttgcagcagatcatcccggtcacctacatgaactcatccgccgcgctgaaggcgttctgcggacgcaacggcggcatcgtatgcacctcgtccaatgcgcacgccgtgctggaatgggcgttcgcccgcggcaagcgcgtgctgttcttcccggaccagcatctgggccgcaataccgcc

SEQ ID NO: 1037 - DNA, 18598 bp, Unknown
  R117_24m  MAG No. k141_77696
gagacgcccggtcccattccgaacccggaagctaaggcctggcacggcgatggtactgcacccgacagggtgtgggagagtagcacgccgccgcaccacacgtacaggaagccccgatacccctcaaaggtaccggggcttcccgcatatcaggacacttgcgcgtgggggggtatctcgcgtccttgggccccggcaggagtatcccgtcggggcccagtgcgttttgggcggcaacccgctgaatacccggtaagatgtctgaggtatcaacaaacaggtcaggaggtgacgcgcatggtggcgccaagccgtgatgaccgtagcgtagatgcattggtgaaatccaaggcagtacttgatgtattggcggaactgggaccaagcaccgcaaaaaccataagcgaacgtactggtgaacccgtaagctcaacgtatcgtttgctggataatctcgtcgcagtcggttgggtggaacggggcatcaatcgtggcgagtatcggcttggcatcgattgcgtacgtatcggcggccaaatcgaaagcagactggacattcagcagatcgctcgccgtaccttccgcgcccatcacggccagttcggcatctggggtctgttcgttcggaggcgattgcgcacggtgtgcatcgagacacgcacccgtgagacattgcaaagctatgcacagctggtgggcaatagcttgcctctgagcatgagcgctccctctcatgtactgacggcctggcttcccccggctcgctacgagcagctgttggaacactatgcctataccaacgagctcggcggcacattctccacgatgcgtgccacagcaatgggacaggctcgtcatatacgcgaatgcggcttcacctatgacgtcggccagaccatggccggctccgtgactatcagcgtaccggtattcaatcacgccggagagattcaagcggcaatcgccctgagtggcctttcccgctccttggaacctgagctggcctgtctggtagatgggcaaccggcaacggcatcggctcaagacatggtgcgattggtgcggactgccggccgtgaggtgtcgcgaggccttggatacagtggtgatcatcttggcctgaacagttgaatatgatgagtcagggataagtcaggggaaggaacgtcgacgatggcggaagacaaacgtgaaccgacccgcgctttagacaaggcgagtcgtgtgatggacgcattggcggcggagaatggcctgtcgccggcagatatcgccgacgcctgtgatatcccgcgatcctccgtataccgcgtgctggatggactggtcgatgtggggtgggccgtaacggatacggatggtaactactcattatcactggactggctgcgattggctgatgccgctcgcacgtctcgtaccgaatggcagcctgcgattgcggtcatgcatgccatcaccgcgcaaaccggcatgacctcattcctcagtgtggtctccggcactgaattggtatgcgtggaatgtgcgcaaggtcatgccatcgattcgctgatcctgcgcccgggccgcgtgctgcctctgcatgctggcgcggccggccgcgtggccttggcgtatttcgaggatgccgatgtcgaacgctatcttgcaggagtgccgtttccggcatataacgagaacacgctggtcagtgtggaacagttgcgcgaggatattcgcttgactcgcgaacgtggatatgcactgtcggatgaggatgtgacgttgggtgtcggtgccgtcggtgtaccgattgtggacaacgagtccggtcgcgtgatcgccagcctgtccgccggtggattcgtggacgaagtgttagccactcaagaatccttggccgcgttactgcgcgatggcgtacgcgaaattcaggcagcctgattcggcccgctaggctgtcgggctggacggttatgtccggtcagctatggcctttgccggctacggttctgctggttatgcttctgcccgactacgctgcggtccgttacgcttcggccacacgacccaacgcgatggcggtgatcagcacgtacgcctcgcgcgggtcggtggcatcccagccggtggattcggcggcgcgcttcaaacggtagcggatcgtattgggatgtacgttgagctccttggccgtggtctcgagcgaaccgccgaacttcaggaatgtggagacggtgagcagcgtcggatcatccgggcctgctgctgtcaggcttccgtagaccacgcggaccagttcgtcacgggcgtccgcgtcgccgatcaacgcacgttcgggcagggcgtcgtcggtgcgtaacgggcgcggcaatggctgcacggtggcggccagggccggcgcggcctgaagacagtagagcgtggcctgaatcgaacgcatcgcgccatcggcaccggtgcgctgtggacccaaggcgattggccgatcggcggcgaacgacggggcgatggtattgcagatgatttccggcgtggccgcaccgaccggacgaatcaacgccactacggcggtgctgttgccgatcgggcgcttggcggtcagacacacaccgccgaaatcggccacgattttctcgatttccttggccgtacgtgcggcggaccgggcagggtatccggcgatggtgtaacaatcgaagtcatgctcgaagccgaggatggtgaacagggactccactcgttcgtcggccagatgattgaacaggcactcgaacagcacggtgcgtacgcggttggtcgcggtgatgccgggtgcggccgaatcggatgaatcgggtgcacccggcataccggatgcaccggacgaatcggcaacgtcggcagcaagaagttcgagaaaatctgacatagtcactagtgtagcgtcgctgattggcgttgcctttcagccaaagactctcgccaatacgtcagcaccacgaatccgaatacaaacgcaaccggcaacatgtgccgctcgaaattattggccggcgcggtaatcatcacgcccatcagcagtagcagcggaatatgggtcatgagggtgagccaacgtcggcgaatcacctcggccgcgccgatcagcaatgtcatcaccacgtagaaattgccgtgcgtaggccagccgagcacgggaatactgccccatacgcgagtgaagccggcgatgcgctcacgccagtcatggttgtaatccttgatccatgtggagtttttctgcacgtaatcgctggccacgtaataatccatcgatacgtacggctgatcgttcacattgaagtatccgaagcatttggccagcaacgcatccagcgcgatgatcggattgtccttgacgatttcgaaccatgccttgttgaaattggtcatatcctcgggcgtcaccgtgcgccacttgtagctgaccttcttggcctgaataccggaggatttcaccgggtcggcatcctgctgggagtaagcgtcggccatctgatcgagattgaagacgggcgcgaggttctttttggcttcgtctgaaataccgtccggattgcgctgagccacgcgggcgatcatttgcagctgtacgccgcggctttcgattggatcgccgccgatgatcgcaccagaggagatggcgaaggagatgccgccgtgaatcagtacggtggggatgagcagcgccacgacgtaagtcgcccagcgtttgcggtcggcgatcagagccagcacgatttgcagagcgatgatgtaccacgcatatttcgcggaaatcagcatcaccgacgtggccaggatgaaggcgatgaagctgtggcacggcaagtggacgggcgtggcgatggcaggggtctgaggatgtttgcgggtgccggcggggtgccaggtctggacgagttcataccagacgctgaaccaccagacgaacgagaacgcgaacagcggcgatttggtgatggagatagtggaaaacacggccagcgggcagaccatgaagaacagcagaatcaggaatctggccaatcctccggcctgtgggggaacggcggaatccgttgccgtttttcctatccaaggccggttcaggaatcgattggcggcggcagcgcagcagaacacggcgaacagcgtctgcagggcagccaacgtcacgatgccggcatcgtttgagccggtcagatgcctcgcaaacgtgactatcgcgccatagaacacagtgagtaccacattgtgctggtcggtcagatacgtgggatcggacggccacatgtagtgcgcggtggggtagatgtccatcggcacgaaggagaagaagccgatatagggctgtttcaggccggtccactggttccaggcccagctgaattcgcggatctgtgagcggaggtccgcgccgaatgcggccagcagagtggtcggcacccagagccagccgacaaaaaacaccagcataagcttccagaaccggttcgtgccgcgtgtgatccagcggtccagaacagtgacggtggacgtgacgataacgcgaacggtacgacgggtcttggctggttggctggcctgctgatcggcggcgggccgtgatgtttcgctattctgctgatggtggcgtaggcgctcgccgatggtcttcggcagtatgcgctggcctgctgcgaatcgcgccatcagcgtgatgattccgagatatatcaggaacgacacgacgaatattgcggtattggcccagttccaatgggcgagggtgccgttctcctcgtcccggtacagcgggccgaccgccgagcacagtgcaagccacaggcaggccagcacggccagtgtccagcgcgcggcagcgcccacgcgcgcaagatgcgggtgggactggcggctggatacggcggcaagcttcgcggtggctggtgacgtcatgacaatatatggtagccgcacaggtcaacggttgatattcgatgtctgccgggcatcgccattgttcgcaagccaatacgacggccgggtgcatgcgtgggctcggcgaatgcggaatttccgaagttgtgaacgctaacacgggctgtccggcccaaaatggttgattttgtgcgcttttccgtggaatatcgcgggcaaaaaacggcgcaaccgaggtaacgtagtgtccatgatgattgcattgaaagctgcaacgccgcagctacccagaactacagccgtcgcggatcatgtggtcgccgtggacgaaaccgattcgaccaacgcgctggccgcgcagatgatcggcgacgggtcgttgacgctgcccgaccaccagggtggcgaactggcggtggccgtggtggccgccgaccggcagatcgccggccgtggccgcaatggtcacaagtggatcagtcagcccggccgttgctcgacgatgtcctatgccgtgcgcattccgcgcgcgatcgccaccgacgaatccgtcaatggctggctgcagatgatcgccggactggtcacgctggacgccctgaacggcatgatcgaggaatacggtgccgcgccgaaccagccggactgcttgctggaactcaaatggccgaacgacgtgttctgccacgggctcaagctgggcgggctgctctcggaactggtgattccgccgtcgtccggtactgatgctgatgccgatgacgacgtcgtcatcgtgttcggcgtaggcctgaatctggcgctgggtgcctgttggctgcccacgccgcagtcgacttcgctgcagctgcatgtcacgggcttgccgtcgtttggcgagatgcgcgatgcggtggccgaacgtcaggtcgagggcttccgtgaacgactggcgaagttcatcgccgacccgaagggccaggccgagtcgttgcgcgaggaaatgaaggcggtgtgctgggcgcgcggccgtcaggtcgaggcgcatttcacggacggcaccacgctgaccggcgaagccatcggcctcaacgaagacgcctcactgatcctgagaacacaagacggcacggaccatacggtccgcaccgccgatgtgggagtgctgtaatagccggccagtagctagctagtagctcaggtcagcgaccgagcttggacaggccggcggcggccagagaggccaccacggccttgatggcgtcgccgacgacgaagcccatggaggccagggccacggcggcgagcggcgcaccggtcaacgcggactggatgatgaagccgaaggcgtacaccaccacgacgccgccgaccagcgcggccagcaggtagcggcccgcggtgcgcgcggcggccgcgaaggacgaagtgtcggacttgccgcgcagcagggcgatgaccaccacacccggcaggaagccgaagaggaagccggcgctcgggccgaccagggccagcgtggaggtgccgccggcgaacaccggcaggccgaccgcgccggccgccagataggtggcgacggcggcaccggcctgacgccacggcagcatgagaccggcgagcatcaccacgaacgtctgcagcgtgatcggcaccggcgtgcccggaatcggaatctcgccggcggccgcggacagccacatcagcacggcgaacagcaccggcttccaggatgcggcgacgatacgacgggcgagcggcgtggtggccgctgcggatgcggtggtgtgtgaagtctgcatatcaataacccctatgttgtgtgatatcgccgtgaacggcgggcggtatgcgatggatgaggggaggttccggcgggccgtgcggtatccccgacagcccgaaccgtccatatggtggacggtcccaaatgaatccggccctgtgcgggcgaatcgtgcggcgatggaccgatgccggtccggtcgccttccgttcgcccgcagatgagccttcccccgaacttacggttgccatcgtagaggtgttcgatttcgtgcggtttcgtaccaacttacaaaattgtcgatttcgatttgtcataagttgacgaacgcaaccgtaacgtcaacttcttgaaccggcgcgcaaggatgtgcaatcggcggatttgcaacgtttttgatagccggcgccaacggttacgttgccggaacctacgcgcgcgtttgttcgtagcctacaaaagggcgtgaaagcttttgtgcgaacgcggcttgccctctcctttatatggagagcacaatttgacactatggctcatactgtcaaaaaactgctgattgcgaaccgaggtgagatcgctctgcgcgtggtgcgcacggccaaggagatgggtatctccaccgtggccgtctactccgaacaggaccgcaatagccgctatgtggacatggccgacgaggcatacctgctctccggcgacacctacaaggacacgtacctcaacgaggatctgctgatcgacatcctgcgcaagaccggtgcggacgccgtgcaccccggctacggattcctttccgaagtgccgagcttcgcgcagaaggtcgaggatgccggtgccatctgggtgggtccgcatcacaccgcgctggtggatttgggcgacaagatcaccgcccgccgagtggccttgcgcgccaaagtgccgccggtgcctggcctgtccgaaccggtgaccgacgtgcgaacgctgctcgacttcgcacacacccacggctacccgatcatgatgaagcgcactgatggcggtggcggccacggcatcaccgtggtgcatgacgacgaggagctgcgccgcttctacatgaaccacgacgcgctgcaaggcggcgatctgaaggaatacttcatcgagaagttcgtggacaaggcacgccacgtcgagacccagtccgggcgcgactcgcacggcaacttcaccgtgtactccacccgtgactgctcgctgcagcgccgcaaccagaaactcgtggaagaggcgcccgcgcccttcctgtccgaggaaatcgtcagcacgctggaggaatactcccgccgcctgttcaccacggtcggctacgtgggcctgggcacctgcgaattcatggtgacaccgaacggcaaagtgtacttcctggaagtcaacccgcgtctgcaggtggagcacaccgtctccgaagaggtcagcggcctcgacctggtgcgcgaacagctcaatatcgccgccggtggcgagctcacccgcgcccccgaaccgcgcggccacagcttcgaactgcgcatcaccagcgaagacccggccaccaacctgacccccggctccggcaccttggagaagatccagtggccggccggccccggcgtgcgcatcgataccggtgtggaacagggcgacaccatctccccgaagttcgattcgatgatgggcaaggtcatcgtcactgcccagaaccgtctcgatgccgtggcccgtgtgcgccgcgtgctcgacgagctcgtgatcgaaggcgtgcccacgccgattccgctgttcaaggagatcttccgcaacgacgacttcaccgccgagcatggccatccgttcgccgtgtccaccaagtggctggagcgcacgtacctgaaccgcacaccggcttccgccgcctccggccagccggcctccttggccaccgccccgggtgccgctgccccggccgcgcctgacaagtccaagtcggagacgttcgtcatcgagatgaacaaccgccgcgtcaagctcaccgtgccactcgacatcgtggagaacatcaccggctcggcccgcgcccgcggtgccaagcgccccacccagccgttgcgcggcgcaggcttgcacaacgtggcctccggtgccgccacggccaacgacggtgccaaatccggcgtcatcgcctccccgatgcaggccgtggtcacgcgcatcaacgtgtccgaaggccagcaagtggccaagggcgaccttctggtggtgctcgaatccatgaagatggagaactacgtgtacgcgccggccgccggcgaagtgaagaagattttcgttggcccggccgatggcgtggaggccggcgacacgctggtcacgctggacgtgaacgccggcaaggccaaggccgccgacgccaagaaggagggcggcaatgactgacatcatggattcgccggccgtgaaggccgcggctgcggcctcggccgccaacgccgcccagccctcggcccaccagccgctgcgcaccgccgtggtcaaggccgccgaactggcccgcgccgccgaagagcgcgcccgcgacaagcagcacgctaaaggcaagaaaaccgcgcgcgaacgcctcgacctgctcttcgacaccggcacgttcgaggagatcggccgcttccagggcggcaacatcgccggcggcaacgccggtgcagctgtcatcaccggcttcggccaggtctacggccgcaaagtggccgtctacgcccaggacttctccgtcaagggcggcaccctcggcaccgccgaaggcgagaagatctgccgactgatggacatggctatcgacctcaaagtgccgatcgtggccatcgtggactccggcggcgcccgcatacaggagggcgtggccgctctgacccagtacggccgcatcttccgcaagacttgcgaggccagcggcttcgtgccccagctgagcctgattctcggcccctgcgccggcggtgccgtctactgcccggccctgacggacctcatcatcatgacccgtgagaactcgaacatgttcgtcaccgggccggacgtggtcaaggcctcgaccggcgagaccatctccatggccgaccttggtggcggcgaagtgcataaccgggtgtccggcgtggcccactacctcggcgaggacgaatccgacgccatcgactatgcgcgcaccgtgctcgcctacctgccgtccaacagcgaaagcaagccgccggtctacgcctacgccgtcacccgcgccgaacgcgagaccgccaagcgactcgccaccatcgtgcccgccaacgaacgtcagccctacgacatgctcgaagtgattcgttgcatcgtcgattacggcgaattcgtgcaggtgcaggaactgttcggcgcctccgcgctcgtcggcttcgcctgcatcgacggcaagccggtcggcatcgtggcgaaccagccgaacgtgctcgccggcatcctggatgtcgactcgtccgagaaggtcgcccgattcgtacgcctgtgcgacgcgttcaacctgcccgtggtcaccctcgtggatgtgcccggctacaagcccggctccgaccaggaacacgccggcatcatccgccgcggcgccaaggtgatctacgcctacgccaacgcgcaagtgccgatggtgaccgtggtgttgcgcaaggcgttcggcggcgcgtacatcgtgatgggctccaaagccatcggcgcggacctgaacttcgcgtggccctcctcccagatcgcggtgctcggcgcggccggcgcggtgaacatcatccaccgccacgacctggccaaggccaaagcctccgggcaggacgtcgatgcgctgcgggccaagtacatcaaggagtacgagaccagcaccgtcaacgcgaacctgtcgctggaaatcgggcagatcgacggcatgatcgaccccgaacagacccgtgaggtgatcgtcgaatcgctggccacgctcgccaccaagcggcgcgtcaagcgcaccaccaaacaccacggcaaccagcccctctgatttctgaagacatcaaccaaacacaagtaaggaaagcaatgaccaccttcttcctcaatcgcctggccaccgagccccatgcgctcgccttcgccggccagtccaccccgtggccggtagccctggcagaccagaccaccgatcccagccttgacgaggccctgcgcggccacatcgccgcagccaaccgactgctcaccccggtcgccgccgacctgctgaccaccaccggacgtccggtcgacctgttcggcttcactccgaacccggcccgcctcggcgccgcagccgacgccaccgcgtccgtggaaggcgtggcactgacccagctcggcgccctgctcgacctcgaacaccttggctacagtgtggcccaggccaagccgctcgccgtgctcggccactcccagggcgtgctcgccgtgcacatggcccgcgccatcgaggccgccggctccatcgaggccgccggcaagaccctcgacgagattctggccgtcgccgccctgatcggcgccgccggaacccgccgtgtgcgcgaactgggcctgaaccccaagtatggcgaagccagtccgatgctctccgtcaagggcgccacccgcgaacaggttgaggctctggtcaagcgcgtgaacaacgcccgaggcccgatctccatcgccgtcaccaactccgacaaccaccacgtgctttccggctacccggaagacctggcagccttcgccctcgaagccgagcgcgagcacaagcaccaggccaagctgcgcgagcagaagctccacggcggcaccgtgttcaacccgaccctcgaataccttgaagtcaccctgcccttccactctccgctcatggccgacgccgtcgagcagaccgtggcctgggccggcgcctgcggctttgaccaggatcgcacccgcgcactcgctgcggaagtgctgctcaaccatgtggactggaatgcccgcgtcaaggcgctgttcaacgccgccgacccggccaagctgtggattgtggacctcggccccggcaacacgctcggcaagctgatcggcaacgtggtgcagggcaccggcatcggcgtggtcgaagccaccacgctgtccgaacgctccacgctctccacgctggaaagcgagcctgagcgcacccagaactggaaggcgttcgccccgcgcgtcatcaacaccccggccggcgccaagctggtcaccaagttctccaagctcaccggcaagccgccggtactgctgcccggcatgacccccaccaccgtggaaccggaaatcgtggccgccgcggccaacgccggctactgggctgagctcgccggcggcggccaggtgaccgccgaagtgttcgaccgccacatcgccgccctcgaagacgagctggaggaaggccgcacggtcgaattcaacgcgatgttcatggaccgttacctgtggaacctgcagttcggctcctcccgcatcgtgcccaagaagcgtgcttccggcgcgccgatcgacggcgtggtcgtctccgccggcatccccgagctggacgaagccgtggccctgatcgagtcgctgcaggcggacggtctgccgtacgtgagtttcaagcccggcaccgtggaccagattcgccaggtcgtgcgcatcgccaaggccgtgtcccccaccaccatcatggttcaggtcgagggcggtgaagccggcggccaccacagctgggaagcgctggacgacctgcttgccgccacctacgccgaagtgcgcgcctgtgacaacctcgtgctggtcgccggcggcggcatcggcacccccgaacgcgcggccgactacatttccggccagtgggcccacgcctacggcctgcccgacatgccggtcgacggcgtgcttatcggtaccgccgcgatgaccgccaaggaggctcacaccagccccgaagtcaagcagctgctcgtcaagacgcccggtattccggccgacgccaagtccgacgacgtgttcgccccgcaggccgcccactgggtgccgtccggcaagtccgtcggtggcatgtcctccggcctgagccacctgcacgccgacatttacgagctcgagaacgactccgccgaatgcggccgtctgctcgtgcgcgtcatgaagcaccccgaagagctcgactcccgccgcaaggaaatcatcgaagccctgaacaagaccgccaagccttacttcggcgacctggcctccatgacctaccttgagtgggcgcagcgcttcgccgaactcgccttcccgtgggtcgacccgacttacgccgaccgcttccagcacctgctgcagcgcatcgaagcccgtgtgaacgacacggactccggcgaattcacctccaagttgttcgccgctgatggcgtttctgctgaagaggcagctgccgctggcctgctgacccacgacgacattctcgccgacccggcccccgcgctcgaaaagctcgcactggcctacccgcagaccgccgaactcaaggtggtcccgaccgacgtggcttggttcccggtgctcgtgcgcgaataccccaagcccatgccgttcgtacccgtcatcgacaacgacctgctgcgttggtggggtcaggaccagctctggcagtccgaagaccagcgctactccgccgattccgtgcgtgccatccccggcccgatctccgttgccggcatcaccaccatcgacgagccgatcgccgacatcctcggccgcttcgaaaccgccgccatcaagcgcgtgcaggacgaacagcaagccgccgatgccgctgagaacgacgatttcgccgcacttggcgaggccaccagcgccgaagacttcatccgcaagtccccgaacatctcctgggtcggccacatcaccgacaacccggcctacggcaccgccctgggcgaccagtactacgaaatccgcgcgtttgacgccgcggccggcaagtacgatctggacatccacctcgacacctactgggacaacgatccggacggcggcacctccaagcacgccgtgcgcgatatcgtcatcccgctcatcgtggaaggcaccgagcccggccgtgtgccggtcgtggaccgcgaacgcctgattccggacgtctacgcgatgctcgccgccaccgcaggcatcggcaacaccgccatcaccggcgacaagctcaccgagatgccgcagcttgacgacaagacctctgacgagcgtccgttcggtaccgcaaccgcaacctacaccctatccgccaacctcggcttcgaccacgaagcggccactggcgccgctctgccgaccaccctgcagcccagccgcatcgcccccgatgcgctggtcggccctgcctggccggcaatctacacggcgctcggctccgtgtacgtcaagggctacccggtgattgaaggcctgctcaacgccgtccacctcgaccacctcatcgaacttgaggtgaacgaggaggacctgctcaagcacaccggcgaaaccatcaccctgaagtcttgggccgaggattacttcgagtccgcctccggccgcgtggtcaccatccacgtgacccacaccgccgccgacggcacgccgcttgcccgcgaaaccgagcgtttcgcgatccgcggccgcgtctactccgatgctttgcctgcagacgcccccgagtatggtggtgccctcctgaataaggaagcggatggctccgtcgccggacagtccactggactgtccgcctcctcgcgcggcctgcaagtagtgcaggccactccgcgccgtctgctgcgccgcgtgaaggtcgtcgccccacacgacatgaccgccttcgcccgcacttccggcgacttcaacccgatccacacctccactcgtggcgctcgcatctccggcctggccgccccgctcgtgcacggcatgtggctgtccgccaccgcccagcacgccgtgcaggcgaccgacgagaagggtgcccactacgagattgccggctggacctacaacatgtacggcatggtccagcttgacgacaccgtcgaaatctccgtcgagcgagtcggcaaagtgcgccacggcggcatgaccctcgaagtcacctgccgtatcgacggccagctcgtctcccgcggcaccgcactggtccgcgcaccgcgcgccgccttcgtctaccccggccagggcatccagaagcagggcatggttctggacgagcgtgccaagtccgccgccgcccgcgacgtgtgggagcgcgccgacaagctcacccgctccaagctcggcttctcgatcctgggcctcgtgcgtgacaacccgaaggaactcaccgccaacggcgtgacctaccgtcaccccgaaggcctgctcaacctgacgcagttcacgcaggtggcgctcgcgacggttgcttttgcccagaccgcccgtctgcgcgaagccggcgccgacatctggcccgcctacttcgccggccactcgctcggcgaatacaacgcgttgtccgcgttcgccgacgtgattccgctggaaaccgtgctggagctcgtgttccaccgtggttccaccatgcaccacctcatcgagcgtgacgcacagggtcgctccaactaccgcatgggtgcccttcgtccgaaccagttcggtgtggacgacgcgcacgtcaaggaatatgtggaatccgtggccaaggcgtccggcgaattcctggagattgtgaactacaacctcgccggccagcagtacgccatcgccggtacgatcgccggactcaaggccctgaaggccgattccgcccgccgcgtggccgcattcggtggcaagcccgcgttcatgctggtgcccggcatcgatgtgccgttccactccacgctactgcgcaagggcgtgccggaattccgcgacaagctcgacgcgctgcttcctgcttacatcgactaccgtggccgtctggtggaccgctacatcccgaacctggtggccaccccgttcgagatgaccaaggaattcgccgccaagatcctcgaagccgtgccgtccgaacgcatcaaggccgtgctcgacgacccggccgtgtgggattcctacgccgccgacgaccagaagctcggccgtctgctcttgaccgaactgctctcctggcagttcgcctccccggtgcgttggattgaaacccaggcgctgctcttcggtcagcgcgaacagggcggcctcggcgtggaagaatacgtcgaagtcggcctcggcaacgccccgaccctggccaacctcggtaccaagaccctacgtctgcccgagttcgccggcaacgatacggtcgtctacaacgtcggccgcgatgaaggccgcgtctacatgaccgacaccgattcgctggttcccgacgacgagccggaagaggctgcggcctcggcctcggtcgaaaccgctcctgccggtggttccgccgtcgccaagctcggatcgggtgctgctccggcaaatgccgcgactgaggctgctcagacaacggatggctccgtcgccggacagtccactggactgtccgcctcctcgcgcggcctgcaatcagggcaggccgctgctggcgcaccgtctggtgccgccgtcgccgacctgcccttcaaggcttccgatgccatcggcgtactcatggcctactccgccaaggtgcgcctcgaccagatcggcagcaacgacaccaccgacaccctgaccaacggtgtctcttctcgccgcaaccagctgctcatggacatcagctccgagctgggagtcgccagcgtggacggtgctgctgaagcgacgctcgacaagctcgcccaaatcgtcaacaaggccgccccgaactacaagccgttcggtgccgtgctctccgaggcgctgcgcgaccgcctgcgctcgctgttcggtgccgccggcgtcaaacagcagtacatccgcgaccgtgtggccaacgtatggcagctcggcgaaggctgggtggccagcgtgctcgccgcactgctgctcgacactcgcgagggtgccagctcccgtggcggcgatctggccaagctgcccaccgccgccgtgcagaacaagccggaagccgacaagctgatcgatgcggccgttgagatcgtcgcccagctcaagggtgttgccgtggccctgccgtccgccggtggtgccgctggtggcgctgtggtcgattccgccgcgctcgacgccttcgccgagaaggtcaccggttccaacggcgtgctcgccgccaccgcccgcttcgtgctgaacgagctcggcgtggccgctccggctccggaagaatccgaggacgagaacgccgccgtcgtggccgcggtcgaagccgaacttggttccgactggcccaagcaggtcgctccgcgcttcgacgccaacaaggccatcctcttcgatgaccggtgggcctccgcccgtgaagacctcgcccgcgcctactacggcaacgaccccgccgccttgaacggcagcttcatcggccttggcaagaccatcgccgccgaagcccagtggttcgccaacgagtcggagagcgaggagcttaaggccgccttccagaaggccggctccgaggccctcgaacaggtcgcttccaacaagaacgcctcccgttacgcgaatgatatcgccatcgtcaccggcgtgagcccgaactcgattgccgctcaggtggtcgaaggcctgctcgcaggcggtgccactgtggtggccacttcgcacagcttcaagccgtccatcaaggcttgggccaagcaggcctaccgcgagcacgccaccggcaacgccaagctgtggctggttccggccaacctctccagctaccgcgatgtcgacgcgctggtcgactgggtgggccacgagcagaagaagacctccggtgccaccaccacgattctgaagcccgcgtgggagccgaccctgttcttcccgttcgccgctccgccggtccatggcacgctcgccgactccggcgacctgttcgaatcgcaggcccgactgatgctgtggggcgtggaacgcgccatcgtcggcttcagcaacatcggtgccgacaccaacgtgcagcacaagctccacgtggtgctgcccggctccccgaaccgcggcgtattcggcggcgacggtgcctacggcgaagtcaagagcgcctttgacgccatcgtcaaccgtgcccgcgctgaaaaggtgtggtcgagccgcgtcaccttcgctcacccgaagatcggctgggtgcgtggcaccggcctgatgggcggtaacgacccgctggtcgccgtcgttgagcgtcacggcatccacacctactccaccgcacagattgcggccaagctgctcgacctgtgcactgccgaatcgcgcgagcaggccctcaaggccccgctcgatgtggacctgaccggtggcctcggctccgagcccatcgacatcaaggccctgcgtgccgaagccatggccgatgcggagaaggaagctgctgcggcctcgtctcaggaaacggatggctccgtcgccggacagtccactggactgtccgactcctcgcgtgggcagcaaatcaaggcgctgcccaccccgatcgtcaccaagcaggccccggtcgaccttgccgactggaccaacgtcaccgccaagccgaaagacgaaatcgtcatcgtttccgtcggtgagctgggcccgtggggctccggtcgtacgcgcacccaggccgagctcggcatccactcggacggcactgtcgacctgagcgccggcgcagtgctcgaacttgcgtggaacatgggtctgctgacttgggccgacagcccgaagcccggctggtacgacaccgacggcaacctcgtgcccgaagaggacatcgccgagcgctaccacgac

SEQ ID NO: 1038 - DNA, 34448 bp, Unknown
  R13_10m  MAG No. k141_290
cttcttgccgcgcggggccatggcgccgagggagcccatgccacggtacagcttgtactgcttgccgtgcaggagcaccttctcgcccggggcttcctcacagccggcgagcgtgccgccgagcatcacggaggaggcgccggccacgagggccttggcgatgtcaccggagtagtggatgccaccgtcggcgatgcagggcacgccagcggcacggcaggcctgggcggcctcgtacacggcggtgagctgcgggacaccgacaccggcaacgatacgggtggtgcagatggagccggggccaataccgaccttgacggcgtccgcgccagcctcaatcatggcctgagcaccggagcgggtgccgacgttgccgccgatgatctgcacgccgtcgaaggcggagtcgtgcttcaggcgggaaatcatgtcgagtgccagacgagcctcaccgttggcggtgtcgaccacgagcacgtccacgccagcctccatcagagcggaggcacgctgccaggcgtcgccgaggaagccgacgccggcggccacgcgcagacgaccctgctcatccttggtggcgtccgggtactgctcggtcttgacgaagtccttgacggtgatcaggccggtcaggtggccttcctcgtcaacgagcggcagcttctcaaccttgtgctgagcgagtagacggtgggcgtcgtccttggagatgttggacgggccagtgaccaggttctccttggtcatgacatccttaaccttcagggtgtcgtaatcctcggaggcgatgaagcgcatatcacggttggtgatgatgccgacgagcttgttgtccttgtccacaaccggcagaccggagatgtggaacttgccgcacagcttgtcgaggtcggccagcgtgacctcggggttgacggtcagcgggtcggtgatcataccggactcggaacgcttgaccacatcgacctgagcggcctggtcgtcgatggacagattgcggtgcaacacaccgatgccaccgttacgagccatggcgatggccatctcggactcggtcacggtatccatggcagcggagaggaccggggccttcatcacgatcttgcgagtcagatgagtgctggtgtccacttcggagggaatgacatccgtctcgttcggcaacagcaacacatcgtcataggcaaggccgagcttggcgaaaatcgggggaaggggagcatacgccgactgggcgtttaattcatcaaggtttgtagccatgtaaacactatatgaaaatgcgctgaccttcacgacacacgcttgtgagcactcacttatccgctgccgggtcctgcacctcgcccacctgcgagtcccgcgaatttgcaggcgaatcagtcatcgaatccgctgcctgagagccaatcgaatcccggctctcccctactgcagactgcgatttaggcactgtatgctgcgcgtttttacgtgcggattcgaacgtcaggttctcggcttggatctcgggaatacgatgccgcagataggggtacatcgtggctatggtcagcaccaccacagcgatggccatgcccacggccacgtgctgcgctttgaagaacagaatcgtcagcgaaccgaatgcgatcaacgcggcccatccccacagaatcagcacggcgccacgcaccgaatgcccgatcttcagcatgcgatggtgcaggtgcatacggtccggatgcatgggcgactggcctttggccaaacgccgcacaatcgccagacacatgtcgagcacaggcaggaacaacaccagaaccggcagcagaatcggcatgaacaccggcagatagatgctggcatgaatcgaggccgggtcaagacgtccggtcatcacaatcgaagcgcaggtgatgagatagccaagcagcatcgaaccggaatcacccatgaacagtttggcgggatgccaattatgcagcaggaagcccacgcagatacccaccatcatcacgtcgatcagcgtggccaacgaagcataactcggggaagaccgggcgatgatatacgaataggcggcgaacgctatgccaccaatcgccacgataccggccgccagaccatcgaggccatcaacgaaattgaccgcgttgatcgaggcgacgatcaggaatgcggtgatcgccatggacagactcggcgaggcggtaatcagcgaaccacccaaaggcagtgagatgatctgcaatccgtcccaagccacgaatacggaaatcagcagctggccggcgagtttcagcatccaatcgagatcccacaggtcgtcggccatgcccagcagactgatcatgatgccgccggcaagaatcacccacatctggtaattgccgttgaacaatcccgagagaaaaggcagccgactggcgaatacggtagccacggcaaaaccgatcagcatgccaaggccgcccatgcgcggcgtgggaatggtgtgcacgtctcgggcacgcacctcgccaaccgcaccgatttcgatggcgacgtggcgaatcagcggagtcaccagccaggtgacgccaccggcgatggcggcaatcagtaggtagattctcatgcgccgagtcccccgccgttgaggtggagggccttgcgaatcacgttttgggcgatgacgccttcacgcaggatctcgatgccgtcgcgcgcgtacggatcggctttgacgacggtgctggagacatggccttgggtgggaccgccgtccagatacaggtcgacttcgttgccgaacgcgtcaaccgcctcctggacagtctgtgcgctttcgtcgccggaacggttggcgctggacgcggccagcggaccagtggccttgagaatcgcgaggcacagcgccgaattggggatgcggatgccctgcgtgccggggcgaccatcggcggtgtcggccaaagtctccaacgtgcagtcgggccgggctacggcaatcggcgagaacgcgccgggcaggaacgccgccgacaaacgattcagtggagacggcaggtcgagaccgagttcatcaagctggtcggtggatgcgagcagtacctgcaacgccttatagcgtgggcgacgcttgagccggtagatacggtcgatggcggccttattacgcggatcgcacgccactccatataccgtatccgttggaatgacgaccaatccaccatcccggatgacacgcgccgcttgtgccagcgattcatccgtgactttcagcgttgttccgccctccacgctcacgacacctccgttcgcctgtgtattcacaatctaccattgcaccattgcgccccgacttgcatagttcatcatcgctcgtttgccgtactgctgttttccgattcgccccatacgcacagaccgtagatacaatgagttcatccatgctctttcgcgaaattacaggagtgttcaatgagcggaatcaatgctgaatccaccaccatgcctcccgtcgaactgcgtatgccgcgcgccagcgagcgcgtgttcgccaacttcaacttcactgtgctggattgttgcccggtgacgattggcgagggttgcgtgatcggtgccggctcggtggtgacgcgcgatattccgccgcacaccgtggccgtgggcaatccggcccgtccgattcgcgaaatcacggacgcggacgcctccgccctgcagtattacgcgcagtagcagcggcggccccgcgcctgtggctacttctcggcgaagagatagcggtctcggccggtccaatctttgccggtggaggcggtggcgaaacctgtggccttggcataggccactaatcgctcgccttgggtgagatcatgctccataaccaatacgccgccgggcttgagcaggcgccaggcgcgctcaataatgcgttcagggatgagcgtgccgtctgccgaaccgccgtatagcgccagttccgggtcccagtcgcgtacttctggttgttcggggatgtcggtttgtggcacgtagggcgggttggtgatgacgatgtcgatggtgccgtcgagttgcgccagtgtggccagtgacgtggcgtcggcgacttccagttggtaattggaggcgatggaggggtatcgtttcgcggttaccgccagattgcgccgggtccattcggcggtacgcggggataattcgacggcccatacttggctgccgggcacttcgctgactatcgacaggccgatggcaccggaaccggcgcacaggtcgaccatgcgcgggtggatcatgttgtgccgggtcagccagtcaagaccggcctggactacggtttcggtttccgggcgcgggataaagacgccggggcccacctgcaggtcgaggtagcggaaaggcgtgtggccggtgatgtattggagcggctcgcgtttggcgcgtcgggaaagcatggcgtggaaggcggcaaggatattggtgacggggtcggcctgaccacccccagtcgctgcgcgacagcccccgccggcgggggccagcgaatcgagaccctcccccatcagcatggccttgtcgatatcgcgtagttcggcgtccacggcctcggccagcaacagtttggcatcatgttcgggcgtctcgatgccggcttcgcgcaactgcgcggcggcttgacgaatcaggtcggctatcactgctggttggccagacggtcggcttcgtcggcttggatgtcggaatcgatgacggcctgcaggtcgccatcgagcacggcgtcaaggttgtaggccttgtaattcgtgcgatgatcgacgatacggttttccgggaagttgtacgtgcgaatacgttcggagcggtcaagcgaacgcacctgcgagtgacgcatgtcggcggcttcggcggcctcttgctcatgtttcatggccagcaggcgagacttcagcacacgcagcgcggcggcgcggttctggatctgcgacttctcatcctgcatgttcactgtgatgccggtgggcaggtgggtcatgcgcacggcggaatacgtggtgttcacggactggccgccggggccggagctcatgaagatgtcgattttcaggtctttcggatcgatctcgatctcgtcgtcatcctcgtcggcttcggggaacacaatgacgccggcggcggaagtctggatacggccctgcgattcggtgacggggatgcgctgcacacggtgtacgccgccctcgtacttcatcgaagcccacacgccgtcttcgggagcgggcgtgcccttggcgcggatggcaatctgtacgtccttgacgccgccgagctcggtggtgttctcggactgtacgttcacgctccagccacgcttctcggcgtaacgggtgtacatgcgcagcaggtcgccggcgaacagtgcggcttcttcgccgccggtgccagccttgatttccatgatggtgtcgcgtgcatcatccgggtcacgcgggatcagcgcggtacgcaacttctcctcggcgtcgggcagttcggcttcaagacgcttggcttcctcggcgaagtcggcgtcctcgccggccatctcctgagcggctgccagatcgtccttcacctgcaaccaggttttgtaggcgcccacgatggcacccagttcggcgtgacgacggcccagcttgcgcagcttgtccgggttggacacgacttcggggctcgccatctgttcttcgatggactggtactcctcaagcgcggttgccgccgccgggaactgttcgtctgccataacacactttcttctgtatggtgctgttctgttcgattattcaattgcgcaggtcaatgctgcaacaaaacttgtcaaagaatacaaaaacgccagtcctcgatcgggtatgccggagcatgccgaatcgaatcggactggcgtgaagtatgctacttgctcttcttgccgtagcgcttctcgaagcgagcaacgcggccaccggtgtcaagaatcttctgcttgccggtgtagaacgggtggcactgagagcacacgtcaacgaacatgtgatcttccttgccagcggtgcgggtcacgaaggtgttgccgcacgagcacgtcacctcaacggggtggtaatcaggatggataccctgctgcattttacgtctcctatggattcgggggacccgggtcgtcatgcccctatggcaggacgtgaaccggaacctaagggattgtacgcgcctatctggacgtgaagacgcgctgtgccgccgcaggaggcgacgcaaaagagtggggccgcaggggcttgaaccctggaccgggcgattatgagtcgcatgctctaaccgactgagctacggccccacgttcgctgcgtaaaacagccaacttgcaaagtgtagcatgaacccaccaacgccggcacacgcgccatgcacccatgccatgcacccgccagcacaacaagcagcatctcccggcgctacttctcccccatgtaccccaacgggttctcgatgaaccgtcgcaagcccatttcggccgcgccatatagcgagggatgcagcgccaccggcggcacgaacacgcggatcttcacattcgggtatcccagaatttccgaacgcagccggccttcaagcacggtggccagctcgtcgccgaagtgcgtccacagtccgcccaacagcaccgtatcgacatccaccagattcacggcggaagcgatggcggaaaccagcgcatcagcggcctgatcgaccactttggccacgtctggatcccccgcacgccaacgctggaggaatgtatcgatggcctcgctgctggtggcatccccatcctcggcaatgccggcagcctcgaccaaggcgcgacggcccgcaaacgcctcaaggcacccgtggcgcccgcagctgcacaacggcccatccatcgccacggacagatggccgatctcgccggcgaatccgtgcgagcccatcaccacttcgccgtcacgcaccaccgcgccgccgatgccgatatcggtagacaggtaaataaaggaatccgtgcgatccaccacattcaggaaggacgcacgttcggtggcataccccggaatctgagcgatggcggccatcttcgcttcgttaccggccaccacatccagccggcgtgccacgttgaaccgggtgaggttgacgttttcccaacccagattgcgggccaccaacagccacatgtcgtcggtgacgatgcccggcagcgcaagcccggctcccaccactttgcagccacgtcgtttgagtcggctttccaacgggaaggtcatcgcatcgagcttggcaaaaatctcgtacgggtcagtgccggtcatatcctcactcacccactcctgaccgagagtgtcgccgttcagatcgagtgccaggcaaccgtagccatcggtgttgatctgcaggccgatgccggcgatggacccgccatgaatctccagcggcgtgctgggccgcccatatgtggtggagacgaccggctcgccttcctgcaccacgccactatcgatcagcatcgaggccaacagcgaaagcgtggccttggtcaggcccgtttccttggccaagtcggccctgctcatgggtttctccgcgcgcaacaaagtgtcgagaaccaccgacaaattatggttgcgcagatcctcctgattgatcctgcgtagacttgccataggctcctacctccttgcacccctagtctcgaacgccgcacaggcgctcacatccgtctatcgcacaatgatattgtgcgtcaaacgattgaaccagatacgcaccttcgcgtgtttccgtttgcaatcatacactgcaatacagtatagtttaatcgtctaacttattggttgtggcgcgccgaaacttgcaagcgcgaccctcatcgaggaggaatgcatgacgagagtactggttgccggcgtagatacgtcaactcaatcaacaaaggtccgcattacggacgccgccaccggcgaacaggttcggttcgggcaggccaagcacccggatggcacctcggtcaacccggaattctggtgggaggccttcaccaaggccgccgagcaggccggcgggcttgacgatgtcgcggccctcgcggttggcggccagcagcatggcatggtcattctcgacaagcagggcaacgtgattcgcgatgcgatgctctggaatgacaccagttccgccccgcaggccgccgccctgatcgacaagctcggtgcaactccggccgagggcgacgaaccggacgacgtgaccgcccgcggcaagcagcgctgggtcaaggccgtcggatcctcccccgtcgcttcctacacgctgaccaaggtggcgtgggtggccgagaacgagcctgagaacgccaagaagattgccgccgtctgtctgccgcacgattggctgagctggcgtatcgccggctatggcccggtggccgagggcgaggacgctcatctcgaagccctgttcaccgaccgttccgacgcttccggcaccatttactacgatgccgcgcatgacgagtaccgccgcgatctcatcgccatggtgctgacccccgccgagggcgaggaagccgccaaggcccacgccgacgccattgtgctgcccaccgtgctgggcccgcgtgaggcagccgccgtcaaggccgaccccgccattgccggcaaggacgttgaaggcggctgcatcatcggccccggcggcggagacaatgccatggcctcgctgggcctcggcatggccgtgggcgatgtgtccgtatcgctcggcacctccggcgtggccgcggccatcgctgaaaacccggtgtacgacctgaccggagcgatttctggctttgccgactgcaccggtcattatctgccgcttgcctgcaccatcaacggttcgcgcattctggacgccggtcgcgccgcccttggcgtggactacgacgagctggccgaactggcctttaaggccgagccgggtgccggcggcatcaccctggtgccgtacttcgacggcgagcgtacgccgaaccgtccggacgccaccgcctcgctgactggcctgaccctgcacaacaccaccaaggagaatctggctcgtgcgttcgtcgaaggcctgctgtgttcccagcgcgactgcctcgagctgattcgttcgctgggtgccgagatcaaccgcatcctgctcattggcggtggcgcgaagtccgtggccatccgcacgctggccccctcaatcctcggcatggacgtgacccgtccggccaccgacgaatatgtggccatcggcgccgcccgtcaggccgcctgggtgctgtccggcgaggccgaaccgctgacctggcaactcaccatcgagggcgtggagaccggcgagcccaccgaagccgtgtacgaggcatacgccaaggcgcgcggctgatacgctgccagcacaatccatgagataacaactgaataacgattcctgatgaatgccgccatggcaagcatcgcgaagagccgctgttataccgcgctcctcgctgaagcacacatggcggcatttttcgtttcccacgcaatccacaaatacggctataatcaagtcgtttgaacaagtctggagattcttctatgaacgaccgctcccgtatgatgctgtacgccctgaccgccgtcgcatgcgtgatttggatatggcaatctgccaaagaagcaatggccgacggcacgatgatcagcacctcgaacatcatctttttggtatgcatcggcattgccgccgtctactgcgccgccaacgcattgatattgtggtggcgccaacccagcaaggaggatgcggagaacgatgacgccgcggatacgcctgacggtaccgataccgacaccgcagatgccgagggatccgaggacgacaccgatgacgatgtcgaaaccgacgtcgcaaccacggatgccgatgcaccgccaaccactaatcgccagtaaccatcgttatcgttcgcccgaatcaagcgaatcatcccacttcagcaaaggaacattatggaagtaacaaccgtgtcaaccgtgatcagcgtggtgctgggcgtcatatgcgcgccttgcggcctgtttctggggctcgttcccatgaaggccgatctggtgaccgccaagcagtcaaaggcctcgcagatggtgagcttcatcgttgccatagtgttcatcggcttgctggtcgcaggccatgatctggagacctgggccatggtaatcggtctggtcatcggcttcgccgttgccaagattcccgcgctgcacgcctgggctttgcacaagtggccgttcttcgagcccaagaaagcggctcccgcccccaagcgcgtcaagaaagccaagaagaagtaaccataaatatcctgaagcatcacattaaccattaaaggctttccgcgcagcactgtatatgccgcgtggaaagcccttaatggttcggaagaggagatggaagaactacaacagaccaatcaaaccatggtcccgaccatctcgcgcaaaggcagggaccgtgtcgattgctgcagacgactcgatgctctgcccacccgcgtatacggcgccgtctcgcaaatcagtccaagtggtcgtctcatcgccaggaaggtagacactacgggaagcagcaccggcctcgactacgggagccacaagaatgtcaggaccgtacaggtattcgtccgcaatgtcggccacgtgttcatcggtcggaaactcgtagaacagtcctcgcaccaacggctgaccctgctcatgggcagactggaacagttcacgggtatacgggcgcatgacctcgcgcacggcgatgtatttacggaatatggactccatttcagggccatagctccatggctcgttgtccgcgcccgaaggcgaacggtgctcaccggttgccttggtgatggtttgcttgccggtcgactcccccaggctgcggtcaccatggttgcgcatgacgggcaggaagcaggagaacgcgcaccagcgggccagcagctccttgaatgaatccgaatcgatcaccccatcatggaagccgcccatgtctgtagtgaaccaagggatgccagccatacccatgtgaatagcacaggtaatctgcgatttcagatcggcgaatgtggagccaacgtctccagaccagaccaacgacccgtaacgttgagatccagcccacgcacatcgagtcaggttaacgatctcgccttccatgccggcttctatctgcccctcgtagaatccgcggttgtaagcctgcggatagacgttacccacgttgaggtcgctgcccatgtggtagcggtagttgcgaaaatcgtagacaccatattcgggttcggcctcatccagccagaaggcgcgcacgcccttgtcccaatagttggccttgcacttgtcccacacaaatttgcgagctcccgggttggtgggatcatagttgacgcacggctcttcgaacatcatgtcaagattgagcccagcttcagcgcttaccagatagttgttgcgcttcatctccacgaagttctcggatgagaccgagacctgcggccacacagacaccatgagcttgacgcccatgctgttgagctcggcgaccatggcctcgggatcaggccagaattcgtcctcgaacttatagtcgcccaaatgaggccagtgaaagaagtcaatgacgatgaggtctagcgggatgttccgggatttgaagcctcgggccacgtcaagcaattgttcctggttccagtaacgcagcttgcactgccagaagcccataccccattcaggcatgactggcgcatgtccggtggcgtcggcatattgcgattcgatctgcgcgtaggagtcaccggcggtgacccagtagtcaatctggtcagtggactgagccgcccattcggttcggttgcgtccaaaagtggcgcggccaatagccggattgtgccacaggaagccgtaccccttggaggagacgacgaacggcacggaggcttgggaattacggtgcgcaagttcaaaggtggagcctttgaggtcaagcacgtcctgttggtattcgcccatgccatacagccgttctttgggatcggcgctgaaagacgtggtcacggcgaagctttcaccggacaccggagtgtagtcacgcgccttgagcaaaagcgacccaccttgtggatattcgcggaacaggagttcgccttcggcgttccagaagctcaggtcacaccggaaggtttcatatccggcagacagcaatggagcatgattcgaatccgctttaacggtgatgctgccgttggtcaggctggcgtgttcgccgtcctcgccgacggcgatgtctgcgacacggccggattcattcttcggttccagaagcgcccaatcgaccgggccgaagccacggttgcgggtggcgcgtacacgtacgctgttctcttcccaaggttcgatgcgcagggtttcgccgtccccggtccagatcagggcgttgccgtcgatggtgaatgaagttgtcatggttgtcgtccttgtggttgaagtgtcgtactgtcttagtccttaacggcaccggcggtcacgcctgcggcgacgtacttctgggcgaagacaagcaggatggtcgcgggaatggatgcaagcactgcggtggccatcatcggcccccattcctgggtctgcgcaccgatgtagttgtacagacccatagtgatcgggcgcatcttgccgccgccggagtcaagggtggaagcgaacaggaagtcgctccaagaccataggaaagcgaacagggagacggtcacgatcgaattgcgcgataacgggatgacaatggaaaagaagcgacgggtacgtgaggctccatccacttcggcggcctcaagcagggaccgcgggatgccggccatgaaagaagtcaggagcatgaccgcgaacggcaccgcaatggtcgagtcggcgaggatcaggccgggcaacgtatcgagcagaccaatgttgttataaatctcgtagaagccgagcgacatcacgacggcgggaatcatctgagccacgatgagcaggaagctgagcgcgccgctgcctggacagcgcagcaaagccagtgcgtaggcggcaggcagtgcgatgaccagcgttagaatcacgcagcataccgctacgaggatggaagtgcccagatagggcatttggtcggcgattacgcgggcgtagttgtcaaaggtgaaatccttgggccacaggtcgccggaacgaatggatgccttaccagtgaacgagatgttgatcatccagtagacaggaaacatcatgatgagcgtcaatatgatgccgagagcggttttccaccaggtgctacgatgcgtcattgcaatcatctccctttagcaggtttcctgggtcttctggacccgcaggtaaatcagtccgaaaatcaacgccacgatgatgagaatcgtgccgagcaccgaagcctccgagtatttgatagtcattgaagttcccttgccaaatgccatcgaataggcccaggtggcgagggtacgcgaggtgccggttccctgggacatcatccagatcacgtcaacgaccttcaatgtatagacgaagccgagcaacagggtgatcgaagtgacgggcttcaggagagggaaggtgatcttccagaagcgctgccaggcgttgcagccatcgagggaggcggcttcatacaggtcgccgctgatgttctgtaggccggaatacaggatcacgaggttgaaggggattcccagccagatgttggcgatgatgacggcccacagcgagttatccgcctggagccaccagatgggttcgatgtcaaacagaccgaggaacatgttgaggatgccggagtcagggtccatcatccactgccagacggttccagaaacaatcagcggcaacagccacggaaccagcatgatgccgcgcaacacaccagagagcttgaagttatcgttgaagaacaccgccagggccaagccgattacatattggaatatcagcgagacgaccacgaacacgaaggtctgccccacaaccggccagaactccacggaggaaatgacttccttgtagatgtcgagacccacgaacagcgcatctccggtaacgaaggttcgtcgcgtgtatcggtgcaggctcattgacacgttctggatgagcgggaacgcgtaaaagattaccaagtagataatcagtggggcaatgaatccggcgatggccagtttggcccggaccggagtgccggactttgcccggcgaacggggcttgttgttgaggctgtcatggtttctcctgtatgaaccgggcggacaatacccgcccggaaaacgtcatctggtacgttggcggagcggtaatcgggaccgatcaagccgcgttaagggccgccagcagggattcggagatgcttgcggaggcttcctcgtatttgagacccaagtcggaggtacggccggcggcgttctcgatggattccttccactgagccaagccgtcgctagccgcgagctgctcggcacgcacggccttcttggcagcgaggttgctcagagcgttgcttaccttaagcagagtctcgtcctcggaaagacattcgataacctgattggcgagcttgtagtgggattccgcatccttcttgtggtaggcgaccatggcgaactcgccaccggtcggcacggtggccacgccgccatcctttgcggggatcggaataagtttggctccggcctcgtctgcctcggactgcatccaggtgccgatttcagcaaatccgtagtcgccagccaggaacagatcccaggaggccgactgggtgttggtcgtggcggacttgggagcccatcccttgctgatccacccggaaagcaggtcttcggcgtccttctgcgcctgggagtcaagcttggacagatcaccacctgcgccccagaaccaaggcaggaactggaagacgccttcctcacccgagatgcccgagaacgtaatgcccttgtatccggcgtcaacgaccttcttgatggccgcgttgagcgaatcccaatcggtgatggtggatacatccacaccggctgcctcaatgatggtggggttgtacataagacccaacgtgttggatccgcccagcggcacgccatatgcctggccgtccactacgcccggagcctcaaggttctcatcccaggcagaaacgtcaagaccagtttcgtcggaaccagcaaccaaacccgcatcgacggcggacggaatcatcgggttgtcgatgaccgcaacatccgggccattgtcttccttgattgcggtggtgaggttgttgagcaggtcggaagtggcgatggcttggcgctcaattgtgtagccttcgggcgcacacgccttgaccagtttgtcgaactcggagccatcctcgtggcgggtccagtcatcccaccattcgatcaccttatcatccgtggcgctgttgctcgaaccacaggcgctgacgccgacaagcatggcgcaggagcataatgcggcggttatcttaagagcggtattggacttcatatctcctccttgagagaccgttccttttgaccatctggtcctttgcatcgacccaccgtcgggtctttaccgcaccagatgcaaaccggtttgcataaataaatataaatcagataaacgaaccatgcaaaccggtttgcattatcggcgcgccgcgattggtgaaccgttctaaagccctgaaaacacaggggtcaaaccggttagcacaatttgagaaaagatattaggatacattcctatacaggcatggcgattcccgcatagattcgcaaaggcacataccgcaatgtcgacaaaagacgaagggaaaacgtatggtgaccatcaacgacgtggcgcgggaggcaggagtctccaaaaccacggtctcattcgtgctttcgggctcgcgccccgttgctgcagccaccgaacaacgtatccgtgaggcaatggacagactcggctataccgtcaatcatgccgcccgcagcttgtccacttcgaagaccatgaccatagccgtggtgaccagcaaccggcaggacgcctactttgacattgcccgtggcacatacatcaacggcttatcccgagcagccgccgaaaccggctacgacatgctcatcactaacgatccagacggctccgctacggagaacgcctgccaatcacacaaggcggatgggctggtttttttagacgtcaggcagaacgatccgcgtgtgccgattgccgctgaatccggcattccaacagtctcgctaggagtcccagtcaatccaatgaatcttgatgtggtcgacaccgacttcacggacatggcggcctcgaccatgcgtacactgcacgatgccggacaccgccgcgtcagcgtcatcacgctcagtagccgggtgattgccgaacaactcaacgacaccgctcgattcctcagggaaatcgaacgttccggagaacgacttggcatgcatgccactatccgacattgctctacaaggcccggaatcatcgacacagacatcgctcgcattcttgacggtcgaggtgaggacaccgcattcgtcatccataatgaatcggccgtattggtgttcagacgggcagtggaacatcgcggactgcgcatccccgaggatatctccgtcatcgccatcaatgaaaagcagatgtcggacgctctgtatctgccatattccgcctacgaaaacgacgtggaactggtcacccaatctgccgtcaatacgcttgtggaccgtatcgaacatcccgagctgacgccgacacgaacgttgatcaaggcctcgtacatagatcgagactccgtggccaatatctgaaatccttgcgtctctgccgccgcagcaatgatttccgcattgcataacggcaggggacgattgggttcaagccaacatggcatcaaagccactaatggtgcggccaacattccgcttcattatccccgcgagatgcgaagcgtgagagacagtgtcatcaggcatgacgagggctttcctcaatcttgatttatttgattgcccagtcccgctgggtaagttgaatcacgggtgcccgcagtagcaccaaaaaggtggcgtctgattcggcaaagaccgaatcagacgccacctcagtgccaaatgcactcctattccgtaatcgtcagcagcccgtcttgttcttcgacgcacaaaaacgtaggccgttcctggccggggtcgttgggcgagtggaccgcgtaacgcagcacgccatcgagaccgttgaacagcatgccgtggccgccgtggctaagcagaggctcggggcattgcgtccaaggcccagcaatcgaccctgattcgctgatggcctggccgactgcatatccgccttccgtcgaccagctcgaccacagcatcgccagccgtccgttggaaagcctgcacaggcagggaccatcggagaagtaggcgtcctcgtcgatgccgaattccgctttcgcgaacggcaccggcaccgcccacggcgcatccgaggcctggaacaatgtcatgctctcccccaccgtccgagtcaggtcggaggacagacgtacggcatccatgtctccggcgggcacatcctccaaggaatgcgagtagacaagccacatatcggtaccttcaccatgcagagttccgtcaatgcaggactgattcggatcggtcagccggcagacatattcgaacggatcaagcggactatcagcgcgtagcatgtgcacgcttttgcgcccgtccggctcgccgagcgtggcaatcaggtggaatacaccgtctcgctcgtagcattcgggcgcccagtaagcacggtcggccgtgaattcatccggcttgtggaacacctcgaacggaccctcccaattgtcaaggtcgcggctggtgtagcaatcaaaaccatccatcgcgccccacacgttatcagcgcgggtgccatacaggtaatagacaccgtcgtgaggcaggacgaacggatcgcgcaggtggatgtcagttcgtttcattggtcaggtcccctttcatgagacagtcgtcatcagtcacttcgcgctttcgaggcacttcttttggaatccgctcacaccgagagccaccgctccggccagagcaatcgcggcaccgatgaacatcgcgccggccgcgtgcgaaccaaacagtccgttaatcgcgttgacgagcacagggctggcaaatccgcccagtgcgttggccgtggtcatggcagcaatgcccagcgggatgaggtagggcttttcgatgacggtgacgaggaatggcgcctgcgcatagtagatgctcaggccggctccggcaaagaaactgccgatgatgagcagtggcaggctggccgagcagccaagcagcagcaaagacaggccctcgacaatgaagccgaccatcagcaaatggttcttcacgaatcggaccataagaccgacgcacaaaccagccagcagtccgccgaactgtccgatggtggaaatcagtccagcggttccggcatcgcccaagccgcgctgctcgaccaacagggacaagttgttgctgtaggcattgttcgccagaaggaagaagaagccggcaacaaccaagaaccacagtttgccggtcataacctcgcgaatcgacgcggaaggccccgttccctgaatccggccggcttcgtccgtctcaccattcttggtgggcagcgtgaatgcgcagaccaccagcaccacggcggcgaacaagtagatgaggtaggcgtgataccactgtgcggtggcgagtttgccggccacggtcatgaacaccatcgcaccgatgctggccacggcaacctgctgacccataatcgactgtcgctcatcgccctcgtagtgcacggagatcaaagtaggcagcacgttgttgataaagcctaggcatacgcccatcaacgcggaaaacgcgatgactgcagccagactggaatgcacgaagtacggcagcagaccgaacagcagcatgccgcctgcaccaatcagtgccacggtcttccgggatagaatgctggcgagtttgccggtcagccaagcgccaaccagtgcggtcagagtgatgccgaaacaatcatctgcacgctggagagcgagctgtccgggaatgcctgagcaaccaatccgatgaccggcacaatgaaaatgcccgatagcgtaatggaactcggcgataggatgcccgccttggttttcatattactcatcgtcaattctcctcgataacgactttgttattgacattgcagtgctgttgttatcaacgatacgagagtaaaactcggcaatattgacatgattatgctctataatgacctttatcgatggcgcacctacagcagcatctacagcaaaaggagtgacggccatggagcgcgatgctttccggctgccgggcctcaccgccggcgatgacaaccagtatgccgatcacacgctcaccggcatggcagccgatgcggcgaacgtcatagccgcaggcggtcccgccccgctgactagcttcggcactgtcgctcaagccgcccatctcaatccagatgacggcttcggcatcattggccatgatcttgcacacccatcgcacctacaccggcatgactatatggaaatcacgcacgccatcgccggtacggtactggtctgggtcgaaggagagaccaacgtgctgacacagggcggcaccatactcatcaagcctggagcccgtcatctcatctcccccatcatcgaatacgggcaaacaccacacgaggcggacatcctgattaaacccgagctcatcaggcaatgccgcattccgattctggaagcagccggcgccgaccggatgttcattagctggcttgacgatgaccggcagacccactgcctgctggcagccggcaagcaccacgccggcgaggccgctatcagccgcatgttcatcgcctactgcatcaacgcaacctacaggccagacttcaccgtcatcggcaacctgctcgagctgttccacgaaacgtcccgagtcttggaacaccagccacgtaccgatccgctgatcgccgccatcatcgaaaccatcacggcagatcccgccacggcccacaaccaggccatagcggacacacttggatacagcgtgggatatctgtcccggtacgcgcgcaagcacagcgggcacacactcggccaactcatcaacgaggaaaggctccgactcggcgccgaactgctcgtcaccaccgacgacaccattgccgaaatcacccgaaccattggctacgaaagtccagcctatttccataaactcttccgcagccgctacctcattacccccgaccgctaccgcaacgacttccgtatcgcattacgttgcggatgacaagcgccgcttttcccccgcaacgtaccggaatccgagatctcgcgagctggatgacgccgtttgcatagcgctatactcactttttccacgcaccacaccagcacacccgccacgcaagcgacaagtgtatatcggacgaatagcatggcgaatcccgccactatcatcatcacaacaaaaacgaacacatcggcatgatcgcatttgccacggtgcaggtataggtagctcaccacaatcatcgggacccgcccagccccgccacaaccagaaaaccgcccttggcgacgttgcctcaggcggttttccagcggaaggagagaaaggagaaagaaggaatggaaaggtgccatgcgggcataacacaacaccgcacatggcgaaactatcgaatcagcccatcgggcgcactggcatcataattgatgtgtacacgcccgatggagcgaattcaatcggtcagaccgatggtcactcgacctcagccagggcatcaatgatgtagttgttgatggtggccttgacggactcgaggtgatcggacttggtggcggcgatgagctcggactgcggcttgtcgaggctgtaggcttcgaggtcggccaaggtgacgttgccctcgtcgatgtccttgccgatgccggagtcgtaggagctgtagcgctcggcctgaagattctggatgaagccgtcctggttcatcttgtcggcaaccagcaggccggcggcgtaggcatccatgccggcgatgtgggagcggaacaggtcctcctcgtagaaggaggtacggcgcggcttggcgtcgaagttcagaccaccgtgaggtccgatggagccggcctgcaggacttcccacatgacggcgacggtctcgtacagatcggtcgggaactcgtccatatcccagccgatgagcttgtcgccctggttggcgtcgagggaaccgaggaagccggactcgcgggccacgcggatctcgtgctggtaggtgtggccggccaggttggcgtggttgccttccaagttcagcttgaagacgtcggtcaggtcgtggttgcgcaggaactcgatggcggtggcggcatcgaagtcgtactggtgcagcgtcggctccttcggcttcggctcgatcaggaactgggcctcaaagccgatttccttggcgtaatctgcgcacatgtggaagaacttggcgatgtggtcggtctcgcgcttcatctcggtgttccacaggttctcgtagccttcgcggccaccccagaacacgtagttctcggcgcccaggcgcttgccgatctccaagctcttcttgagctggccaccggcgtaggcgtagatgtcggcgaacggagaagtggcggcgccggacacgaagcgcgggttggtgaacagggaggaggtgttccacagcagcttgacaccggtggacttcatattctcgtcgatcttgtcaacgaccttgtcgaggttggcgttggtctcgcgcagggtgtcgccttcgggggcgatgtcacgatcgtggaagcagaagtactcgacgcccagcttctggaacagctcgaaggcgtagtcgaccttggccagagcctggtccatcggatcggtgtacttgtagtacgggcggtgcgcggtgccggtgccgaacggatcaaccagttcctggttgaaggtgtgccaccaagcaacgccgaagcgcagccaatccttcatcttcttgccggcaacgaccttgtcggcatcgtagtaatggaaggcgaagtcttccttcggtcctttggcgcggccgacgtactcgatcttgtcaacatcccacagacccatttgggcgctcctttgcagtaggcgatattacggattgcaggaccaataataaaacgaacgaactaagtttgtcaaatgattgaattaatacgccgcgtctcagcgtgttgctagtcattgcaatggttttcgaatgcagtcaaggcacagatagtatgggcaagccaagaaagacaactcagccaagaaaacgagacttgataattgacgtcacgcaattcctcgccggccaccgctgaggccggctccaccaccccgccaactccaacagcaccacccccgccaacaccaccgccatggtcatcaccctgatgatcggctcgtttgtggccatcctcaaccaaacgctgatgatctccgccctgcccacgttgatgcacgagttcgacgtgcccagcagcaccgtgcaatggctgaccaccggattcatgcttaccaacggcatcatgatcccgatcaccgcgttcctcatcgagaccttcaccacccgccagctgttcctgtacgcgatgggcatatttgcagaatgatcttggcgttaatgcactggtgtccggtctggtgatgatgccgagcggcatcgccatgggcatcctgaacccggtggcaggcaagatgtatgaccgtatcggtggccggccgctcgccttactgggcttcgcgatcatgacgtctgcggctgtgctgctggtcaccatcatgaacacgcacaccgcggcggccatgcgcaccggagtgccggaagcggcggcatcggccattggcgtgcgggcttcgttccgcacggtcgccattgtgtgcgcggtctgtttggttgcgtcactcttcattcgtgatcgcggccgccgacttggacagcagcgttaggcgaatccttcaccgattgctggccttcttgatcagcgcgtccaaagtaccggcttggcgcgcggcttccatatcttcccagtcgagaccggtgtctttggccctcccgtagaaaaaccgcaccagaccggcaaagtccggtttatatccggtttcccggaatgaacgggccagcgaatcaccgatttgcgggtcatcaggccttcgtgcctcatagatcgggatggaacaggatcgccacacgcctctcacatgtgcgatgcgattgacgatcatgccgccgtgcgcaccatcgtattgcgaggcggcatgtacgtccgccacctcgtagacaccaccatgaatgatgtcctcaactgtcagacgacctttgaccgcgctggcatcgcgaatccagaacatcgaagcgaaattggtgtcatcaagttcgcgaaaatcacgtatctcgcgtgtgccgatacgttcgtccttgtcatacatgaattcggccaaggctaggaatggcgagatacctgcgcccggaccgtactgcaattcgatacgtaaatcttcggattcattgccggtcagtccaataccgctgacggcgcagtcataggcaaaccaatcccagaaccaccattcgatcctttgcagcacctgcttcggatactttttgcatgggttcagattcacttcgcgataatatatgcgtctcgcttcggcatagacggcgagattgcagcgtttgaacatctcggctacgtctttggtgtccagcattgctggcaaaccggcattttcggcagtagtagtggttgcggtgctcatggtgtttccccttcatgtgatgtggacggcgggctacgttgcccgccgtgaggcacactgtatgacgttcgtgcggtggcccgcaagcccacatggcgagatggtggataagtggaaaacccaatgattccaaggggtatggaatgtgcataacagtggctaccgtcggtggataaccgcactttcttgcaggttatccactgatcgcgcagctgttatccaccgtctctgggttatccacatcgtctctggcgtgtcgtccactgtcagcagtcgatttctgcttcgtttggcgtgtataagtgcacggtgaagtgtataactccgcgcattagacatatttgctactgagaaaggtcccgaaatcgccttcgaacgcatagctacactcagcagatgtattcagcatggcaatagacccatttaggcaccggcgaatgattttccctcgcttatagagtcggcaaaggcccaacacctgtcccaacgccgacgctactgcactggcagcgtcggcagaggaccacaacttggcacagcaacgacgctaaaaccgcccagcatcgttacacgtccaagttttggccgctaacgacgcttaatgaacgcttagcgtcggcagcaggtcacgcactggttctccaccgacggtaacgctccttagcgaagccagcccgccactctttggcacatcaccgacgctgagagaacctccagcgaagccaaccagccaaccgctggcaacatgacaccacccacacccctcagcgaagccaaccggccagcgcatggcaccccaacaccgctgagaacacccaccccaccagtgcacataaaaaaaaactggtcatagcggttgcgatgtaatcgcatcgtaatcgcgatgaccagcctcgggggttgggctgcaacgcgcaccgatatgaatcagataatgatgccgttgcagtgatcgacttcgtgttggatgatctgcgcagtccaaccggcgaaggtggcgtggcgggcgcggaaccgacggtcctcgtagttgacctcgatacgtcgataacgcagtgtgcggcgttcgccggtcagggacaggcatccttcctgggtgtcgaaggcaccgtccgaagcggtgatcacggggttgagcatcaccgtgatacgcccgccaaggtcttcatccacgaagacgatgatgcgcttgctcacgccgatcatgttggcggccatgcccacgcaccgtgaacggttggcctccaacgtatccacgaggtcctgaatagttgcctcgtcgccgggcccagccgcttcagacggcgtgcgcaaaaacgaccgcgaagtcataatagggcgttgcatgttggaatcacgcttcttcgtgccagtggatgttggtgataagcggcagggagatgccggtaccgagcgacatgaccagtcgggcggcgagcagcatcgggaagttgaccgcgagcgcgcccagtaatgtgccggcggtgaaaatcacgatggccatgatgaacagtgttttggtggcgaatttgcgcaccatgaacggcgagctcggaatcgacaccgacagcaagagcagataaccggtgacaagccactgcaccaccgaggcgccgatggagaactcctccatcggcgtggagtaggcgatgttcagtgacgtttccgataggatgccgaggaaggtcaggatcgcgagcgagacgaccgcgatgacgagtttgttggagaccggttgcttgccgccgttaggcagctgtgttgcggaatgagtcacgatcttgttctctcctccattcattcagatattctgactacgacgttggaagtcttcctgcatgagtcgcagagcctcggtcaaggtgcgtaccgtggtttcgcactggtccgaggtcaatccgcccagcagttggctcaaatgcgcgtgatattcctccacatagatgcggcggatatccaagccgcgttcggtgagcgtgagcgtcactgcacgccgatcggcggcatcggcgtgtttgacgacgagtccgaggtcggccatttcgccgacgagcttggtgatgctcggcgtagtgacgccgaggaatgcgctgacgtcgcccacgcgcgcggtgccggtatcttgcccattcggttcgttgatatgccagacggcgtcgatcacgtggacatagcgcggtttcatacctttcggcaatgccggcatcagttcggtgatggtcttggccttccagcagacatccaggaggctccgcacctcatccaccggaagcaagccggtcttggtatcggttcgggaatcgcacatcgctggcccaacctccaattaattaccaatagtcattaccataagtaactatatgcaggctctagacaaacccaacgacctgcgcgcccgtgtcgagttccgtttcggcataaaaaagccaggggatccctggcttgcaatgcacatatcgctgcaggtttgccgggacctatatgttcccggcaacaacagccgtatatacgttaccgatcagtgctgccctcatcatccttggcacccgccgtggcagcctcagcctccttggcgttccacccggtgacggcattccaaccactccatccgatgaccactagcaagcacagcgagaagacaatagtggcccaattgaacagcgagccatcgttattggcctcgaccagtgactgccagagccagataacgcaggccaagcaggtcaatgcatacatacgggaggtggagcgcgcggtgagtttcatggcggaaaaagtcctttgattacaagaatgacggcagataacagtgtgggatccgcaccagcggcaccggcacgaatcccacatcgaggaggagaaaggggaaggtcagctcttcttgcgcttggatatgatgtccacggcgacggccagcaggagcacgaggcccttgatggtcttcaccacggcggtgtcaacacccataatcgacagaccctggttgataacacccatcacgaatgcaccaatcacagcgcccgggatggtaccaataccaccggtgacggccgtgccaccgatgaagcaggcagcgatggcgtccatctcgaactccataccggcctgagcagttgcggaagccagacgggaaagcatgcagacagcggccactgcggacaggaagcccatgtggacgaacagcaggaagtccacgcggcgggtgttgataccggagaggatggcggccttgcggttgccaccaacggcgtacacgtggcgaccgaacacggtcttggtcaggatgaagttgtagatgaagaccagcacaccgacgatcaccagcatgatcggggtaccaccctgatcagcgttaccggaggaagccagcaggtaggtgacgaaggcgatgacgaccgcgacaagcacaatcttgagggcggtcaggctcatcggctcgggcaccaggccgaccttggccacacgggcgcgcttgcgcagctggctccaggcaaagccgacaatgcacaggatgccgagcacaatggtcagaccgtcgaacggaccccaccagccaaggatgttgggcaggtagttacgggcaatgccacggaattcgagggaggtaatcggcacggattcgccgacgatcacggtggcgagaccacggaagatcaacatgccggccagagtggtaatgaagcccgggatgccgatgacggcgacccagaagccctgccagacgccgacgatcagaccgacgaccagagcgatgacgatggcgagcatccagttgactccggcgcgttccatcagcagtgcacacacaccaccgatgaaggctaccaaggaaccaaccgaaaggtcgatgtgggtggcgatgatgaccatcaccataccaatggccaggatgatcacgtaggcgttctgctggatcagggacacgaaggagttcggcttcagcagcacacctccggtcaggatctcgaaggccacgacgatgatcagcagtgcgccgacaataccgtattgacgggcattgttggcgaccgtggccagcaggccggtcttttcttctttctttgcaggtgttgcagttgcggcgctcatcaggctgccacctccctttccttggtcatacccttcatcaggtattcctgggtaaatccattcttctcgacattgtcggtgacgacaccgtaggacaccgtgtaaatgcggtcgcagataccgatgagctcaggcagctcggaggaaatcacgatgacggccttgcctgcatcggcaagcttatcgatgatttcgtagatctcatacttggcgccgacgtcgatgcctcgggtcggctcatcgaggatgaggatgtccggctgcgagataacccacttggcgagcagcactttctgctggttaccaccggagagggtggagacattcacatcgatgtcatgacacttgatgttgaagtccttgcggtactgttcgacttccttgcgctcaaggttgtcgtccacaaccccgcccttgctgatcttggtcagggaggccagggatgcgttctctcggatgttctgcagcaggttcagaccgttgcccttacgatcctcggtggcgtaggcgagacctgcgtcaatcgcggactgcacgttgggcatcttgacttccttgcccttgacgaacaccttgccggagatgttggaaccgtaagagtggccgaagatggacatggccatttcggtacgacccgcacccatcagacccgccagaccgacgatctcgccggcgtgcacgttgatgttcgcatggtctacgatcacgcgctccgcgtcgagcggatgatgcacggtccaatcctcgacgcgcaggtattcctcgcccggggtattggaggggtggttcgggtacaggttgtgcagcggacgacccaccatcttgcggatgagttcttcctggtcgagcggcgtctccggcgtcacgtacatcacaccgacggtcgaaccgtctcgaatgatggtgacattgtcggcaatggcggcgacctcgttgagtttatgagtgatgatgatgctggtcacgccctgctcgtcacgtagctgacgaaccaggtcaagcaggtgggcggaatcctcatcgttcagtgcagcggtcggctcatcgaggatgagcagcttcacgtccttggacaatgccttggcgatttcgacgagctgctgcttgccgacgccgatgtccataaccctggtatccgggtcttcgggaagtcccacacgatcgagcagcttcttcgcctcggcgcgggtcttgtcccagtcgatcacgccacccttggcctgctcgttgccgatgaagatgttctccgcaatggacaggaacgggctcaacgccagttcctgatgaatgattacgatgccgtcggcctcggaatcattaatagtatggtatttgcattccttgccatcaaaggtgattttgccggaatagctaccgtatgggtacacacccgaaagcacgttcatcagggtcgatttgcctgcaccgttctcgccgcagatggcgtggatctcgccgcgatcgacggaaagattcacatcggtgagggctttgaccggaccgaacgtcttcgtgatgttttccatcgtcaagatggtgtcatttgatgacatgtcatcactcctcgtcacagttctgtgttcatggacatgcggcgcatatcggctatgcgccgcatgtcattgtgtttgtttacggattgcctgatgaggactacttagtcagctcgtcgaagcgatcctgggtgatgtagttggccgtgaccagatcctggaggttgtccttggtgatgttctgggggtcaagcagcttggacgggacgtcgatgttgttgttgttgaacttgccgttcagaccggagacttccttgccctcggcgatctcgacgaccatgtcgtacacggcgtcagccagcttgttcacgtccttgaacacggtctcgccctgcttatccttggcgatgttggcaactgcgatctccatggcgtcctgaccggtgatgtacggccaggagtcggtgcccggcttcatgtcgggacgcttggattcgatggcgttgatcacaccctgggcgatgccgtcgtacggagtgaggaccgcgtcgagcttctcgccgtgggcgtaggtggagtcaaggatggattccatgtccttctgcgcctgctcggtcttccagctcatcacggagatcttctgccaatcctcaacggtgaagtccttggtcacgccaccctgaccgtgctgggacggggagacgagcacgcccttctcgaagtacggctgcagcagatcccaagcgcccttgaagaagtacttggcgttgttgtcatccggggaaccggtgaacagctcgatattgaacgggccggtggcaccatccttaagcttgagctggtcaatgagccacgtggcctcgagcacgccgacctgctccagctggaaggtggcgtagtagtcgacggcgtcggtgttcatgatcagtcgatcgtaggcgatgaccttggcacctgcatcgcgggccttctcaacggcggggcccactgcggtgccgtccttggaagcgaccacgacgatcttggcgtcgttgttgaccatgttctcgatgtcagcgttctgctgggccggcttatcgtcggcgaaggacaggatgaccttgtatccggccttctccagcttggccttcaggttgttgccgtccttgttccaacgctcttcggacttggtcggcatcgaaatgccgatagtggcgcccttttcgatcttggcatcaccgccagttgcctggccgctacggctgccaccgcaggccgcgaggcccgcgcacatggcaacgcctgccaccacggcgacgatcttcttagtgaacttcatttgttctccttcatcttcgaggggatggcgaaccctccttggtcgcccgaacctgagaataacctcaggttcatctcatagaataccgtattgagttaagttgtcaaactcaagaaagcgaatttcctgtcgtttatgttcaaccaatgaacgcaatgtcgatttttcgcgcatcaccaggcgacacgccgaaaaatccacgctctgcgcctcgctgtgcctcatgccggtaacgactacactgaactcttatggcaacaaggcttttcggttcgcagacctcgcttcgcgaggcaaaccgcgccaacttgctggccagcatccacaagttcggcgccatgacacaggtcgaactggcagaggtgacaggactgtccactgcgaccgtgtccacgctcgtccatcagcttgtcgacgaagaccagctggagaccaaaaacaccgttcgcaacggtcgcagagccactctagtgacccttgcacggcatcagggcctcggcgtcgggctttggatcgcgcgacgtcatcttacgctttctatcgttgacttctcgaagtcaatcatcgctgagcacacgctccccctgccgttgggccacaaggcggacacaacgctggaacgcgccatgctgctcatcaatgagaccctgagcagcatcgacgccgaagccagcgagctggtcggcatcggcgtggctgtggccgcaccggtggccaccagcgaccacaccatagcgattcccggcattctgcccggatgggacggcgtcgatatcacggccccgttgcgcacggcgttcaacgttcccgtatacgtcgataatgacgcgaatttcgcggcatacggcgaatcccgtatgggcgtggcggcaggcaaacgcaatttcgtatatatctcagccaacgacggggttggcgcaggcatcgtcatcaacggcgaaatcatgcatggcgtgaccggcctggccggtgaaatcggccatatccaggtcgacccgctgggtgccatctgttcgtgcggtaaccgcggctgccttgacaccgtcgtggcggaaaacaggctggtgcagttgctcagcgtcacacacggcaatatgacgctggatgatctggtgtcctttgccaacgaaggcgaccccggttgccgtcgcatcatcgccgacacggccgtgcgtatcggtcaggtggcggctgatctgtgcatcagcgtggatccggaggtcattgtgctcggcggcaagctggccatgaccggcgacgtattcatccaaccgttcaatgaagcgttgcagcgcatgctgttccctgatgccgtggcacccatcgatgtactcgtgtcatcccacccgaacgacaactgcgcgctaggcggcgcattatgcgccatcgagttctcggttcgcaatgacgtcagccagtgaccggtaccaggagaagagtgagaagaaggaacacaccatgaggaattcgagcacacctcctctgctgcggctggaggacatctgtgtgaagttcggcttcgtcgaggcgttgaaatcggtgaatctgtccatccaacgccaggaggtcgtcgccatcgtgggcgataacggcgcaggaaagtccactctgatcaaggtcatcgcgggatttctgcagccgggattcggccatatctatctcaacggcgaacaggtgaccattccctcgatcagggaggcggaccgcatgggcatcgcatcggtgttccaggggcaggagttctgcgacaacctggacgtggcctcgaacctgttcctcggcaaggagatcaatcagattggcatacgcgatgacgattcgatgaactcgcgtgcccgttccgtgctgaagaccctgagctcggcgattcgggtcggctcccctatcgcatccttatccgtcggccagcgccagaccgtggccatagcacgcacgctgctcaatgacccgcagcttattctgctggacgaaccgaccaccgcactgtcggtgatgcagtcggcggaagtgctcgcatatatcaagagactgcgctccgaaggccggtccgtggtgatggtctgccacgatctgccggatgtgttcgcggtatccgaccgcattgtcgtgatacgtcaggggcacgtcaccggcgtgcatcgaaccgtcgaaacgtcctatgaggagattatcgccgaaatcgccggcgtgaccaccgaacacgagtacgaggaaatcgctgagaacccggaattcgattccatggtcaggcagcggaaactcatcgaccgcactatcagcgcggcagtgagccatggcaccggccatgactcaccattagactaacgtcccgttgccggagcgacatcgtcagcgcagagccaggttggccgcgccgatcagaccggcatcctggcccgcagtggccgcgacgatcttggcatggccgcggtaggcgctgccttccaggaaacgctggtagttgtagcgggccggctccagcaggatgtcgcccacggccaccacgccgccgccgatcacgaacaggtccgggtcaagcacggcggaaacggcggccatggtgcggcccagccattcgccgatcttgccgaacgcatacaggccaagtacgtcaccttcctgagccgcttgggacaccatcggcccctccagtttggtgatgtcgccgccgcacagttccagaagacgcttggcgtcctgaggacgacggcgcacggcggacttggcgaagttctccagcgaggttcccgaagtgtaacgttcggcgcagccgcgcaggccgcagccgcagtggtcgccgtccgggaccatcggcaggtggccgagctcggcggccatgccgaaggagccgcggtagagctggccgttgatcacgatggcaccgccgaggccggtgcccacggtcagcgcgaccatgttggagctaccctggccggcgccgtgcacgaattcgccccatccggcgcagttggcgtcgttttcgacgatgaccggcacggcatggtcgatcagcgcgccgacgtgctcggacagatcgtagttgatccatgccggaatgttggcggagaaggtgagcgtcttgcgatccgcgctcacattgccggcggcggagatgccgacggcctcgatatcggtgtgcccggcggccacagcctcgcggtacacctcggcgatgtgctggttgatggcgtcggcgtccatcggcgtggggacgcgccagcgctggatgatgctgtcgtttgcatcgcagacggcggcggcgatcttggttcctccgatatcaatggcgagcgtggtcatggcttactccttgaagactttcgtaacatgcgagatagcgaaaatagtagcgagccgccatgacctcccaccgcggtttttccgtggttcgtcatgcgtcgcgaacattccgccgatgcgcttcctcatgcatttcacccgttgcaaacgggcgcccccttaacgccggcatcggtgcggacggcgtgtcgaatcggatgcaatcactttcaccgtccttgcggatggcatcgaagaacggcaggaaacaaaaaa

SEQ ID NO: 1039 - DNA, 87896 bp, Unknown
  R13_10m  MAG No. k141_319
cgtcatcgacttcgacgccagcctcttcccatacttcatggaatggaagtcgatgggtgcgggcgactacgtggtcggcctcgaaccctcgaactccagcgtccacggccgcggctggcacgagcagcgcggcgacctgcacaccatcgccccgcagaccagcgaacgtaagtccctgaccttcaccgtcatcgaaggcgaggccgcgattgacgggctcatcgcccgccgcgacgccctgcttggctgaattgtgagataatatcggccgatatgtgaacggctgattagcgtggggagcatggttacccgggattcggaacagtatctgcgattcaaacgggagcacacgctgccctcgcatgaggcgattatggactggtatcgcggcaccggcatgcgtccgtatctgcaggcgcttgacgacgccagccgcaagaagttcgaggccgaagtgttctcccaagtccgcgaggaataccccacacagtcggacggcagcatcatcttccccttcccgcgtttcttcttcctcgcgactcggtagaagctcgccggattcgtgtactgggcggcgcgacctgtttcccgcgccgccagctgtgggttgacctcgctactgggcttgcggtgatgccgctggctgctgcgctgcttccgattgcgatggcatttgcatatgcggtgcgatgctggggagtgtgtcgtcatgcatgcactgcttcaatatgaggtctcgctgggcgatgaggtcgtcttcgatctggtcacgcacgtcgcgcacggacgagaaatacaggtagaacgtggcgtgattgtagccggcgagttcggtgatctgacgcaccgagatcttctcgatcggcttggtttcatacagcttctagaacgcctccttaaggcgattgaccgtctgctgcgtaagttgcgggttcttcttgattgcgattcgcggtatggtgatttcgcataagacgcacaaccccatcgattcgtcggtcaaattcgtgaccttctcgatgcgatgctgtcgctggtggtcacgcaggacgtgctgttggaatcccagggaaccgcgcacgcggcgcaatcctcgggactgttcggcatcgggctcggcgtggtggccgtgatcatcggcctgtggatgttgctgagacgtaagtggacggcaacggaataggaatagtgacagcggaatagcgcgcgtgatattggtacgcgacgtatcgtaaaagcggctacaatacttacggcaaaagtctttgcaacgagaaggaagacatgactgagcggcgtcgagcacggatgaggattcgtcgtcaacgaatttacgttgtacggcgcattgtggttgcggtatgcgcattgttgtgctgcgttcttgccgtcttctcgacgattgacgcccaacgggtgtggccccgcggtgagtcggtcgcacaggggcaggcagaggttcaggggcaggcgcagaaggtgagtcaatccgcgcaacagtcggcatcgcgagtgtctgcatcggcctcatccttggaccgccagcaggtaccggtctttaaccaggcgattcaggagcagcgtgacaaggaagcgcaacgtgcgcgatggacgaatcccaccggcaagcagcctgatttgtcgcaatactccgatctcagcgtgaaagtcagtatcgccaagcaggaagtgtatgtgcaatccggcggtgagaccatctacacgatgatcgccagcaccgggctcaacgatacgaccccgcgcggcaactatgttatcgggatgagaggcgatcacttctacaatcccgcagaaggcatgggtgctgattattgggtgcgattcaacggcccgttcctcttccactcggtgccgaccggggcgaactccggcgagtatatggaagaggaaggcaacaagctcggtcagccggcctcacatggttgcgtgcgactcactgtggccgatgccgaatggttctacaaccaaattccggaaggcacgccggtcaccatcgcctgaggcttggcctgagatcgatactgaggctatcgtgctttaggcgtctgatattggtcgtcggtagtgaagcaggtgcgatagaccatggccatgatcagaccgtcggccagcaaggtcagcgcggcgatggcaccgaagaccacgaactggtatttggcggcgttcagtggatctccgccggctatcacctggcccgccatcatgcccgggatggtcacgatgccgctggaggccagcgaagcggtggtgggcaacagtcccagccgaatcgacgagatgacggatggacgggcggactcccatgccgtcgcccccaaggccagcatcatatccacctcgtcgcggcgttcctccatgctttcatagaatcggctcagcccgacagcaagcgcggaaacggtgttgcccagcagcatgccggtcaggggcaccaccagctggggcgcataccatgggtgtgggcgcacgatgagttcggtgaccaacgccagcatgagcagcatcgtgatgaccaggctcaggaagatcggtccggcaagacctttggggatgccgcgcgcgcgggatatcacgatctgcaccgccgcgaccagcatgaccgtcatcagagcgaacaccatccacacgctgttcgaacgaatcacgtagctgatgatgaatcccatggcgcacagctgcacgagggcgcggcatgccgaccacatcagggtcctgccgatgcccatgtgcatgagttcgctgacgatggccgccacggccaccatgcccaacgccagaacaagaccccaggtgtcgatgtcgtaggcgccgttcatgggcgcacctccttatcccgcgtcagatcggtgagccgtcccgcatcgagcatcagcgtgcgggtggcgcgtccgtccggcggacggtgtcggatgcggatgatcgccatgccgtgtgcggccgcgtccgccatgatcgcggccactttggacgcgttgtcgtcgtcgagtccggcgtccacctcatcggccagcagcaccttcgggtcggtaagcagcgtgcgggccaacgccacgcgcgccgcctgaccgcccgacaggtcgtgcggggcgcgcgccaggtcgatgtcctcgcagcccatcgcgtccaacgtcgtgcggatgcgctcgtcgggcagcatctgctcggccttgccgcccttgccgcgaatcgcgagcgtccagggcaggcggatcgcctcggccacgtccttgccggtcagtatcggtttttgcggcaggtaggagacgtctcgccgccactgctgtgcgctgaattcgtcactgcccacgccgtcgaggacgaacgtgccgtgtgcgtgtgggttgagtcgggcgcatgcggtcagcagactcgatttgccggagccggacgggcccaccaggtcgatgatgtcgccgcgttccatgctgaaggacaggttgtcgaacaccgtgcgttcgtcgtccgccggcgatcgcgcggggatgacgcaggatacggatatggcttcgaagaaggatcgcatattcatccagtctagtcgggggccacgtgggaaaccccagcgttcacttcctgtatacccggtgtggcataatagccaaggcaatttttgggctttgcctaagctagtttgaatttgaaataggtgaaaaacgtggcacagactactaacgacatcaagaacggatccgtcctgaacctcgacggacagctgtggaccgtcatgaagttccagcacgtcaagccgggcaagggccccgccttcgtacgcaccaccatcaagaacgtgctctccggcaagatcgtcgacaagaccttcaacgcaggcatgaagatggaattcgagaccgtcgacaaccgcaccctccagtactcctacgaggacggcgacaacttcgtgttcatggacatgaccacctacgaccagatcatggttccgaagaccctcgtgggcgacaaggccaagttcatgctcgaaggcactgactgcctggtctccttccacgacggcaccccgctgagcgtcgatctgccgggctccgtggtcctgaccatcacccacaccgagccgggcctgcagggcaaccgctccaacgccggcaccaagccggccaccgttgagaccggagccgagattcaggtcccgctgttcatcaatgagggcgaccgcgtcaagatcaacaccgaggacggttcctacaccggccgcgagaacaactgatctccgcatccttaacagacgaccgaccgtataaaggactaggacagcagcagtatggcacgttccaccgcgcgcaaaagggctctgaacaccctgtacgaagccgacgaaaaaagtcaggatattctcgccctgcttgacgagcgcatcgcacatcccggtgcccagaccccgcttcccgactatgccattgaaatcgtcaagggcgtggccgagcaccgtcgtcagatcgacatgaccctggacgaacactccacgggttggaaggtccgccgtatgggcgtggtcgatcgcaacattctgcgtatcgccgcttgggagattctgttcaacgatgatgtgccggacaaggtcgccatcgacgaggctctggcattggccaagaccctgtgcgatgacgattcgcccgctttcatccatggcctgctgtctgcagtgtgcaccgccaagaacgcagcaccggcaccggagtccgcggcagaagaggccgatgaggaatcgtccgattccgatgccgccgcatccgagccgaccgatgagggcgatgtttccgattcgcccgattcgtccggtgcatccgacgagtccgctgccccgtccgctgagattcagccgacggtcgattagtcatttgttgttcagcctccccattcgggaggctttttcatgggcggacacttgtgtcgccacacattctcaagtcggcaccttgccgacagccccgccagcggggtgagactttgcgcccaacggcgtgtgagtctgcgctggccgttaaccttggtacgaatacccgaaaaacataagggggttttggtgagccagaacgagtccgggaccatcgcaattccgatgtatgacaaggacgatgcagtcctcgttttggaagacggacaggtatatgtgggggagccgtacggcgccctcggtgagacgaccggtgagatcgtcttcgccaccggtatgaccggataccaggagacgctcaccgatccgagctacgatcgccagatcgttgtgcagacgttcccgcacatcggcgataccggcgtcaacagcgaagaccctgagtcctcccgcatctgggttgccggatacattgtgcgtgatccctctccgaacgtgagcaactggcgtgccgaaggcagccttgatgacgacctcgccaagaacggcatcgtcggcttgagccacatcgacacccgcaagctggtgcgtcacctgcgttccgcaggcgtgatgcgcgccggcatcttctccggcgacgccctgaccgaccaggccaccggcgcgctcaagaccatcgagcagctgctcgaagacgtcaagaacacaccgcagatgcagggcctgagcctgtacgacgaagtgtccaccaagcaggcctacaccatcgagccatgcggcgagtacgaaggcaaggagccgctgtacaccgtggccgccgtcgacctcggcatcaagggcatgaccccgcaccgcatggccgagcgcggctgccgcgtgcacgtggtgccctccaccatcaccttcgccgaaatcgagaacctgaacccggacggcgtcttcttctccaacggcccgggcgacccggaacaggccggccccgaaatcgagctgctgcgccaggtgctcgacgccggctacccgttcttcggcatctgcttcggcaaccagctgcttggccgcgcgctcggcttcggcacctacaagctcaagttcggccaccgcggcatcaaccagccggtcaaggatctgaccaccggcaaggtcgaggtcaccgcccacaaccacggcttcgcggtcgatgccccgatcggcaggcaggtcgacgcgccgtttgagaacggcaagtacggcaaggtgttcgtctcccacatcgatctgaacgacgacgtggtcgaaggcctgcagtgcgtggacatccccgcattctccgtgcagtaccacccggaggccgcagcaggcccgcacgatgcggcctacctgttcgaccgtttctgcgaacttatgaagaacaactccaaggaaggtaagtgatatgccgaagcgcaccgacatcaaatccgtgatggtcatcggctccggcccgatcgtgatcggtcaggctgcggagttcgattactcgggcacccaggcatgccgcgtccttcgtgaggaaggcatccgcgtcatcctcgtcaactccaacccggccaccatcatgaccgacccggagatggccgacgccacctacatcgagccgatcgccactccgatcctcgagcagatcatcgccaaggaacgccccgacgcgcttctgcccaccctgggcggccagaccgcactcaacgccgccatggcgctgggcgaggccggcgtcctgaagaagtacaacgtcgaactgatcggtgcctctctggaagccatcgaccgtggcgaggaccgtgaactgttcaagaaggtcgtcgacgaggccggcgccgaatccgcccgctccgacatcgcccacagcatcgaggaagtcgacaagatcgccgagaagttcggctacccgctggtcgtgcgcccgagcttcaccatgggcggcctgggctccggcatcgcccacaacgaggaggagctgcaccgcatcgccggcgccggcatccattactcgcccaccgacgaagtcctgatcgaagagggcatcgagggctggaaggaattcgagctcgagctcatgcgcgaccgcaacgacaacgtcgtggtcgtctgcccgatcgagaacgtcgacccggtcggcgtgcacaccggtgactccatcaccgtggccccctgcttcaccctgaccgaccgcgaataccagaagctgcgtgacatcggcatcgccatcatccgcggcgtgggcgtggacaccggcggctgcaacatccagttcgccgttcatccgaagaccggccgcatcatcgtcatcgagatgaacccgcgcgtctcccgttcctccgcgctggcctccaaggccaccggcttcccgatcgccaagatcgccaccaagctggccctcggctacacgctcgacgagattcgcaacgacatcacccagtccacgccagcctcattcgagccgaccatcgactatgtggtcaccaaggtgccgcgcttcgccttcgagaagttcccgggcgccgaccccaccctgaccacctccatgaagtccgtgggcgaggccatggccctggccggcaacttccaggagtccctcggcaaggccatgcgttccatcgacaagcgccacatgggcttcaactgggatggcgagaagccgtccgccgaggaagtggccgaactgcttgaggccatccacaccccgaccgaacaccgttacctgcagctcatgcgcgccatctggggtggcgccacgctggagcaggtgttcgcggccaccaagatcgacccgtggttcctgaagcagatcttcctcatcaacgagaccgccatgacggtgcgcgaggccgaaaccctcaccccgaagctgctcaagaaggccaagctcgccggtctgtccgacgtgcaggtggcccacctgcgtggcttgggcgatgaaggcgagaacaccatccgcgagctgcgctggacctacggcctgcgcccggtctacaagaccgtcgacacctgcgccgccgagttcgacgccgccacgccgtactactacagctgctacgccgacgaaaccgagctgcgcccgcgcgagcgcgaggccgtgatcatcctcggctccggcccgaatcgcatcggccagggcatcgagttcgactacacgtgcgtgcacgccgtgcaggagcttggcaaggactatgacaccatcatggtcaactgcaacccggagaccgtctccaccgattacgacatgtccgaccgcctctacttcgagccgctcaccttcgaggatgtgctcgaaatctacgaggccgagaagaggatgggcccggtcaagggcgtcatcgtccagctcggcggccagaccccgctgtccttggccgcgcgtctgaaggccgccggcgtgccgattctcggcaccaccccggaatccatcgatctggccgagaaccgcgagctgttcggcgaggtgctcaagaaggcggagatgaacgccccgcgttacggcaccgccctgagcctcgaagaggccaaggaagctgcccaccgcatcggttacccggtgctcgtgcgcccgagctacgtgcttggcggccgcggcatggaaatcgtctacgacgacaagcagctcaccaagtacgtggaccgcgcgcttgccgaggccaaggccgataccgtggtctccggccgcctgccctccccgctgctcatcgacaagttcctgcaggacgccatcgaaatcgacgtcgacgccctgttcgacggcgaggaactgtacatcggcggcattatggagcacgtcgaggaggccggcgtccactccggtgacgccgcctgcaccctgcccccgtccaccctgtccgacgaccagatccgccgcctgcgcgaaggcacctacgccatcgccaagggctgccacgtgcagggcctgatcaacgtgcagtacgccttcatggccaacacgctgtatgtgatcgaagccaacccgcgtgcctcccgtaccgtgccgttcgcctccaaggccaccggcgtggcgctggccaaggccgccgcccgcatcatggccggcgagaccatcgccgaccagcgcgccaacggtctgctgctgcccaagggcgacggcggcgacatccaccccggccagcaggtcgcggtcaaggaatccgtgctgccgttcaagcgcttccgcaccccggtgggcaagaccgtcgacatcctgctcggacctgagatgcgctccaccggcgaggtcatgggcttcgaccgcgacttcccgcacgccttcgccaagagccagctcgccgcctacgatggtggcctgccgacccacggcaacgtgttcatttccgtgaacgacaccgacaagcgtcagctgccgctgctcgccgtgcgcctcgaagagcttggattcaagctctgggccaccgagggcaccgcctccgtgcttcgccgttacggcatcgagtcgaacatcgtggacaagatcagcacccgcgtggacaccgatccggaagccccggtcgaggtgcatcacgccgccggctccgtgggcaagaacgtggttcagctcattgaggaaggcaagatcgacatgatcctcaacacgccgaactcgcgcggctcccgttccgacggctactccatccgtgctgccgctattgcagccgatctgccgcagtttaccaccagcaccgagttccaagccgcactgctggctatcgaggccgtgaagcataatgattatcagatcatgagcattcaggagcattcgaagcagctgttcgaattggagcgacgggagttctgatgactacacccagcagtgaggaattgcaggcacaacgttcggatttcggtctgcgactgagcaattcaatggccaaatacggaccgctgtgtgtgggcattgacccacatcgcaagctcctcaccgactggggatacaacgtcgacgccgaaggtgccgaactcttctccatgcgtatgctgcaggccgccaacgggcgcgccgcagcagtcaaattccagacgtcgatgttcgagcgctacggagccaaaggtttcgaagcgctcgagcgtgtgctctacgcggcacgacaaatgggcgtcatcaccatcgtggactgcttgcacggcggcctgtccaccacgatttccgccatcgcggacgcctatttcaagcccggtgcaccgttgctggccgacgccatcacgctgctgccgtactatggcgcgcgctcgttgaacggcttgattaccgaagcgttggaaaacggacgcggcgtgttcatcgcctccctgacttccaatccggaaggcatgagtctgcagaccgcgttgcgtcagagcggcgattacaagggacgtaccgtggcctacggcatcgcctccaccgcgcagaagcataacgtggatatcgaaggcatgggctcggtgggtctgatcatcggtgccaccatcggccaatggatgcaggattccggcgtggacccctccaagttcaccggtccgattctttcccccggttacggttggcagggtgccgaggccaaggatctgaaaaccgtgttccgcggtacgcgcggcaacgtgctggttaccgtgtcccgctttatcgcctcgcatgggccggatatcgccgcactgagccaagctaccgagtcgattgcgcttgacgtacgtcagtcgctgatggaagccactgccgaaggcgcagaaaaccagtaatcagaacggaatcagatgtcgcggcatgcgtacgtatctatctcattgcatacgtcgcatcacgattcatattcttccctgttcgtcggggctgtaacagttaccggtcatctcgccggtgagccgttaccacattggattcataatcgctgcacaccacatcatctccggaggaacccatgactgaaaacacccatgccggccgtctaatcgtcctgactggccctaccgcagtaggtaagggcaccgtggaagccaagctgcgcgccgaccaccccgaagtgtgggtgtccgtctccgccaccacgcgcgctccgcgccccggcgaggttgatggcgtcaactactggttcctcaccgaagacgagttcctgacccgcgaagcggcgggggagttcctggaaaccgccgtggtgcacggcatggcccactacggtacattgctcaagcctgttgaggagcatctggctgccggcatgccaacgattctggaaatcgatttgcagggtgctcgccgcgtcaagcagcgcgccgccgaactcgacttggaagtggtgtacgtgttcatcgcgccgccgagcttcgaagagctcaagcgccgtctgatcggccgcggcaccgaaaccgccgaacagcaggcccgacgcttggaaaccgccaaagtggagctcgccgccgaaaacgaattcgacgtcaccatcgtcaacgaaaccgtcgatcaggccgccgccgacctctggtccgtcatcgccaaagaatacgggctgtaactaccgctttaccaccaactgctggtggaggatttcggtgctgtttttggccggggattgcttccagcggatcgcttcggattcgtgatgctcggtgacataatgccgcatccattcgaagcactgctgggtttggatggcatcgcttaatgcgcggtgctcctcattgtccgcgatgccgaagcgtacgatcaggtcggccagacggtgatgccgctgcgcggggaacagggcgcggctgatctgcatcgtgtcataatccgcgcaggcaaagccgcagccggcgatatgccgggtgttgtaatccaggaatcgcagatcgaagctgacgttatgaccgacaatcggctcaacggtgggaccggcagccggggtagcgagccatgcgatgaatcggggaagcacctcgtcaatcggatcgaggtcggccaccatcgcatcggtgatgccggtcagcgtggtgatctgacgcggaatcggccgcaagggattcaccagctgctggaattgatcgacgatatgcccctcccgcacgcgcacggcaccgatttccgtgatggcgcaactgttcgggtaaaagccggtggtctccagatccagcgccacataatcggtgggaaagagggcatcgtccatggcgattcgcccgccggcaccatgattgggctgggatggttggccgaaaacggtaatgccggaagtggtcacggaggctcctcatatcagtcggtgttcggtgacttattgtaccggcagcccggtctgacggtaaaatttttccctcccggattttctcggatatattggttaggcggccggcaacatgcggcgcatcgggaagggagcacagctgatgaaacagatagtggcaggcatcgtggcgcatgtggacgcgggcaagaccacgctgtccgaggcgctgctctaccgtaccggtgagatccgcaaattggggcgagtggatcacggcgatgcgtttctggacaccaattccttggagaaggcgcgaggcatcacgattttcgcgcaccaggcattggtagaacacggcgacctgcgcctgaccttgctggatacgccggggcacgtggacttcgccgccgaaaccgaacgtgtgctgcgtgtgcttgactacgcgattcttgtggtctccggcacggatggcgtgcaaggccataccgagacactatggcgtctgctggccagatacggtgtgccgacgttcatcttcgtcaacaagtgcgacgccgccagatttgcccgcgaggccgtgttggctcagttgcgcaggcgtctgagcgatgcgatatatccgttgccggcaatgggacagtccactgagggcagcgcgctaccgttggacgcgttcgccgaagacatcgccaccctggacgaggaggcgatgaacgactatttggaacatggcgcgctgtccgtgggcagattgcgatcgatgatcgccgtacgcgagctgttccccgtatatttcggctcggcattgaaactcgaaggggtcaaggaattcctggacgggctggagacgttcacccgcgaacgtgaatggccggccgccttcgccgcacgcgtgttcaaaatcgcccacgacggtcagcacaaccgtatgacgtggctgcgcgtcaccggcggtgcgctcaaagccaaggagatcgtctcctcatcctcgtgcgccgcggcgtcgacaccgtcgccagcgcaggaggatgatgacatggcgtggtccgagaaagtcgatcaggtgcgcatctacaatggcgccaaattcgagacggtcaccgaagtgccggccggctcggtatgcgcggtgaccggactgacgcggaccttccccggcgaagggctgggagcggaaccggacgccgaatcgccgtcgctgcagcccgtgttgacctacacggtgttgcccgccggagctgaatccgatacggccggcacctcgggagcggccaaacgcggtggcaccggccatgacagcgtgaatcgggacgatgccgagcatgatgccgccaagtcgggaaccggccgcaatgaggagaacgacactgccggccaagacgcagagacggacaatagctcgccggcccttccccagttcgatgatctgaccttgcataaggtcatcaccgcattgcgtgagctggaagacgaagacccgttgttgcatgtggtgtgggtggaacggctggccgagattcatgtgcaattgatgggcgcggtccagctggaaatcatccagcagaccctgcacgaccggttcggtctggatgtgtcctttggccccggctccatcctgtaccgtgagaccatcactgcgccgatcgaaggcgcaggtcatttcgagccgctccgtcattatgccgaagcacatatcctgctggaaccaggggagccgggcagcggagtcactgtggcctcggccctgtccgaaaatgatttggaccgcaattggcaacggctgattctgacccacctgaccgagcgtgagcatctcggtgtgctcgttggcgcaccgctcaccgatatcaagatgactttggtggccggccgcgcgcatctgaagcacaccgaaggcggcgacttccgtcaagccacgtaccgggcgattcgccaagggctgatggaagccagggcaggagtcagtggccggcccgagacgccggtcgagagccggccggacaccacaggggagggcaactgccgactgctggaaccgtggtaccggttccggctcgaagtgcccgcagacatgatcggccgtgccatgagcgacatccagcgcatggccggcagcttcgaatccccggtcaccgatgacgaatacgccgtgatcgaaggcgaggcgccggtgtccgaaatgcgcgactatgcgatggacgtgaaccagtacacgcacggccatggccgtttctccgccaccttcggcggctacaagccatgccatgacgccgaacaggtcatcgcagccgccgcctacgatcccgaagccgatctggacaacacccccgactcggtcttctgcgcccacggtgccggctaccccgtcaaatggtacaaagtgcccgaattcgcccacgtagactacgtcatgtgaggtggtgactaccaaatctgcggccgaatgaatccgttggcctccaagaaccgttgaatatcgcgcatttccggcatattgatcgaatgggccatgcccggatacacttgttcggtcaacgtgccgtgctcgcgccagaactcacccatcgccgtcacatcggctttcgggaagatgtcgtccgcagcaccatgcccgtagaacacgggcggcttcaacgaagccaattcggcatcgcccgcaacggaccccggtgccagccatccagagcaggagacggctgcggcatatcgcttcggattgaaacgcagcagatgcgcggccaagaggccgccctgcgagaatcccatggcaaccaccggccgagtggcgggaatatgctccgcaacccatgcatcaatggcttgggcggcctcagccgcctgcttgtccaacgattcgccctccggcacaccctcatgcgcccacgagccgaaccatgtatatcccatgccataggcgatgggtgcctgcaaactggcataatcagccgaaccggcaccgcaatagttcagcagatcgggcaaatcgtattcattggaaccccagccgtgcagcagcacgaacaccggggtggtttcaggaccggtcaaacgggtcaaggccttggcaatcttcatggctcccagtgtatccacgtgaccgccgcgaccgcatttgaacggtccataagcaacccatatagcaacgccgttccattcaagtgtccgatacgttatcgtcgtagacgtgccgcacggggaacggcctcgtgcacagcagccatagagaacaccataaagggggtgcgcaatgaccaggttcaatactcagctcgtccacggactgccggttggagacaacaacaccggagccgtgaacccgccgatctacaactcaacgacatatgccttcgagaaggtcgacgcgatgccccgttacgactatgcgcgcagcggcaatcccacacgtgacttcctggaacagcagatcgcccagcttgagcagggaacgcgcggttttgcgttcgcctccggcttggcggcgattcatgccgtgctcagcattttcaagcccggcgaccgtattattgtaggggacaacatttacggtgggtcgtattcgcagctcaatgagttctttacccgttggggcgtcgtggtcgaatcagtcaatacccaggacattgcagcgttggaggccgccgtcaagggcgaccgcgcgaacggcatcgcgcctgcccaagccgtctacttcgaaaccctgaccaacccgctgctcaaagtcaacgacgtgcgcgccatctccacggtggcccaccgttacggggcgctgtcgatcgtggacaacaccttcgtgaccccgtacctgcagcagccgctttccctcggcgcggatgtggtgattcattccgccaccaagtacctggccggtcactccgacgtcaatgccggtctcgtggtcgtctccggtgaggatttggccaatcgcgtgtacttcgcccagaaccgtcttggaggggtactggcgcccactgaatgcgattcggtgcgccgcggcatacagacgttggccttgcgtatggatcgtcagcaggaaaacgcgaacgccatcgcccggtatctgctcgctcacccattggtcaaatccgttcactatccgggattgcccggtgccggcgatcagcggctcgcagccaaggggctgaagggcgccggtggcgtgctgagcttcgaagtggtgcctggcgtggaccctgcggatgtgctcaacaacctgcacatcttccgattggctgtgtcccttggtgccgtggaatcgcttgcggaactgccttgccgcatgacgcatttcgaactgccccgggaggagcgtctgaaggtcggcatcaccgatgagctggtgcgtctcgccgtcggcatcgaggatgcgaacgatctgatcgaagacctcggacaggctttcgatatcgcctatgcccgatacagggaacgccacatcgactccgatgtattcggcgcattgactccgaaggtgttcgcctgatgcgatatggccgtatgtgccgttacgatggacgcgatgagacggccgcggacgaagcgcggcatgcggaaaggacatggcatggccattgatgtgtacggcgccacatggtgtggtgattgccgtcaggcgaagaacacgttggatgagctgggtgcggcgtatatctggcataacatcgaagaggaggacggtgccgccgatcgtgccgtggccatcagcggccagcagcatattccggtggtgctgtacgatgatggctccttccaggtggagccctccgccaaggacatcaggaacaagctgcgggagttgaatctgctgactgactgattggcagggctctcttacggcatgaggcgtgtgccaccgttggattggtggcacacgcctcatgcgttgttgcggttgtgtgtggaccgtacttacaggcttctgaatcgcgcctggccgatggtcacatcgaaggatttgccggcgggggcgtcgtactgcaattcggtgatggcgttgcattgaccctggacgaagcgccagacacgatgccctcccacatcgagatcgaagtagtgctcatcgggccggtcggcgtccccgccttccgtgagacccaaaccaaacacgtcggaccagtgcgcggccaccgccgcggggtcgggcaccgcgaaaatcgcgcgacgggtgtccacttcgccgatggcatgccggtgcagcagtccgccgctctcgtaacgggccagttgctcggattcgctcgcaccccaatcgatgacgaacggatagcgcaggccccgatcatcgcccttgatccatagcaaccgccagcgtatctcctcaccggcggccgtcgtgcgattgcccggaacgatatggccaagatcaaggcctttggccgtgagccgttcggccgcctgttcgatgccatgcacgtgcaatgccggacgatagaatcccacatacccgggcagcagctccccggcttcatggaatatcagcccatggtccggcgtctccgacaaggcttcctcgcggtcgtacaatgccaggaactccaaatagttatcggcgaagtaggccagggagttctccgtgccatgccccacatgcttgccgccgtattgggaagtcagccctgcgtcggcgaacgtccgttcggcggacttgaggtcattcacgaattcgaccgtatggtcccaggtgaattgttgcgtcatgatcggctcccgcctttactttgcatcgccgccgagcgccgtggtgcgctcgaccgccgccagcaccgcggattgtatggatgccgcgaatccggttttgttcagggtatatgcctcggtgattcccactccgccgggggagttgttgatattgagcagcacttgaggcagcacgtctttctgtttgaggaattcggtgccgccgatgatggtgtcgagcgcgatggctctggccgcgtcccggggcagaccggcaagcacaccggcatccacgtaggcgtcgatgaaatggtagacgatgttcggcgggtaaaaaccggtgattacgtcgataagtcgttcctcgacatacagcactttgccgaaagtgttgaggaacgcatccacgtcctcgcgtgccgcggccccattcagcgccacgccgctgtaaccgtaatccacggtggtgagtgtgttcgggatgatgcgggccacacgccacccatggccgagcccttgctcaagcttggcgatggtatagccggctacgatggagatcaccgtggtcttcgccgggtcgaaacgtcgcgccactgaagcggctacgccggcgacatcgtcttgcgggcgcaccgcgattaccacgatgtcggcatccggggcgtccgtcggtgacgccgtctcggtgttgtacgtggatgccagatattcggcgcgttcccgtgagatttcctcaacccagatgtggtcgaccggatatgcggcggccttacgtcgcaccgcttctatgatggcgctcggcatattgcctccgccgatgaaatacaggtttgctcccatcggttcacctcttctgatgatggatacggatgtatgtcagttcccgtaataccgcatggattcccgaaccgtcgtcgtcccttccgaaatggcatataggtgttcttgataggcgcttcaaggatgcaatgatttcgcggatggataagacgctataagaaatgcctgtaatacgtgggcggcattccgcttgacatcggcatcgccgatgcgcttcgatgacggataacgttgcgaatcaggagaagggaccccaatatggtcaatcgtcgcgccgacttccacgccatcgtcaatcatcagtcccggacgccgtatctggttagcgcctggcagcatcttgtcggtcatgaatacggtgccgaggaattcgccaaggccaccatcgatttcgtcaatcgctgggattgggaatgggtgaagatcaatccgcgcgccatatactatgccgaggcttggggctctcggtacgatcgcaacgattatgccggattcgtgctgccgaagaagatcagcggcgcaatcaccgaaccggatgatgtgcgtggagtcaaggaactcgacgttcgtgacaatgagtatttcgccgaggctctggccgccgccgcccttatccggcatggccttgaggatcgtgccgtgctgcagaccgtcttttcgccattgtccgtcctgctgcagatcgccgatctgccgctgtacccgggtgacgattacgccaccgcgacgctccgcgtcgaagatctgatcttcgatcagcctgatgtcgccaagcaggcgctcgccaacatcgcccgcacactcgcctcctatgcgcgtgcgttggttcgtcccgaatccgaaggcggagcgggactcgacggcgtgttctacgcgctcaccggcacggtgagcgagggttatttcgacgcgcaacgctatcttgaattctccgcaccatacgatcgcatcgtgattgacgcggtgcatcgcgccaacccggacgccgtggtgctgctgcacacctgtcgtgctgaatcccacccgaattggttcgacgtgaagggtgtggacctgctgcagtgggatcagtatcaaccgggaaacccgcaggtggatgccgacctgacggctgtgccggtcgccggtgccccgtacgacctgttcgcgccggacggtgacgtcgaacaggtgcgccgcgaattggccaagaccatcgcgcttcgtacgggcaaaccgtttttgctggcaccaagctgcacggttccgaccccggcgggcgacgaggcgctgcaggcgttgagcgacatccgcgtgggctgagccggtccccattcacgcttcatgactattcgaatagagaagggaacatcatgaccatcaagacaatcatccgtacggcgatcgcatccgtggtcactgcgggaacactgattggcgtctccgcatgcggccttggcggggatgccgccagcggttccagcgacgacaccgtgaacatcggagtcatctatccgaagaccgggcaatatgcgcaatacggcaaactgttccagcaaggcttcgatctggcggttgccaaggtgaacaaggatggcggcgtcaagggtaagaagcttggtcttcgatactatgacacgcagtccgatgccaagcaagacgccgcggtggctcccaagatcgtgtcggacaagtcgatcatcgccgtggtgggtgactatgcctcgcccgcatcctcggccgcgtcgcccatcttccagcaggccggcctcgtgcattacggtttcaataattcggcacccacctttaccgataccggggaccacgtatggactccccaaatcggtcaggacaagtatcagaagaccaacgcggatatagtggccaaaaaagccaagaagatcgcggtggtctacatcgagaacgactggggcaaacaggcctatcggtacttcaagcaggaggccgagaaaaacggtacccagattgtgtacgagtccagctatctgcccgactccaccgacttgtcgccgattctgattccggcgcgcgatgccaagcctgacgcggtggtcgacatcggctacgggccggacggcgctctggtgatcaataccctgcgcgacaagctggggtacgacggcctgtacttcggtggtcaggaaaccaaggagttcctcgatctcgccggcaaaaacgccgagggttcgatcatcaccggatccttctccgccaccggcaccaaggacgccaaggcccagcagttcgtcaaggacttcaaggccaagtacggcaacaacccgggcaatttcgaagtgaccgcctacgaggcgatcatcgatctggcctatgccgccaacaagaccgaaccgacccgtgaaggcatacagaaggcgctgcagaccgtgacggatttcccgctctaccagggcaatggcggcacgttcaaattcaatcggcagagtcgtcgcgccgataacatcgatccgattctgctcatcgtcaaagatggcaagttcgaacaatacgaaggttgattccccgggctttcccatacaccacgaacgaggtaacgcacacaatgtttgatgttcttttcgccggactgatacacggcagcgcctatgcgctggtcgcagtcggcatgtcgctgatcttcggcgtcaccaacgtggccaacttcgcccaaggttccatcgtggccgtgggcatgatgatcgcctggtggctcggttcgtcatggggatggggaatcgtgcccacactcgtggcggtgctcgtggttaccgcactgctggggctgatcatgaacgtggcgatcatcgctccgcttgaaggccgtaaaccgattgcggcgctgctcgccaccattggcgtcggccaggtgctcgacaatggtctgcaggtcgtcttcgggccacagacccgaccattcccgaaactgctgcagacctataacctgcaagtcgccggcgtgcgtttcggcacttcggacatcgtgatggtgacgcttgccgtcctctcgatgcttggcttatgggcattcctcaagttcggcaaagcgggacaggccattcgcgccacttcccaggatcccgaagccgccatgcagatgggcatcccggtgaaggccatccgtaacctctcctttgtgatcggtgccgtactcgccggcgtttccggcatcttcgtgggcttgttcaacggcaacatcaatccgatgaacggcggcaccattggtatgacggcgttcgtggcggccacgatcggcggtctaggctccatcccgggagctgtggtcggcggtcttgtgctcggtgtggtggaagcgttcggcatctctctgttcggagacggtgcgcatgacctcatcaccttcggcgcgttgatcatcatcctcatcgtgaagccgcagggtctgcttgggccgaagaccgatgtcaaatccgagccgcttaccggcacgttcctgggaggcggcagggcgatcgcgctgccttggtggggtaatctcatcggtgccgtggcactcgtatccaccccgttcttcttcaatgactacctgtccggcgtgggcactcaggtcgccatctatgccatcgccgccgtgggactgacgttgatttccggctccgcaggccaaacgattctgggcatggcaggaccgttcgccgtgggtgcctatgcctccgcgattctggccacgcaggcgcattggcccttcctggtggcgttgcccgccgcaggtgtgatcgcggcgcttgccgcctcggtgctcaccttccccgtatggaggttttccggccattatgtcgccatcgccaccatcggcgtaggtgcggtgatggtggcgatcattcgcctcgccgagccgttgaccaaggggtctcttggcattcagggcattccgttcccgaaggtgttcggcgtcacgctgtacacgcagcagatgatgtatctgcttgacgtgatcgtgctgcttgtcacgttggtcatcgtcatgcgtatccgaaccgctcatctggggcgcgtgttcgaggccgtgggatcggatcgcgaggcttcggaggcgctgtccatccgcactggtgcctataaggcgctcgcgtatgcgcttgccgcgtttttcgcaggtctcgccggttcgttgctcgcgcaccagtacacgtacattgatccgacgatcttcaactcgaacatgtcgattctcatcctgaccatcatcgtgcttggtggtatgaactctccgctcggcgcggtgcttggctccatagtgctgatcggagcgcccgagttgctgcgtttcgcctccgacgcgcgcatcctgctgtatggcgtgctgctggtgcttgtcatcttgttccgtccccagggcctgttcgcccggaaaggctgagtcgccatgaccgattccgagaccgtattttccaccgtagacgccgtgaccggcatcgatatcgacaacgaacgcctcgataacgcggatgatctggctgaatattccgaaagacaccgccaggccgtccttgacgcgccggtgatgctgcgcgtgcgcgagctcgacaagtccttcgaggggctgcacgccgtcaacaaggtctctttcgacctgcatcaaggtgaggtcatttccatcatcggcccgaacggttcgggaaaatcgaccacaatcaacctgatctccggttttctgcagcctgattccgggctcatcgatcttgccgacgagccggttgccggtctgagccctgcggacatgtctgaacggggactgctgcgcaccttccagaacggtcgtgtgttcggcggtcttaccgtcgaagagaacatcaatctcggatatcaccggcgactcgtcgcggcacgcccgttcaaaagcctgcaaaggtatccgatcgcgcgttggctgtcgttgctcgccgagaccggcgtggcgctggttcccggaccgcggactcggcgcgaagccgatgaggtgaacatccgcgtggatcgggaaatcgaccgtttccgtgaacgactgagcgcgcgtcgatgggattgcacctacacgttgtcgtacgcgaatcgtcgtcgtaccgaaatcgcccgtgcccacatcagcgaaccgaagatcctgctgctcgatgagccgaccgccggcatgaaccagtcggagaccgccgaagtgcttcgtcaactgcagtatctgaaagcgcagggacataccatcctattggtcgagcacaagatcgatctggtcactgcattgtccgaccgtgtgcttgcgatggatggcggccgcgtcatcgcgcaaggcgccccggatgatgtgcgcaatgacccgcaggtggtcgaggcgtatctcggcaagcggcgtgaaatgaaccatacccgggtcgccgggcagtcgcatgtgcttgcgatgcagaactccattggcgccgtcgtcgaagtcgagggcaccggtgccggtaccggacgagatgaaaccgggacgttggatgatggcggggatgccctgcttgcgctcgatggagtgaatgtgtattacgggcaggtccacgcgttgcagaacgtgtcgatctgcgtacccaaaggggccatcgtctctctgctgggaggcaacgcttccggcaagtcgaccacgatgaagacgattttgggcatcaatcatccgaagaccggttcgctgtggttccaaggcgaggatgtgaccggactgtccacgcgcagacgggtccaagccggtatcgccgccgtgcccgaggcgaggcgcgtgtttccacagatgacggtggaggagaatctgttgtctggtgcctatacgcgacacgacagggagggtgtggccggcgatctggaagccatgtacgatcgtttcccgcgtttgaaggaacgtcgtatgcagcaggccggcactatgtccggcggcgagcagcagatgctggcgttcgcgcgagccctgatgagtcgcccgaaaatcatctgcatggacgagccgacgatgggcttgtctcccaaactcgtcgaagacgtactcgaacagatagcgcgactgcgtgacgaattgggcgtttccgtgctcatggtcgaacagcaggccgagctggctctctcgatcgccgactatggttatgtgctgcagaacggacgtatccggctgcatggcaaagccggcgacctgctcggcaacgagcgggtgcaggaggcgtatttgggaggagtgaaacaatgagcgaagccgaagggattgagatgtcctcgcatccgtccgtcatcgccgtcacgcaaaggaggttccggtgaccgcagcaacaacccgatcgggcgcatccccgacggcgttcgtaacacttcccgatgctctgaacgctgatgtgcaggaatggtaccgctggttccatcgtcatcctgaactctcctatgaagagttcggcaccacggcgcgcatccgtgagattctggaatcgcatggcgttgaaatcctcgaatcgggactcaggaccggcgtggtggccatcgtgcgcggcgcaagcgccaagcccgtcatcgccctgcgcggtgacatcgatgggctgcccatcaccgagaataccggacttgactacgcttcggataatgccggagtgatgcacggctgcggtcatgacttcaacctcaccgtggcgttgggcgcggcgattctgctcaatgaacggcgtgcctcattacctggtaccgtcaagatcatcttccagccggcagaggaaggtcgtgccaccgcggagcgccccacgggttccgtgcaggtgctgaacacgggtgtgctggacgatgtcgaggcgtttttcggcacgcacgatgcagccggaccggttgggtccatactcatacgtgagggtggcatcaccggcgcggtcgacaaattccaggttgccattcacggcaagggcgcgcatgcagccgaaccggaggatggcatcgacccgatcaccgtgctgacgaacgtggtgcaggggttgcaggcggtcattgggcgcaatctcgaccctcgccatccgcgggtgttgtccgtcacccatatagaagccggcaattcgtggaatgtgattccgcaggatgccttcttcgaaggcacggtgcgcactaccgagccgcaggaccgggtcctcgccaagaagcgcgccatcgccatcatcaacaacacggccgccgcctacggtgccactgccgatgtctcgtggttcttcggatcgccttccgtgttcaacgacgccggatggacccgcatcggacgagaagtcatcgccgagcaggggcttcacgcggatgatgatcatcctcaactgggaggagaggatttctcatattaccttgatcgcaagcccggcctgttcgtgcacatcggtgccggtgagaccggtgccgcgcatgggccgacgttccggccgaatccggccgccatcggctacggcatacgctttctcacggccatcgcgcagaaagcgctcaacgagttacgatgaacgcaccccacctatcattccggctgataccgaacgataagaaatgcctgtacccgcaagcacgtgttacggtgcttcgcttcctacactggtgccgtatcagtatgggcgtccgtcggtgtttcctaagggatggcggcatgacattgaggggataatccatggcgagggatttcgttaccgcggctattcacggcggctatgaccgggcggctcacggtgaggcggcgaacccgccgatttacgccagtgcggcgtttgacatggtcagcgccgcacatggtgacgcactgggtgccggcgaagccgagggcttctcgtactcgcgtgtggcgaatcccactgtggatgtgttcgagcgtcgtttggcggaactcgaaggtggcgtgagcgcggtggccgtcgcctccggcatggccgcggtgtcgtatgcgctgttgtgtgccgccgaaggtggtggtcgcatcatctctccgaccaacctgtacggcgcttccgtcgatgccatggagaccttcttcccgcagttcggagtccatgccgatttcgtgcgcgacatcaacgacctcgatgaggtcgcttcgaaaatcgggccggacacccgcgccatctacaccgaatccgttgcaaatccatccactgaaatcaccgatattgaaccattggcggaactcgcgcatcgcaacggtattccgcttatcgtcgacaataccgtgcccaccccgtacctcttccggcccatcgagttcggagccgatatcgtggtgcattccaccacgaaaggcatcaccgggcacggcaacgccatcggcggagtggttatcgacggcggaaacttcgattgggccaacggcagattcccacagttcaccactcccgaactggtcgtcagcgatgaacgcaaaggaatagcgcgcagcttcgccagcagattcggccgcgaggcgttcattcgccgtgtacgcatcaaatatctgcgcactttcggcgcggtgcccagcccgttcaatacatacctgtcgatggtgggattggaaacactggctgtgcgagaacggcaggaagtcgaatcggccacgcgtattgccgagcatctcacgcatgcgccgcatgtgctcaaggtcaattattccggtttgggcaacacgggtcagtatgatctggtcgccaaatacttccccaaaggaatcggcacgatactgtcgttcctcgtcgacggcgatgagaacaacgtgagacgaatcatcgacggaaccgaggtattctcctatgtgccgaacatcggagacgcgcgttcgctgattgtcgatcctgcgcgcatcacgcatcgcgaggttcctttggatgcgcgcatcgccgccggagtcagcgataatctcatcagactttccatcggattggaaaacgtcgatgatttgattgcggaccttgaccaagccattgccaacgcatactgacgtgtatcgcttacgtatgcggataattgttcgttctgagaaaaacctgcgctgttattcttggggcgttgtgaatttgggttgttgtattacgaaagaaggaacaggacatggctattgacgtctatggcgcaacatggtgcggtgattgcaagcaggcgaagaacacgcttgaggagcttggcgccgaatatacgtggcatgacatcgaaaccgaggatggggcggccgatcgtgcggtggccatcagcggccagcagcacattcccgtggtgctctatcctgatggcactttccaggtcgaaccgtcggctgtggatatcaagaacaagctcaacgagctgaatatcaagtaaagacaagagttgtacgagtttgacgatctgctgcatctgtgagcgaacaatacgtcggcgtccgatgtgttattcattggtgtgaatagcactccataggcactggatataaccacgccgaaacacaggtgagcaagcgcgtctacggtaagggattgtgcttcgcgaacgagcgttgacgtgcataacagcagcgaaaagggagtatcgggatgattcggattaggggagtgagcaagagctttgccgacaccaccgtgctggatgggcttgatcttgacattcctcgacaaaatgtggttactgtcatcggcccctcaggctccggtaaatccacactgttgcgcattctggatttccttgagcacgcggattccggtaccgtcgatttcggtgatggtcttgtggatttgaccactaccaaatctgccgacattcacaaggtgcgttcgaaaatcgggttcgtgtttcagaactacaacctgtttttgaacaagacggcattgcagaatgtgaccgaaccgttggtgtattccaagggaatcaagcctgatgaagcccgcaagatcgctattgagcaactcgatcgtgtgggacttgccgattttcatgatcggtatccgagcacactgtccggcgggcaacagcagcgtgtgagcatcgcccgcgccgtggctatgaatcctgagctgttggtgcttgacgagcccacttcggcattggatccggaaatggtcaacggggtgctgggggtcatcaagcaactcggtagcgaaggcatgaccatgctgatggtcacccatgagatgcggttcgcctatgaggcatcgaatcatgtggtgttcatcgaaggaggccatgtggtcgagcagggtgatccgaagcggatcttcgaacatccgcaggaggagcgtaccgtcgagttcctgtcttcaaccaacaatgtgctgatgattccggtgactcggtagaggcgtttcacggctgttgtaattaattgtgacaatatcaagagaagggtttgtcatgttcaataatcaagtgattcgcaaggctgcggctttgctgtccggtgtcgccgtgctggtttcggttgccgcatgcggttcggcttccgcttccaactccagtgcattggagcaggtcaagcaggccggcaaaatcgtgttcgccactgagggcacctatgctccgttcagttaccatgactccaaaaccaatgagctgaccggttacgatgtcgaggtggccaaggccattgccaaggaggtcggtatcaaggccgagtttgccgagggcagcttcgactccctgcttgccggtgtggatgccaagaagtacgatacggttgccgatcagatttccgccaccgacgagcgcaaggccaagtatgatttctccgaaccatacacctactcctacggtgtcgtcattacctccaaggagaacccgaagaacgtcacttcgttcgatgacgtcaaggggcttcgcgccgctgaaaccggtacctccaactggaacaagaccgctcaggagaagggcgctactatcgttcaggttaacgatttcggtcagcaggtcgatgccatcacgtccggtcgtgcagatgtgtcattgaacgatggccttgctgcgctcgactacctgaagcagaagccggatgcggacatcaagattgccgccaagtccgagaagactccggccgcctacctgccgttccgcaagggcagcgatgacttggtcaaggaagtcaacaaagccattgtcaagctgcagaatgatggcacattgaccaagatctccgaaaagtactttggcgaggacttctctcaggagtgacatgtttcccggctctcctgtaattagggggagccgggaaatatgagctggcctcgtgaagattacgagcagacgcaacatataccacacaacaaaggatgaccaatggacgcacgagtatggggaatagtcgtagattcctttgctaagctactgattcccggtatcactgtgaccattccgctgacgctgatttccttcgctctcggtttgatactggcgattgtggtggcgctggtgcgtgtggctaaagtacctgtggcctcccaaatcgcgtggttctacatttgggtgtttcgtggtacgccgttgctggtgcagttgttcgttatcttctttggattgccgtccgttggcattacgattccggcattgccttccgcggtaatcgcgttctcgctgaatgtgggcgcctatgccgccgaaacattgcgtggtgcgattcttgccgtgcctaagggacagcttgaagctggcttggcggcgaacatgccgtatgtgacgattatgcgccgcattattctgccgcaagcattccgctccgccttccctgcattgttcaactccttcatcgcattggtcaaggacacgtctctcgcggcgaacatcaccgtggtggaaatgttcatgacggcccagcgcattgtggcgatttactacgagccgctggtcctatacattgaagtgggcttgatctacttgctcttctgcacgttgcttggatggcttcaggattactgcgagaagaagctcaacgaacacttctgatgtgtttatatggcggcagtgcttgattcaagtcgggtgtttccttggctgaaatgcccgactttgttgtttctgacgtgcgacttggctgatccaaacattagtgcacaagatgtggctgccggagtgaacggaacatgaaatctgacgttcgctttcttggacttgcctgtgagagctatcagttcccgggcgtgcgatggtagcatggatggtgttggggcgcggcacaacgatatgccgtgcttgacccttgtgagaggagttttatatgaccatcgcaagtatgttgggcggaaccatgctgttggtgctaattctattagtcgttcttatcgtgctgctgggcgccgcattgttcatcgtgccgcagcagcaggcctacatcatcgaacgcttcggcaaattcctgaaagtccagttcgccggcatccacatccgtatcccgttcgtcgaccgcatcgccatgaagaccaacatgcgcgtcaaccagctcaacgtgcagctggagaccaagacgttggacaacgtgttcgtgaccgtcgtggcctccacccagttccgcgtgaacccgaacgacgtggccaccgcctactacgagctgcgcgacccggctggccagctgaggagctacatggaggacgcgctgcgttccgccattccggccctgaccttggacgatgcctttgcccgcaaggacgatgtggcgttcgacgtgcagaagaccgtgggcgccgagatgagccggttcggtttcaccgtggtcaagacgctgatcaccgccatcgacccgagcccgcaggtcaagaacgcgatggactccatcaacgccgcccagcgcgagaaggaagccacccgccagcgcgccgaggcccaacgcatccagatcgagacccaggccgccgccgaagccgagaagacccgactgcagggtgaaggccaggccaactaccgccgtgagatcgccaacggtatcgtcgaccagatcaagagcctgcaggccgtgggcatgagtatcaacgacgtgaacaacgtggtgctgttcaaccagtatcttgacgtgatgcgctcgctgagtgaatcgaacaacaccaagaccgtggtgctgccagcttccacgcccggcggttatcaggatctctacgagcaggtcaccaaggccatgctcaccgcggccgagacgaagtaatcaccccgtttgcaaatcctcatccatcgatagtgaagcccctccaagcgaggggcttcactgcgttccgcgctgattccgacaagtgcgcaaatgggccgtatgcagatcatgacgagtgtgagaatcatctacttatagattgtgacgaatgcgataatatggcatttatagaacttgataagtgtaaaatacaggatattacaaaatcagacgagtgtgaaacgaaggggtgaaacatgttgaaacgcaaggcatatcagcgtattgctttctggaaagagcataagaccaaccaagcattgctcattactggtgcacggcaggttgggaagacgtatctggttgaggaatttgggcagagcgagtatgagcatatggctgagttcaacctattgcttgacgacagcgtgcgtcgttcgtttgcgcaagccaccagtcccgatgatttgatgctgcgtatttctgttgctgcacaagggccgttggttgtagggaagacgcttatcttcattgatgaaattcaagcatgtccacagattgtcacttttatcaaaggactggtgggccggggagactatgactatattctttccggctcattattgggcgtagaactggaggatgtgcgctccctgcctgtcggatacttggatgaatttatcatgtatccactggattttgaagaattctgttgggcactggggctgtcggaaaccgtcttcgacattgttcgtgacagttacggtgccgtaaaacccgttcctgattttgtccatcagcgtttgacggatttgttccaccggtatctgttagtcggtggtatgccggctgcagtgacttcgtttgttgagagcaaggtcatcgatccagtgcgtgcgattcagaccaatattcgcgcatactatgagcatgacattaagcagtatgcgccgaaggataagagactggtcattcaagaaatgtatcgacttatccctagtgaactgcaaagtcaaaatcgcagattccaagtcagttctattgccgaagtcaaacgattctcgcagattgaagatgaattcctttggcttacccgtgctaatgttgcgctgcccgtatttaatgttgccgcccccgtggccccgctgagagccagcaaagaacgtcgattgctaaaactgttctattccgatgttggattgctgaccagctcgtatggaaaaaagtcagcactgggcatactggatggtcaggctgcgatgaacatggggggagtctatgagaatgtcgtggctcaggaacttaccgcgcatggattcaccaatctgtattactttacgaaaaaaggaattggcgaactggatttcctgatagagaccgatgatggtgatgttttggccctggagattaagtcgggcagatattaccgttctcatgcggcgcttgacaatgcgttgagcgctgatggctacaccattgacaaggcgatggtgttcgcggaaaccaacgtgttccaagaggaaggcgtcacatatttgccgatgtatatgctcacgatgctggttaatgagtgatcggtgccttggtggtgcgatgcaggcgatatttgtgatggcggtcgataaggaggtgctcaacgattctgttgtcggaccggttccgagctggtcatgaggcgtcattggaaagttgcggtgtgtagggtggtgtctttgccgagagtacagtgtttctcgaaaaatgcggtgcatgcgatatgtttaatgtaattctaaatattacattaaacatgagtgagcttcccgaattcaatttgtaagtgcaacgttcgtctttgggtagcttgtcttcgacattagcttgccgagttcgcggtatcaaacctcgttgggtgtttcccagtccaggaccttcatgggggtgtcgttgatctcgtcgacgatggcctgcaggtccgcgtccgtcaggtcgtcgaagctggttctcttgggcaggtagcggcggatgcgcccgttgcggttctcgttgttgcccctctgataggacgagtacgggtccgcatagtaggtgagcatgccgagcgactcgtccacgagcaggtggcaggaggattccgtgccgttgtcccaggtccggtcgatgcgcgcgggcgcggggatgtccttgtagatgtcgtattcggcgcgcgcggtggacagcgcgctcttgtcggggatgaacccggcgaacagacggcggctcttgcgttcgacctgcgtgtcgccgcaccgcctcgacggggaggcgccgacggccgtgtcggactcataatggccgaacttgcggcgcgggcccacgcgtttcggacgttcgccgatcggctgtgtcctcagctcgtcgatccggacacgttcctctgccgacaggtgggaatacactctcatatcgagcgcgacactttctctctggttatgaacttgaacactttcagccatagacaggtgttgcgcttctatttagaactcgggcggtctatcattgcatctgtgtctcgctattgtggggaggcgttgtaaatgccgattgtcgcgggatttcggccgttttgtgatgcggtggcgacgtcgtggcggacgagtgcgtatgcgttgcgtaggcgtccggtgcgtacggtggtgatgtggctgtcgatgttggtgatgatggcgatgccgtcgttgcaggtgtggctgatcggttgggcgtgcggcccggacgggcttggtatggggtcggggctgggcgtgggccggttcgcagtgatcctggcggtgctgacggtgggcgcggtgttgatgtcggtgtcgtcgtcgttggcgcagaacatgcgtgacttgttgcaggagccattgatggccgaataccagtccgatctgaccgacgcgctggcgcgtctgactcccgcgcagacgttggacgacgaggtgacgacgcaggtgcgggccgcgcgcgacgcgatcccgtacaacgtggcttcgcaggccgcggacgcgacctcagtggtgggcgcgctggcgtcgatggtcatgctggccgcgtccttgtggcatatgcatccgttggcggcactgatgatcgcgttggcgatggtcccggagctgttggcccagttcggcgtggagaagctcacgaacgagttatggcccaagcgcggcagggagtcgcgtcgggcgaactatttcgagcggttgttggattatccaccgtcgagcacggagatcgcggccacggccggttcattcggcatccctgcgcaggcgcgcgtgcgctatttcaatatggccggcatgtgggagcgtatctcgtggcgcacggtgcagttgaccggtgtgagttcgctcgtgttcgccgtgctgacgggcggcgcgttctggctgatcctgacgtccggccatgcgtccgtgtcgagcatcccggccgcgttggtgggcatcatgacgggattgtcggtcacgcgcaccactggcgaggcgttcggcaacctcatggcgtccacgccgatgattcttgcctacgaacggctcatgggcctgctgcgcgcgaaccccgcgatccccgaaacgaccggtccggtcggcgtgcacgtggagcatctgacgtacgcgtatccgactgttgcaaagcatgacgatgacgcggatgacgcgtcggcagcgtcggttccggccgttcagactccggcgttggacgacgtgtcgttggatgtcgaagcgggatcgatcgtcgcactggtgggcgagaacgggtcaggcaagaccacgctcgtcaagctcatcgccggcatcctcgacgccccggacggcactgtgaccctgccctcgggcgcggacggcgggaacggtcgtaccttggggtcgtgggccgaacggttgggcgcgtcgagcatggtgttccaggatttcacgcacatcgaggtgaccgtgcgcgagttcatcgatcccgctctgcggcaatcggacgatgagttatgtgacgggttgcgtcgcgcccgcgcgctcgacatcgtggatgggcttcccggcggcttggatacgcagctcggtcaggagtggggcggcgttggcctgtccggcgggcaatggcagcggcttgcgctggcccgcacgttcctgtccggcaagccgttgtggatactcgacgagccgaccgccgcggtcgacgccaccgccgaggccgcaatctaccatgatctgatcgccaaccgtccggcgggcaccactgtgatcgtcatcagccaccggccccgcgtgctaaccggcatggaccggattatcgtcctcgaccacggccacgtcaatgaaaccggcacctaccgtcaactggtcgaccgcaacggcaccttcgcccggctcgcacacgacagcctcgaatgagctcgatggcatatccggttgattgttaaaaactcagtggccggccgacagattcgtccgacgaggctcgcgcgagtgatcataacgcgggtcgcgtcggatatgcgggagatggcacgccttatatcaaaagcgatgattttcaaataaggacacggccccatcagccggtcgcgggtactacagtgaaccacaacgttcctcccccgatggtttggggaaacacagaaagaggttggtcgtcggcctgatcatcattgcgattcgcaccggcttcttccgcaagaagctgggtgccagcgagaaccttcaggagtatttcgcctgaatcgggcttgtcgtccatccgcattccgcctcagctactcatatcgataacttactaacaatccattcattgtcttcttaccagtaaaggaaatcgccatgtccaacttcattcccaacaccgtttccgcagaacgcaagcccgtggacatcgtcaccggcacctatgtggactatgccggcgtgacccgtgccaaatccgttcccgcccgcaggcgtgaagccttcgaacgcaacggattgggcgccgccctggtctgggtggtgttcggcgcggacaactcgttcgccgaaaacgagaaattcaacgtgtccggcgatctgcgcctgcaccttgacacttctgcttctgcattgcgtgccatacgagcgtgaagcggcgtttctctgctcggtgcatgccaacgtatacatggatgtcagccttgccaatacgcatatgggagcgcaggtgagggaagtgctgcgcaatgttctggcgtggtgcgcatttgacaagttgctctatgcgtcggacggcgtcggcatcagtgaattgcattatctggccgcggtgctgttccgcaggtatattgcgcgaatcgccatcgactgggtatcggatggcgcatggaacgcgaatcaggcgaaacgggttatcgacgccatcgcgcatgccaacgcggaacggctatacggtttggcgtgaacgggtacttcgccggtgccgtcacttcccgaggaacgccgggatggcttcagccgccgcgtatcccttgcggtacatcatctccagaccctcgaagttcttcttcagggtgttgaggccgtacaaatcttcgggtgcgaggatcagcactttgccttccgcctcataatgcttggcgagttcgagttcgtcgttgtaggtcttgtaacgcatgcgcagcttctcagccgcagcggggtgggagcgttcgagaatgcgggccggagccagatccttctgctgcttgcgtacttcgtcacgcaagcgggacagaatcagaatcacgcgatcatagccgtcatccagcgccttctgtaccgggatcggatcggcgatgccgccatcgaaatacggcacaccatccaccacatacggctcgcaggccaccggcacggcggacgaagccttgatgatgtcgaaatcatcaaaacgcacgcgcgatttgtcgaaatacttggtcgagccgtcctcggcattgcaggccaccacggtgaatccggtcggattggcctcaaaggcctcgaaatccaccggattctcaccgtcatggttgctcagcgtgccgtagatgtagtcgaggttggcaaagttgtggttcttgaagaagctttccgcgctcgcgtactccttacggaaggcgtatttggtgtagaaggtgtggttgcgtccatgttggcgggcgatgaatgaggtcatattggccgcgccggcggaaacgccatagcacatgtccacgtcgatgccgtcctccagcatgcggtccataacgccgcagccgaaaatcgcgcggaacccgccgcccacatcaatcatcgcggtcttcagtgccatatcagcctcctattcatcatcatgcatccgatcacgcattcagcaggtcgcgtgaaagccgtgtaacacgttcggacaaatcggaattggcgagttccacgccgccggtcgcgtcttcgggcgccagtttgcccagggactccagcaccacgcccagatggcgcacggtgccctcattgccgtcgatgacagcagcccgttcgggcagcagctcgcggaagtagtcgcggtagaacacgaaatgcgtgcagcccagcaccactgaatcgatgtgctccatgtcgtactggtcgaagtagccatgcagcgtgcgcatcaccaggtcatggtcgccgagccgcccggattccacgatctccaccaagtcggggcaaggctccttgaaaatcgtgttgttggaatcgaatcgatccatcagtttggcgaacttccgctcacgcaaggtcaggggagtggccgccacaatcaccctctggggaatatgatgcgggtcggaaggcacgtcaccccggtcgcacgccactttcagggccggctccatgccgatgatcggaatatcgtagtgttcgcgcaaatcgttcaccgcggcggaagtggcggtgttgcatgcgatgaccacggccttgacgccttgacgcacgaaccgttcgacaatatcgaaactcagggccctcacctgctcaggcgtcttgacgccgtacggggcgttggccgaatcgccaaaatacaacacatgctcggccggcatatccttggcgatttggcgagccacggaaataccgccaagacccgaatcgaatacgccgattggagccgaagagctcatgcctgaatcctccctatagccatgcctgcaaccgtatgttgccgcgaaccggacacaaagccgattttcagcggtgttgtttcgctccctagagtactctgaaagccatgagtcttccgcaacgagtaaccaagacacacgcaaccggcaatgatttcgtggtgtacctcgacaagtccggcgaattcgagcctaccgccgatgaggtccgattcctgtgcgaccgtcacttcggcattggtggtgacggcctgattcgcctgacacggcctgatttcgtgtctgatttaagcgatgatcagctttcggacgtactggccgggggcgcgaaatggttcatggactatcgcaatgcggatggatcgttggcggagatgtgcggcaacggtacacgcgcaatcaccttgttcgctcagcgcgagggcgtggccgactccaccgagccgttccgcctcggcacccgtgccggcgtcaagattctgacgccacgcggcaatatgaggccgtacggagccaacgtgttccaagtcgaaatgggggagtggaagatcggcgaaaccgacgcctacgaggtcaccatccccggcactgagggctcggcgcgcggcacgttcgtggatatgggcaacccgcacgtggtcgcggtgatcgaggatgccttcgcgtccctgccagtggttgaatcactggatttggtcaccaaaccagtggtggctccggtcatcgagtccgaccagaacgtggaattcgtgcgggtcgacgacatcgatcagaacaccggcgtgggtgaagccacgatgcgcgtcaacgaacgcggctgcggcgaaaccctgtcctgcggcaccggcctatgcgccacaggcgttgtgctgcgggccaagaccggcatcagccactgggacatcaccgtacgtggcggcaccctgcgcgtggacgtcaccgacagcgacgtgaaactgaccggagcagccacgctggtcgccgatatcgatttgttgtaaaggaatcaggcagcgaacagggccgcgccttcggtgacgatgatgagtaccacgatcgccacgatccacagtatgtcgaccatgaggtcgatgttgaggcggtaatacttattgagtccggccggcaccgccgcgacctcggcctcgctgtcgccatcatcagcagccacagccttacgtgacggcaatccctgcacagccacggtcgcatggctcaacgccatgaactggatggtggtggagaacatcaaggtcaggcaccacgggcacagcgcgtgaatcacgaacagcgactgtgtgctcagccagtacgagtaggccaaagcggccagtccgcccagccacgtgcaggtcgcgaaccaacgcggcaccttcacacgagccaaaccgatcaccgcgatggtaatgaacaccgattcggcggcgatgccgaagaacgcgttcggatagctcagcccgccgaacttcacgatttccgcctgccaggactgggccaccgccgaacaggacaccaccgagttcagatcgcagccgagcgcggactccggatgcctagccaactgcaaagtctcggcggacagaatgagcgaggcccccaatgccactgccgaggcaatcagcatgatgagatatgtccaagtggcactgtggcgccatccaatcaacggtcgcgcctccgccaagccaagcggcgtggtgttcgtggtgctggatgatgtgtcggttgcggtgttacgagtcatcatgcccctttcgatagcgctgcgctccagattagcctctgcggttgtcagctgagtgccgaatgtctggtcttggccgttggcagaaggtgacgacctgtctgcgccttgcgtgggaatgctgagatgaggttacgatggaaggtatgactggatatgtgatgcctttggagccgcccgccgtcgggtgggacatccattgccataccgtcttctcggatggcacggaaacgccggccacattggccgaacaatccaaggcattgggactcaagggcgtggccatttccgatcatgacaccaccgccggctggccggaggccgaagccgcatcccatagggtcggtttgccgttgctccgcggcaccgaaatcaccgccacggatgagaacgtctccgtacacatgctcggctaccagtatgatcccacgaatcagcacatcacggacttgttcgccgatactcgagccgcacggttgcaacgcacgcagcgcatggtcgaattgttgtctcgtgattatccgattacctggcaatccgtgctcgcccaagtcaaggagggtgacaaaaccaccattgggcggcctcacatcgctgatgctttggtgagtgccggcgtatatcggactcgttcggaagcgtttgcgaatgcggtcagcgcctcatccaaatactatattcccacgccctcgccgacctctcatgaagtggtggccgccgtcaaaggggcaggtggtgtgattctgatcgcccatgccggtgatgtgagccgtaaccgcagactgctgtccgatgaccagatcgaagcgttgatcagcgagggattggacgggctggaggtatggcaccgaggcaattcaccggagcaacgagaacggctgctcaccatctgccgccggcaccagctgctggtcaccggcggatctgactggcatggcaaaggcaaaccgaacaaactgggggagaacctcaccgacgaggccactgtcgaagagatcgttcatcgcggcgtgctcccgttatatcggtgattcgcggcaatacaaagcggccttgagatgatgcccaaggccgcttatgcgcgattcacggtcacagcgtgccgaaaccgacggcgtgcttggtttcggagccgatgatcgcgtaaccgagtgccttggcgggcacgatgatgcgacggcccttgtcatcggtcatatcgatcgtcgcgttgtcggccacggcctgcgcgatggcctggctcacattatcggctgattcgtcggtgctgaagttcaccggtcgtgccacgttctgaatgcccagttcgatatccatataaggctccttgttctgccgtctttgtgacggacatcatggtaagtaaccgtcaccggccgaggttctgtactctattgtgccgcgtgtctgcgtcgtcatgtgcggtgttacgcgctcggcgtggcgcggaacaccgcacacgacattatttggatgatgtggatgattcggccagcggattgccctcgctgtcatacccgtccaacccggcacgggcatcgcgcagagcgcgttcttcccgctccaacagcggaatcaccgtggtttgggcactcgaggctccgtgctgaacgaaactgtccggagtatcgtcattcaccgcatcgtcggtcggggcggcggattgagatgcaggggaagcgtcggttgacatcgtgccgctatgcccgttcatactgaggagctccttcagcgtgatcgtcaccgaagaatgggaagcgccatgtgagggctgcggtttggtcgatcccgtaccggttgcggtgccggagacactcgcttgcgggtgattggcggtccggtcagcatcgggttcgacttccggggtaagatccacgtcgccagcggccacgatgtcagcggaaccggtgcgatctggatcgggcgtgtcgtccgagacctcggccgccgcggtaccggtttcggactgctgcggttgtgcgggtacctgcgtggcgggtgcctgatgacggtcgtcctgcaacaatgtgccgacggtgattgtggagggggaaccgggatccgtcgacgcggcggcggccgaccctgcggctggggccgatgccggagtgtgcttgatcacgcccaactggtgtgcgagtcgttcgacctgtgccttgaactgcatgatgcgattgttgtccgcacggttcaacgcctgaatgaattcgcccacctgttccatctgcaaccacaggttggccctgagcatgatgagatcgtcaagtcgagagcccatcatgcggccgtatgcggaaagcacggcgttgcgatgggattcgtcgagcttgccgaaaatccaggcaaggtctcgtgccggatcgttgacctgcatatcctgccagttggtcaccgtggtgatggtggaaccggagaacaggaagtcgccgtcggagaatccgccgtgaaccgtgcaggtggagaacgaccacaatccctcggtgtccatgatgcgcgcccagctgtcggtgatttcttggggaacatggccggcggagcgtaagcggcgaatccaggcggtcagctgcgaacgaatctgaccggtggtgactaccggatatttggcattggccagaaaagtcgaaggcagacgatgaatggctccgatggaggtgccgacggccgcgcagtcatccaatgtcaacaggtcgagaggacgtgcctgaccatcacggtggacggcgatcatcacggtcgtctcgcctgtgggaccgggcttgcgcggggtcagcggtgtggactccgcctgggcctgctgccccacggcctgtgcggtggccgtctggccgggttgggaaacgtctcccgggacgaatgcgaccacacggtccatatcgaagccgaggccaccaagctcgcgcgcggctgccagtgtctgcgccgctttcacacggcgaatcagacgtgtacgcccttccttgctgtcagtggcgtatacgtcgtacaacttgcccgaggcatcttggatcacggtctgatcgatgcctttggcctcgtcggttgcgctggcctgcacgttctcgcgtacgccggccacccccagattcggcaggacggctgaggcgagtgccgccaacatataatcgctacgtttcatcacccttccacactaatacatccgtggcgattcgcaccccagaatgacacgcaaaacgcatgattctggcgatgttttgtcgtgagcccgattcagccataggcgtgagtcgtgccgtgagcgcgaatcgtgccacaatggacgcatggaacaggcgcaggggattcttgaggggctcgatgagcggcagcgtaccgccgcgactacgttgcaagggccggtgcgcatcatcgccggcgcaggtgccggtaaaacccgcacggtcacgcggcggatcgcctatgcctgcgccaccggggcatggaagccggagcgggtgcttgccgtcaccttttcggtaaaagcggcggcggaaatgcgcgcacggttgggccagctcggcgtaggggaaggtgccggacgttccggttcgggtgcgggaactgccggagtcacggccgcgaccttccactcagcggcattgcatcagctcaacagcgtctggtcagacatatgcgaggctccattcccgcatgtgatcgaagatcagcgtgacgtcgtctcccgcgcgatcatccgcgccaccgcacgtaccgatgccgatccgctgaccgttcgcgatgtgctcgccgaaatcaattgggccaaaatctcgttggtggcggtggaagattatgcacggacctgtgccatcgcccatcggcaaccgcccgccggactcgacaccgctcggttcgccgacgtctacagcgcctacgagcaggaaaagacctcgcgtggcgaaatcgattttgacgatattctgctgctcgtatgccatatcatggatgattttcccgaagccgccgcccaaattcgttccaccatcggctggctcaccgtcgacgagtatcaggacgtctcgcccctgcaacacaggctgctgaccctgtggctgggcgggggaggacctgacggcaagagcgcgatgaaccgcaacgtatgcgtcgtgggcgatccggcccagaccatctactcgtttgccggtgcttccagctgggatctgctgcgtttcgccgatgaattcgggccgctcgccgccgatgtcaatctcaacaccgactatcgttcgacgccggaagtcgtgaatctcgccaaccgggtgcttgcggccgcgccgaaccgtgaggattacctgaaactggtttccgcccgcgaatccggcccgcgcgttacccgaaccgcttatgagagcgatatggaagaggcgcagggcgtggcggcacgcatcgcccggttggtcgccaacggagccaagccgtccgattgcgcgattctcacccgcatcaacgcccaacagccggtattcggtgccgctttgcgcgctgcaagactgaaataccgcgttcgtaaggattcgggatggcaatcatccgcgctcgccgacgatgccgcgtccaaacgtgcgctattggaggcgatgggtttggacgccaccggacttgccgcaaacgacgatcccggcgttacgatttccacgatccacgcatccaagggtctggaattcaagcacgtgtttctgatcggctgttcggaaggactcttgccgtacggttcgccggaaacgggggatgcgctggaagaggaacgccggcttatgtatgtgggcatcacccgagctgaggattcgctgcatttgtcgtatgcgcggaccaaggatggttatggagcgcaacacagacgcccatcacgatttttgtgacgggcgtcggtaatgaatgtgaatgttcctgaacgttcaggaacgggaattggctgaaggacggttgactatgcctgcgtatcctccgagttgccgttttcactgtcttcgccatcttcgccgagcagcttggacagttcggcatcccaatcgatatcgccggtcttgccatctgcggcagggtgggaggcggaaccgttggcatcggaagaggagcctgaaggggcgtcggatgacggagacgcgccatctgcgggcttgtcgctaggcagcgaaggcagcagatcgggatgcgaccacttggcgtcacggccttcagggccttcggcggcggtgatcatctcccacaatccggcggcctcgcgcatgcgcttggggcgcagctgcaaaccgagcagactttcgaacgtacgctcggcggggccacccatcgcgcgctcgcggcgcatcatctcacgcaactgttcgatatgaggcagatgggccataccggcgcgccacaccacgcaatccacccagccctcgaccatcgccagcagcgattccagcgaagccagcgcctcgcgctgttcgggagtgtcggggatgccgaccttggtgagattcaccgcgccggaaatcgactccggatccatcgacgtggcgtcacgcagctgttcctccatcgcatccagatcgatggagatgccgcgtgcgtacttgccgatgagcgcctcgaaacgcggcatcagccacggtaccgaggcatacaggcgggcatgagccatttcctgcagggccaggaaggaaagcacttcagattcgggaattttctcggtggtctcgaatccggagagcgcagcctcgaacgcggcggcgtcggcggaggcatcggagccggagacttgggcggtaccgtcagttgccggagtatcgctgttgccggccgaagtgaagccaatgggattggcggaagcgtcggtggatgtggagaacggattgaccgagtcggttgaagtgccggccgtatcggcctcgggcgcaggagtctcaccgttcagcatcttcgcgtattcggtggcgttctgggcaatcagtccaccagccggattcttcagcaatgcgatgccctgatcgaaactgccatgcacttcatggctcagattgccggccgcatgccccaactgcatggcaaaggacgtgttgcccagcagcttcatcagctgggctggatctttcatgccgtcgggaatcggaatcggcaccggtccggcgaacatgccggcaatctcgccatcgccgaacgcgccgccaagacgctccgaaatcaccgaagccaaagcgtcgttcatcgactcggccacaggagctgcgaacttcgcccactggtcgatggtgccttccacccagccggcgcgggtcagcacatccggatcgccgggcgcgggattgaactcgcaggcggtatccagccacaggttcgcctcactcatcgcgcggcgagccgcctcgccatccacggcggacacgctggacgcggaaccggaggcgttggcctgctgcaaggcaatcgacttggcgagcttgacgttgatcggcccttcctcgacagtgcgctgcatatcgcccatcgtgttgagtccgccggcgctgaacgcggccatcatctgctggacttcggatggattgggcagtcggctggggtcctgactcatcagctgttcacggatctcctcaggcaactggctgatctgctgccaggccatctcgccctgaatggggccgaagcatttgatcagccactcgtgaatcgcgttgtcgtccatgcgtatccttctttgccgcggtgtgttaccccaagtgtagggtctgcccgggcctgttcgctcgtggccgagcaatattttcggtttatgttcgttttcggctgatttcggccctccgcttacactgtagggtatgtttgcacgccacaggaatcaggaaccagacttcgtccaggagcagaagagcccgactgcggattcggaagcgggggatgggcgcatgccatcgttcgaagtgaagcatgattcgcgcctatctcgtggaatcagccgtgctcgggcctatgcggccgctcgtccgaaacgccatttcgtcggtgcattcgccgtgttgcttggtgtggtgattctgctgctgcccagcccgtacgtcatcgagatgcccggacccacccaagacgtgctgggcaaggtcgaggatggtgcggttatcgacatcaccggtaccggcgtgacgacgtataaggattccggcaagctgctgctgaccacggtgaacgcgtccggcgtgcccgggtacccgatcatcaacgcgcaggccgtctggggttgggccaatccgcaggtggaggtcatgccgcgtgaggccacggtaccggtgggccagagtgcggaccagtatcagaagaaagtcgaacaggacatggccggttcccaggattcggccagtgccgtcggtctggcgcatgccaaagcccatgcggacgaactgggcattgacgccagtacattgcaacacgccaaggtgacgatgcacgtggacagcatcggcggaccgtccgcaggcatgatgtacacgctcggtctcatcgacaaactcacccccgccaacgagagcggcggcaagaccatcgccggcaccggcaccatagacaaggacggcaaagtcggcagaatcggcggcatagagctgaagatgcttggcgccaagcgcgatggcgccacatggttcctggctcccgcatcgaattgttcggatgtggccggccgcgtgccggatggtctgcgcgacgtcaaggtcgccacgctggacgaggcgtatcaggcgttggtggccattggcaaggggcaggccgacgatttgcctcattgcgaggcatgacacgcggccagtcgttgtttctggtgagacgactcgcatgggtctgcccacaatgcggcgattttcggccgcgttaacgcatttgttcgcgaagacttgctaatgtgtcccctgtgaatcaaacggcatcacagaacgctgaagaatttggtttcgagcccggcgatatcgttcaggagtggctctgggacgacgatgtggacgattccattcgtgcccagattgaagagctcacgggcgaggatctcgtggacgaggactacgactccgctgtggacggcgtcatcgtatggtggcgcgacggcgatgatgaggacgaattgtccgatacgatcgttgacgcctacgcggtactgggcaatgacggcccgctgtggatactgactcccaagcccggccgcccgggtgccgccagctcctccaccgtgcagtccgccgcacagaccgccggtatgaacgccgccaccccgctgaccgtcagctcggactggaacggcattcgcctgcgcgcattcggcaggggccgctgataagcctcaatcaatacgcttgactttaagcgtgttgactggcgtcgcgtgctgcgtagtgctgctgggcgtgactgaatgtcatcgcgattgagcgctacggcacgcgtatgcgacaccacgtgtcgcgcagtgccggccatacgctattgttgtcatttgcgggcaattagctcagttggttagagcgccacctttacacggtggatgtcgggggttcgagtccctcattgcccactttcatttttcatcacttcgtgcaatcccctcattccacagacatgggctgtgacgatattccctgacagtcttcggcaaggggttctgaaatctcagtgagatgcgcgcagaaggaaaccggcagtactgctacaaaatcgtgaatttcggtcttcttggtcagatgcgtctcaatagtcacgtaaagttgtggcagagtgtttatatccagcaggaggtcgaatagccgatggcgcaggaacttcgtgaaggggacggcaagtcgggcatcgcacgtgcgggcaagcgcaagtgggggtatgaccccgctcaggtggacgctttcttggagcgcgcccatgctctgtatgacagcgagggcatgaatctcacccagcatgacattcagaacgtgtcctttgatttgcgcaagaacggctatgtgatcgcacaggttgacgccgcgcttggacgtctggaacgtgccgtggtcgataagcagaccacatgggagatcgcacagcatgggcgtgtgacgtggaaggcgaagaccgagaagctgtatcacgaagtccagaaccatgcggagcgtgacgagcgcgaacgcttcaagtccggagcgcccaagcagccttcgtacgataagaagcaggtggatcgtctggtcgaccagattgtggacaaggcggcggccgcattgggcgttgacggcgtgaccgaagacgatgtacggtctttggccgatctcaatgcgaatacggtcaacaatgtgatcttcacccagcgcaagggcaagaaaggctatgacgagcgacaggtcgattacttcctgaacgcctgcgtgcagttgctgagtcgcttggaatcctatgcacgtgtggccgatttcgtgtccggcgagcccacggctcctgcccagaccgccacgaacgtgaccgttcaagcgaacggcgtctcgccattgttcgcttccggaacgcagcgcccggcaactgacgaacgttttgcgccgtctgccgctgctcatgacgaatcattcgatgccctgcatcaggccgagcagagcttgttcactgctccggctccggttgctcccgcggcgccggccgcggcggcaccgatcgcctatgcgccggctcctgcatcgttcgatgcttccacaagcaccaataacaccaatgcggaacagccggtttcctttgctcccgcagcatacccggtgcatacgtccaacgagtctgcggcgaagcccgtctccgagacgccttccgtggctcctaccgcagctgttgcggctgagcctcccgccagtgccccgtccgcgccggtttccggtgtgaccgctggcagcgccccctcgtttgctccggcacagtcgtcatacgaatccgcagctccgtcatcgaccccgtcggtgttcgcggaacagcccgtggatatggtgcaggacggttcctctctggccgctctcgcccacatggctgcggtttctcaggaacttccggcggtggatgcgccgtccttcgctcccaagatgcccagccttgatacaccgaatgcgctgaaattgaatgaggtaccgggttcggtttcatccccggcgccctccgccccggcagcgcaacctgtgaatagcactgccgacgaggctgcgtccgctgccatgccggtctcctttgctcccaccagcaagccggatcgtaacacgaactccattccggttcgcgtatccgatagtcagcctgcagacagcacggtctcccgtccggctgtggaatcatctgaatacgttgccgcctcccacgacacggaagcagctcagccgtcacaggataagcacgattccaacgattcgttcccgctgctgttcccgcttggcggtaacttcgattcggatatccccgacctgtcgttccccacactgaacaatgacgatacgaagaaggaaaagtgagcatagcctccaactccaccgtcatcattctcggatccaccggatccatcggcacccaaggacttgacgtcatctcgcgtcaccctgaacgatttaccgtcaccggtctggcggcgggcggagcacatatcgagctgctggcgcaacaggccgcacagttccatgtgcccgaagtcgcggtgtttgatgagaccaaggttccagcactgcaagcggctctcgcacaggccggcgcacaaggtgtccgtgtgaccggcggtccggattcggtcatcgccatggccggatccggtgcgaatgtcgtattgaacggcatcaccggctcgatcggcctcgaaccatcgatcgcggcgctcaaggccggttcccagctggcattggctaacaaggagtccgtagtcgcgggcggtcatctgctgttcagcgcgcaagtgcgcgagaaccagatcaacccggtcgattccgagcattccgccatctggcaatccctgcgctccggaacccacgccgaagtcgccaagcttgtggtcaccgcctccggcggcccattccgcggctggaaacgtgtcgacatggagaacatcactcccgagcaggcgctgcatcatccgacgtggaacatggggccggttgtcaccatcaactcctccacactgatgaacaagggcctcgaagtcatcgaggcgtcccgcttgttcaatgtgtcgcctgaacgcatcgacgtgaccgtgcacccgcagtccatcgtccattccatggtcgaatttgtggacggcgccacgatttgccaggcttcgccgccggacatgcgtctgcctatcgcgctgggcctgtccgcgccggaccgcatgaccaatgtggccgccgcgtgcgactggacgcaagccgcaacttggacctttgagccgttggacgatgaggcgttccccgccgtgcaactggcccgccactgcctggccgcctccgagaagcatacggcggtgctcaatgcagccaatgaacaggccgtgcatgcgtttcttgatcatcggctgccgtacctcggcatcgtggacacggtcaaagccgtgctggaccagatggacgccgagcttcgtggtaacccgctgttcacggacgtggaggaaatgaaccagcttgagcttgaagcccgccgacgcgccgacaacctgataaacaagcaatgatgaataccttgaatacggaaaatcccatcgaaaagccgttccgcaaaaccggtgatccggtcgacctgaccagcgaatcgcccttgcacccgcgccgcaagtcccgccgcatcatggtgggcccggtgccggtgggcgggggagcgcccatctccgtgcagtcgatgaccaacacgctcacggccaacgtacctgccacgttgcagcagatcgccgaactgaccgccgccggctgcgacatcgtgcgcgtggccgtgccgagtcaggacgatgctgacgcactgccggaaatctgccgcaaatcgccgattccggtcatcgccgatatccacttccagtccaaatacgtgttccaagccatcgacgccggctgcgcggccgtgcgtgtgaaccccggcaacatccgtaagttcgacgaagtcggcccggacatctgcaaggccgccaccgacgcgggcatctcgctgcgtatcggcgtgaacgccggctcgctggacaaggaactctacgccaaatacggtggcccgactccggaagcgctggtggcctccgccttgaaggaagcgcacatgttcgaggacgtcggcttccacgatttcaagatctccgtcaaacaccatgacgtcatcaccatggtcgaaacgtaccgactgctcgcatccaagggcgattggccgttgcacctcggcgttaccgaggccggccccgcctggcaaggcaccatcaaatcctgcctggcgttcggtgcgctcttggccgagggcattggcgacacgattcgcgtgtccctttccgcgccgccggtcgaagaggtcaaggtggggtgcaaactcctggaatacatgggattgcgcccccgcaagttcgacatcatctcctgcccgagctgcggccgcgcccaagtggatgtgatccagctcgcatccgccgtcaccgaaggcctgaaggacgtgatcgcgccgatccgtgtagccgtcatgggctgcatcgtcaacggtccgggcgaggcacgcgaagccgacctcggcgtggcctccggcaatggcaagggccagatcttcatcaagggcaaggtcatcaagaccgtgcccgaagaccagatcgtcgacacgctgctcaccatagcgaacgatatcgccgcccaaatggagaccgacggccaagtgcccgtcaattccaccggcccggtcgtggtcccaatccagcatcccggtcactgattcggccgaataggccctcggcgtaaatatcgcggtcagattacaatagcgcacgtgtcgcaagaagaagagcatcgcctgactgttcgatccaagccgtggaccagcacccaccggctgatggtcagcctgcccatcttcattatcctgatcggcgtgctggtctccatttccaacctgaccacggtgccttggaacatcgaacccaccggccagtcgatggccacgctcaccgacgataccgaagtcaccttcgataacccgtccggagaaacgctgccggcgaaaggcacgtatgaggtcaccgagcgatacatcacgctgaacatgaccagcgacggcaatctgaccaaggagcctggtgatcggggcaaggccaatgcggacggcgtccaagccatcaaggtattgattcgggaacctcagaacgcatcaggcaagcgccccggcgtggtgttcatgcacggtgccggatacggcacctgtgacaactcctttggcgatgtggcctccgatatggcttcggccggctttgtgaccgcagtgctcgacaaacccgtctggagcaccaccgacatcaaccgcgattatccggcctcagccaaggcatatgatcaggtcatcgaatacctacgagcccaaagcgatgtagacgccgccaaggtcggcatctatgccacctccgaatcgacatggatctcctcatatctgctcgaggacgatccggacgtcgccttccagattcttctgagcccgatggtgttcagcccacgccaatcactgggatttttcgtcacccaggacttcactcttgtcggcgcgaacgaaggctatcgatccatcgtccaacgcgtgttcagcgcggacaccggcctgttcggactgaacaattccgacctcgccacgctcaaacccgccgcttacgccgtacccacctatgtggcttacggttcaaaagacgtgatgacggcgcaggtcgacggcgtgcgtgcgattctctacaacgcccacaaagccgataactggaacgtgaccgtgcgcagctatccggtcgccaaccatgtgctgcgtttgggggatgagtccgaagcgggcaccccgtttgcggacgcctatgtggacgatctcatcgattgggccgtcggcacttccgccggactcacgcagaccagcgaaaaggtggccggcaccaatctgtaccaatcaatcggtctgccgggcgctttgaaggcaagacgcgtcggcaccatatatggtgtgatcctgcacgtcacggtggtactgctgctgctcgcatccatcgtgctggcactggtggcgctgggccgcaaaatcgcggcggatgcccgatggcggcgcgagaaacgcgaggccaaacgtgcgggcatgctgataccggaacggcctgtgatactcggtttcgcacatggtttcggcaacgcgttgctgactttgaccctcactactcttgccacactgctcatcttctttgccggacttggacaggtgattatgggtgtggtcaaacttgcatggggcagcgctcctaccgagacgccgggcgtcatgtattggagctggccggtcatccaagtggtgtccgtgctggtgctatgggcttggtcccgcgtctttatgcatctgatagaggtcgcttccgcccgcggactgattcagataccccctcgtcgtgaatccgttcgagacatcgtcaccggtgccgacccggtactcgcctccacccgtctgggccgagtcctgttctggctggtggccttcaccatgctgtacatactgttggtgttcgccttctggggcctgtttatttactgactacttcattgagtagagtctgccgggcgtcgcggggaaaggagatgagatgtcgctgtaccgagacgaaggtgtggtgttgcgcacctccaaactgggcgaagccgatcgtatcatcaccatcctgacgcgtgggcatggcaagattcgggcggtcgccaaaggcgtgcgtcgcaccaaatcacgctttggtgccaggctcgagccgttcatgcgagtcgatgtgcttatcgctgaaggccgctcgcttgacgtggtctcccaggctgaagcggtcgccgcttacggtgctccgatcgcggcggattatgcggcgtatgaggccgccaacgtcatcgtcgagaccatcgataaactcgccagcaccgaacacgagcagctgacgaaccaatatcggctgctcatcggcgcgttgaacgcgctcgccaaacaatcccacgccccgcaagccataggcgactcctatgtgatgcgcgccttggccttggccggttggacgccacgattgggtacttgcgtggtatgcggcaaggcggagccggcgtacctgtccatcgcgtccggcggcgtgatgtgcgaagccgaccacactaccgatgcgcgccgtatcgcgccgttcgtgttaaaccagttcgatgcactgattcgtggcgattggtcggtgcttgatgccgcgcctgtggagcgggttgtgcaggagttggttgaagattggggggagtattacctcgaacgcccgattcgttcgctgcgcttgatagattcatgagtatggcttttgagaacgttgattacacgtcgttggacattcccgcagctccgttcagcgaccctgcccgtattcccgacttccccaagaacaaggtaccccgccatatcggtgtgattatggacggtaatggtcgttgggccaagcagcgcggcatggtccgcaccaatggtcatcaggccgccgaaccggtggtgttcgacactatcgccggtgccatcgaagccggtgtgcggtatttgagcctgtacacgttctccactgaaaactggaagcgttcgccccaggaagtgcgcttcctcatgggcttctcgcgtgaaatcatccaccgccgcgtggaacagatggacgagtggggtgtgcgcgtgcgttggtccggccgtcgccccaagctgtggaagtcggtgatcgacgagcttgaggccgccgaggagcgtaccaagaacaacaaggtcatcgatgtggtgttctgcatcaactatggtggccgtgctgaaatcgccgacgcctgcgccgccatcgctcgcgaagtgcgtgatggcaagatttccggcgaccgtgtgactgaaaagatgattgccgaccatctgtacaatccggacgttcccgattgcgacttggtgatccgtacttccggcgaacagcgcacctccaacttcctgccgtgggaggccgcctacgccgagctcgacttcgtgcccgaactcttcccggactgcggccgtgacgtgctatggcgctccatcgaccattacatccaccgcgatcgccgatttggcggcgtgaaataaagaacagcccggtggactgttcgttcacgccgcctggccgaggccgataggacatgaccaggtaatgatgagtccggcgaagccggtccttgattgctggggggtgtgaaatagtccttgttaagcccctcaaaattgagggggctgagccgtaaaacaaacagcccgatgggctgtttgtaggcgaaggcgagacgagagtcgagccagaagaatgcgagcggcagcttgtccgtaattgcggtcgagctgtccgtgtagcggactgaggggagttaccggcacacctcagccatcctctctgcaaactcatccaaaaaacgtcccgaatccgcaccaagtgccacatgcacatgcggcatggaatgattcaccagcccaaccgggtctccggtggtccggcctcgtactccattgaaatcaccggtattggtctccgcgcgcaacgcaagatcaaaacaatcgaccagtgaagaatcaagtgcaaccgccgccgccaacggatcatgcaacggcatgccgccagagaacagtgcggggtcggcttccaaatttgccttgatggaaaagtccgcgagatcagccaagaaccgcccgcgcttggtccccgtcgcacgccactggtcggccgccgatcgcggtagcaaacactggtgagtcacatcaagtcccaccattgtgatgtctgcgccggaatgaaatacacgattcgcggcctcagggtcttggatgatattcgtctcggccaccgcatcccaacaattgccgggttgggtaagcgtaccgcccatcatcaccagcctgagtttcggtgcaatatccggtgcccgagtaatagccgcatccacatccgtcaacggcccggtagccagcacggtaacgtctcggccaaactcacgaacctgctcaatcagatactcaatcccatccgcagcatcaacggagcgcctccttttgccccagctggcgagagctgtcgatgtagccgactggggacggtccacaggccgagagcgacccacacgagaacaagaccccgacgccggatgagcatgagcgtcccctaccaaatacccgccaacagaaacaaccccatcgggcacatcctcagacatgtcatccccagacatatcatcaccaggcacaccagctccatcagccagagccccggcccctgccagccaagtattccccagtccatccttcccatgaaactgggcacaccctgcatcgggaataaacgcatcagcccaagaaggatgctcggagcccaaaaacaccggaatatccgcccggccaaacaaatcaagcaccgcgcaagtattggcataagccgtgttcgcatccacattgccataactggcgatcacaccgctcagctcgcactcatccgccgaccccaacaaatatgccaacgccaacgcatcatcaacaccggtatccatgctggcaataatgcggtcaggacgttgggccatggaatcgcctccttgttagcatgattcgctatgaataaccttatcggccgatacgcaaaaatgcgtcctttcctcatgggaaggacgcatttttgcgtagattcaaactcggaatatcggaaattacttgccgaggaattcgtcggtgccaaggtccttggcctgcggggcctcatgaatcaccttgtcatgactgtcagtgtaggcgtcttcttcagccaggaagtcgaagtattcctgagtgcccttgaagtcgttggtgccgagcacgaaagagccgtccttgatcttggccggatcgccccagtactggccgtcgacgataacctgcatgctcttcttgacgaattcgggcttgaggttggcgtcaggggcttcgtccacgagaatctgcgcggcgtcatccgggttggcgtacgcgtactcgtaacccttctgagtggcctgagtgaacttcttgaccaggtcgggattgttcttgatggtcttgtcattggtgatgatgccgatggcgtcggcgttgccgggcacgccgtagtcaggctcggtgaagcagttgagcttcgggccgtacatgtcggcctgcacgccttcccacgtggcgtagaagccgccgaaatcggccttgccggattccatggtctggaaggtggaggtgccgacggtcaccttgtcgaactcgcccttgccgccgtcggtctggatcatgcggcgcaccacggcgtcggactcgttggagccgaaggtggcgaaggtcttgccatccaaatccttaggggacttgatggcggtgttggacgccagtgcgcaccaaatggcgctcggcttctgctgcacctgcagcacctgcttgatgtgagcgcccttcagcgtgtagatgcccacattggtcaagttggacagggcgaagtcggccacaccgttgttcacggcctgttcggcaccggcctgggccacggccacgatatccacgtcaagaccggcatccttgaagtagcccttgttcttggccacgtacacgccgatgtggttggtatcgggcgcccaggaaagcatgaaagtgaccttcttgaggtcggaggtgttggagttggaggagtcggcggtgttggtctgaccacatgcggcgaaaccgaaagtcatagcaagggcgcccacgagggcagcggccttggatacaaggcttttcttcataatgatggttccctaattcgttgtctctctatcgttctctgggattgcttcgaacggaagtcggcagaaaacgatatggagggccttgatttccgttcgaccagcgcccccgacattccctatgaaagctcaagaaagccggtttgccacacgctggtaaagctgttccattatagagacagggctggagacctcatgagaagccgccccgttcagtcggttctggccgccggcttgtgtctttgacggtaaaaagaactactggtccgcgtcggggtcttcgtcatcgccggccgggccgagcaggatgcgctcgctggcgttcaccgccagcatcagtacgcatgtcatcaggataatgacgatggtggcggagaagatcagcggcgtgcggaacgaattgtaggcagcctgcagccagatgccgaggcccttgcgcgcgccaagatattcagcggtggatgccgtggcgaagatgtatgcggcagatacgcggataccgccatagatctgacgtgcggcaacgcgcagcttcacgtgccagagcgtccagaccggggtcgcgccgcaggtcaatgcgacgtcggaatagaactggggcaccgcttctagtccgcgcacggtctgcacggcgatggggaagaggccgaataccgccacgattacgattttgccggaaatctcaaagccgaaccaaatcaggaacaacggggcgatggaaatcagcggcatggtttgtgcggcggcaagcagcggatagaacgccgcgttgaacgtgtgcgagcagtacagtgcgatgccgatcataatgccgaagaacacggcgaacaggaagccgaccacgccctcatagccggtgatcgccgcggccgggccgagcgtgttccacgtttcgatggtggcggcgaaaatctcgcttggcgcggagatcatcgtgggggagacatgtcctagatccacccacgtttcccagactgccagcaatacgatgacggcgatgacggtgggcatgcggcgcttgaggcgcttggcgatggacatgggatgtcaccttgctttccgcgccagtccggtttgctggtggcgcttgcggccggggcgtggaacagtaaggtgaggagcctgcgcgcctgccggtcgtgtgatggattgtgttatatgccgtccatcagtataggcgaaggcgaacgacaggggcacacaaaaaacctccctctgtgagggaggtgagagagctactccagtccgatggacttcatgtggtggagcttcagggaatccaccttgagactaccggactcggcggcgagcttgatggcgcgcggtccttcggaggcgtaggagtaggagctcagcacttggtggccatcgttgacgtagacctccacggagccgcgatccacgaacacgcgcaggtccagcttgccggaggccagttcggtgtcggtcagtggggcggcgcggtagccgcgatcgccgttggccatggcctgacgatccaccaccacgcggccgatctggtcgtcataagccacgtaggtgtaggcaccgtccttagtggcatgaatcttcaggcccgcacgctcggcagtggaggcggccaagtcgatggtcatttcgatttccacggcctcggcgtcatcggcgatgacctgctcgccatccatatcgagcgtgatcgaaccatggtcgagggtatcctcgcgcaggccttccatttcggcgaccggcgcggtgaccacgtcgccgtcatcgtcaagggtgatctcgcgcggcagggtgagctggccacaccagccgtcatcctccatgggaatcggctgcacgaacgggctcatccagccatagacgatctgacggccgtccacgttgaaggactgtggggcgtagtagttgtggccgcaatcccacaggcggaactcggtttccggcttgaattcgccgcccggctcccacgtgccgatcatgtagccggcgttgttgacgttgcggttcatgaagccgctgggcttggaccccatggcggagaagccaatgacccacttctcgttgccgtccttgtctttgatggggaagaagtcggggcattcgagcatgaacacgtccggatccgggtgctggaagagcacgcgctcgtattcccagcggaccatgtccttggaggagaacagccacatctggccgcgcttgtccgcagaggagacaccgaaggtcatgtaccaggtgtcgccggtcttccagaccttcgggtcgcggtagtgatggtcgaccttgtcggtcgggcagtcgatgatcatgccgcgcttggtggcgctggtcagctcgtcgttgtccggctcggcgagcatctgcacttgccagtcgccgccggtgttgtcgtggccgttggcccaacggtggccggtgtagtagaacttgagcttgccatcgtcgccgattactgcggaaccggagaatacgccgtccttctcctcttcaagggtcggggcgaacatgattggctcacgcttccagttgagcatgtcggtggaggagacgtgtccccagtgcatcggaccccactgggtgccgtacgggtgcagctggtagaacacgtgccagcggcccttatagaagcacaggccgttcggatcgttgatccaaccgccgttggatgcgatgtggaacttcgggtaccagcggttgttgcgcttggcggccatctcggccacgccggcttcggcttttgccagttcagcagcgtggtcgcggatgggggtgagaacaggggtttcgggagtgaagtcagtcatggtgtgtcctttcaggccttggcagcttccatctgacgcagctgcttgtcggtgtagaaggtgttggtcaggagcatgaagacgatgagcacccacagggtcggcatcttgagcacgccgaccatctccttgaaggaggggttggtcttctcggcgttcggatcggcttccttcttgagctcttccttctgctcggccggaacccagaacaggtagatgagcagcatgccgacgccgcaggcggtgccgatccagaagttgatcatcgggctgatgttgaacaggaagccggcgcacagggccacgatggcgtagctgaaggagccccaggcgcgggactggccgtattcgaagttgaacttacgggagtagcgttcggtgacagcctcggacagggagcaggctgccatgaagccggcggacaggacgatggagccaatcagtgcaccagcccagcgggtgacgcctccggcgttgatcatcggggcgtagacgaactggacaaaggggttgcgggccgcgccgaacctatagggccatccgcttccacttgcggatcttcgtcctgaacgaaccgaacggggcgacggtgttcacatgaatgaacctgtacacttcccataccgccgttttggtggcgtcgtcggcccattgcctcatatgcggcttgaacagctcgtcctcgctcatcgcatcgatcatcatatatatggcgtcgacgttgtcggtcaacatgccctccagctcccgcagcgaaaggtgggcgtaggtgtcgttgaaccaccggtacagctttccgagctggttccacttgaactcatccgacggtgttcgcaccggaaggcccctccgctcgcgatcctcccactgcaacagcagggtggtccaaccgacctgataggcgaggttttccgccggggtcctctcgacctcgtcgatgcgcttgtctttcagggcttccggaatatcgtcgaactccgcaatgtatttgcggaacgccgcactgatctcctctttgagctcctgcgcgttctcgtatgttctcaccatgcacctcccggtcgccgtgcgtcgctgtgacgatgcgggcatcgtatcagtccggcggatgtcgtgacgtcatcggcgtgtcgtacccgttcgagacgcaaaaaggcctccgtgctgaacggaggccttgagaaatcgtgtgggactcggctacttcaccgaggccttttcgatcagcgtgcagtggatcttcgccggaatcggcgcgtcgatcggcggcaggggagcggtggtcgctggccgtgagacgtcgtccatcgagcgtccttcgatgatcgacaccagcttggccacggcccagtagcccatctcgaaatgcggcagttccacagtggtgagcatcggttccagcgtctcggcgaacacacgatggttgtccacgccgaccacggagatgtccttgccgaccgtgagtcctcggcgtgcggcgcattcgtacacataccaggcgcgggcatcgttgaagcagaagaatccgtccggatgctcggcgtcgaacaaatcgctgactgcggtcagtgccggcccgttgttgagcacattgacgaccagatgatcgtcatagtcgaggccggcatccctgagcgccgcctgatagccttccaaacgaccgtcctgcgcaatcatcggttccgagcaacccacataggcgatacgtgcgcatccggccttaaccaatctggtggtggcgtcgtagccgattcggaactcgttcggttcgacgctcgggattttgccaagcgagtcggtggcatccaccaacaccagtggcgtcttggccagcgaagaaggcgcatgggtgatgcggttcgacatcttggcgtacaggaaaccgtcggtgccgtatcgcttgagtgcggcgatttcctcgctctcgctgttctcaccgtcggtgctcacggtgatgagcatatagccgaactggcttgcggcggtctgcgcgcccagaatcataccgccggcgtacggggtggtggccacctcctcactgatgaaaccgaggatgtgcgtcttgcctgtacgcagcgaactggccagcggattcgaccggtagccgagcttggtggcgatggcgcgcacattgtccgcaatttcggactttacgcgcccctcgtcgcgtccgttgagcaccagcgacaccgtagagacggaaacccccgccttgttcgcgatttccttcatcgtagccatgcgtcaaacgatacaccctaattgacggactgtcggaaaagtatcagtgttctccaccgactccgccgaggttgcgcaccgcaccgatgaataatggtatgccgtccggggtgacgtacgaatacaggaatgggcgatccaccgtgaactcgatgttgtccaccggcgcgctagtgaagtctgcgccggctttggtgaaggacatggccttggcgccggcctcgttcacctcgatgcgcgtgccttgcagaatcgaaccgatatacagattctcgccgtgcgaatcggtgtcgaccatcttggtgaagtcggcgtcgcctgcactgaacgcatcggtcacccccagtttttcgaatgccttgatggtggcttccgagtcgaacatgctgtcgacggtgaatcgtggcagcgagacgttcaccgtggccgagttgacggagacgccccatccgggcaaactgtccgcggtgcaacccattgcgtcctcgccaggggatgccgacgaacacgtgccgaacgcccatccgagtttctcggcattgccggccagctcgtcgaaatgccctttggccggcagcacgatggccagattgccgctgttgtcgaatggaatctccacccgctgccaagtgttgtactcatcatggctgtaagtcatttggctgaaggtccggtgcatcatcggcacctgagcatctccggcttcgccgtggaaggtgccgtcgccggtggactgctcttcgaacggatccttccagcggccatccgcatagacagtgttgatgatggacaggacttcacggtcacgcagcgtgatcttcggcttgagcgaaccattcgtatgcttggcaatccaatcggacatcttggcggcggcctgatcgtcgaacggtagcgtggtgacttcggcctcgaatatcttcttgacggtggattggtaatcgctggcaagagagtagtcgttatcgatccacagcgagttcgcggcgctcatctcggatttcgcccccgaatattgcccgttgatcgaactcagcagcgattggtagtcgctgtcggccagcgaaccggagcccagcagctcattcagttgcgagcgggtcgtgccattggcgccctgcgcggcgatggccaacgccatccacatcgaagcaggggagtagttcacattaccggtgtctcggtcgccggctcccatcgccaggaattccggtgcggtgcggtaggcgaaggctgcggtgctgtcgactaccggctgtgtggcaggcgtggccttcggcttgaacatattgcgaaccagtgcgctgccatcgccggccgtccaccatacgccgccggcgacggcaaggacaagcactactgtcacgatggcggcgatacaagcgttacggcgtttgcgttgtttgcgcaaccggtactgttccatcagtttctcgctcatggtcagcccctttgcttggatcggctcgtgcatcattgcacgaagcccctgattccagtatattttggtctctcttattttgtgcgacgagccacaatccaccgcacggcccacaccacgccgaatccgaggaagctcgccacggcgaacacgatgacgaaatgcaagacctgatccatcgagccccaggagaggtatcggtcgccgatcagcgtgcaggtacttcctatcgggcacgtgtcttcatacaccgtgatgagcgccatgagcatcggcgcaggtaccagtgtgcacgccaacgggaacagcaggcttttccacggatacgtcagtgaggccgggcgtagcgcgtagatgccgttgatgaccagcaaggcgggcggaatcacaaaattgattagcaacgcggcggccatcgcagccatgccgccccgtaaggtcagcgccaatagcaagccgtacatgattgccgtcgccagccagcagccgaagcgaatcgcatcctgacgaatccatgtgagcagtcgtccgctcgccgtctgcggattcggatccacaaacaattcgcgcagaccgtagcgtccgattgcatagcagatgaacgcaacggccgtataacagatcaacagcatggccgagccgatcaacgaatgaaccaatagctgatggccgctttcagcgtgcattagcttccaccactgagcccaggaacggtatgggaaccccggccgtaagcgaagattggtacagccggatgccagcggtccgatgattgcgctcgccaatgggaaagacagactgccggatcgtatcgaaccgagtatcaggttggtgattcccaacaccaatggccagtgcagaaccataccggggaaccatacgaacaggtttttggcagccctgtcaaggacctcgtcgggcatgagatacattgatgagctccactgcagcagcaacaacaccgctatcagtacaaccatgccaatccaatgcgcgcggttccacgcgaatattcgttgcgtcccgcgctcggcggcggcattgcgcatatcgctcctgttgagcttgctgagtgcttgtgcacggttcattgccgtcctcctttaccgccttgtcaaggattgatgatgattccatcgtaaatcgcgcaggaaatgtggaatgatagttgtcatagtgaccatgacatgtcaggacggagcagttcggcgtcgggcacactgaaggggtgaatgtaatgggagaagcgcgcaaccgcaacatacgcatcggcattgtggacaatgacccgtatgcgctgaaagtgttcggcgcgctaatcgagcgcatgtccagcgattttgccgtgatatggacctgcgatttgggtgccgtggccatcagccgatgcctgagccccaccaagcggcctgacgtgctggttacggatatgtctatgggcgacgtgcccggtaccgaagtctgtcgtgcgattcgtaccaaaacacccgaggttgggctggtgggtgtcacctcatacgcgctcgcgtcatttcacgacgaggcggctcgctgcggggcgcaggccttggttggtaaaaccgatttgaacggcattgcgctcgctattcgcaatgcagcccaaggattgtcgaccaatgagctggtactgggagatgaggggagcggtaattcgctgtccttcatggatgccgcaaccgcctacgcggtgctcgaagatacgtcatacgcgcaccgtggcgcgctttccggcaaagaacgcgacaccctgcgtatgtatgcggatgggtcgaccaccaaggaaatcgccgagcgattgggcatcagcgtggccactgtggcgacttttgaacgccgcgcactcgccaaactcggcgctcgcagtcgcgctcatgccatatcaatctgcgtgaaacggcatgagatttaagagttggcatgggcggtatgtgcgacggcatggatggtaggaaaggaactgctatgaaagcgttacgacaccgattggccgagctggatagcggtgttcgcaatgcatggctgttgattgccatactggttgttgccttgatatgcacgatggaaaccatggcgggcttggctgctgacagtgtctcggcggcggactgccttgcggagttcatattcgttgccattgtggggtggatggcgtttcgtccggtcaccggatgcgtggcggtagcggtggcttggatagtgttgtgcatgagtccgatctggatgccgtcgggtgcaatgctcgccgtgttattggcggtgggtattgccggatacgccgataagcgattggcgctggcggttgccggcattgccgttgtggtgtggatgttgtcgcgtggtggcgtggccattccttggcttgatggcggctcagacacgatgagcggttctgcggatggcgcggcgagtagtagtgccctagacggtagtgttgctgatggtggcgctgctgatggtggctcttcatccagtgggtctgacagcgcagggcagtcgggaagcgacttcaccggaagcgcctatgaatcgagcggttcttctgccgagcatcgcactgggcaagtgattcttggtgcgattgccctctatggtgtgatgccagtggccgtgttgtttattggcttcatgcttggtggcatggcggcgcgatggaatcacgaacgcagcttggttcgagcggagttggctcaccgccgtcagcaggaacgcacagctcaggacattcacgattacgtatccaatgatttggcatacctgattttgcgattcgacaaggatattgccgatggcaagaccccttctgaagaagaattacgcgaactgcgtagcgtggctatgggcgcattggatcgcacgcatcaggtcattgatgttattgaaggcaggggagaagcggcgcacagtgcagtgactccgcatgattcgaccgttgatgccgcttctggcattgcatgtggcatcacagacgctgattgcccgctagccgagcaaattcgtgatgttgcgagcaatggtgaccgccgattatcagagcttggctttgaaggtcagacgattatttccggtgctcatggcgcagccggtcggagtggcctgatcgccgggctgctggaggaactgtacggcaacatcgccaaacatgccgacccggaagcgggctatgtaatgacgattggcatcggactggacaccgtccgcatcgcctgcatcgacacggcccgcacgtcatcggattcggatgcggatggcagtgcggacctatccaccggtaccggtctcaaccgttaccgacaattactagaacaacaaaacggcgccctgcatatcaccacgcaagacgccgaatggacattatcagcagttattccactgtgaggaaaccgatcacccaaccgacttctgcgcagtctccgcgccaaagaagccgacaatcagcatcgatgcaatagcaattgcgctgatggccacaaagatggacgtggcaccaagcgaggtaagcatccaacccaccaccataggcatcaacacattgagcagcttggccacggcgttcgcgaagccgacgcaacggaagcgaaccttggtggcgaacagttccggagcgtacacagccaccacggaagccataagcacgtacaggcacatcatgagcaggaagccaacgataattgcgctcacggtagaggtctggaaggcatacattaaaccgaacacgccagtgaacaggaaggccggcacaatcgtgcgcttgcggccgatgcggtcgataagcagagagccaatcagacagccgaccggggcaccgagcatcatcgccgtggaggtgagcagcgagctggacaggttaataccacgcttgaccagaatcgtcggaacccaagaagtgaaggcgtaggagcacacgttcgtggcggccacagcaaccacagctacaagcaggcagatgccgagcgaacggccgccggcgttgcgggtgtcgctggtgtcggccttggcggctgcgtcgatcagttcggagccgttggcctcaagctgcttgacgatggcgtcggcctcatcgtaacggccgtgcacggcgagccaacgcggggattcggggatgtcgcggcgcagccaccagatgatggcggcccccagaccgatggccacgaacagcggacgccaggaccagcgggggatgatccatgcacacagcagcatagcgatcggcacaccgcagttggccacgagcgagacaatcgcgcaccagtggccacggcggttcatcggtgcgaactcgttgaccatggcgaagccggtgacgatttcagcgccgaggcccaggccggcacccagacggcacagggacagcacggccatgttcggggcgaatgcgccgaggaaggtgaagccgccaaacagcagcaggttgatttggtaagccacgcggcggcccttcaggtcaccgacgaagccggccagcagcgaaccgaccagcagacccaggaagcctgcggacataaaggtggaattttgcgcaacggtggaccagtgtgtggccaacgcgctggaggcaacggcgctgccaatatatacgtcgatgctgtccatcagcatgccagcggcgaccagcgccacgatgcgatggaacatcggggtttcatgtgcgcgatccacgcgcgagataatatcctgaaccttggcttgatccgtcacggtggtacgtgcttgtgcgctttccatagccgcgggattgccggaaatctgctgttcagcagcagtcatatttgagccctcttcttgcaaacctgcccgcgtgcaactgctcaatgatgttgcggcgagcgaactcttgattggactgcgtgttccgttcgccctcccattgtgtgggatgaacgacgtttgcagtccaagtcttgaattccacgtagcgagccaatcgttgtgagatagctcactacatggggcttaactataggttcgatcttgtggcacgccgcgttgcggtcacattgtgaacgataacagagtttgtaacgctcctatatatgccccacttacgctcttaccccgttgaaagaaggcaaaaccgtgattcccatggggcggtaaaacactcatggggcggtatttggcccatggggcggttagcggattttgcctttccgcagaatagagccgttttcgcctaccgccccatgagggttttaccgccccatgagatatttaccgccctatgggtgagttaccgccccatgaaacgtgtaataacaaagcatgcccttgctggtggaagcgatgctttgctatttcgcctgcttgtcggcgaggatctcatccaccagcttgggcttttcggtcagctggccggtgaagccgggacggatatccatgtgcagcaccagagaagtgcggtagccctgctcggcgagcttcttggcggcctcaccggccaccttgagcacgtcgtccagattgccttccacgttggtgaacagggcgttggtttcctgcggcagggcggattcgcgaatcacttcgacggcctgagccacgtatggtgaaacctcggagcccacgccattggccgacacctggatggctgccacggtgttgaggtacggtttgccggtttccgggtcgatcggcacttcctgagtaacggcattacggtcaagaaccatgattctcctttttcagtagtgttaagctcccctggcaaggggagcttaacaaccacacttatgtcagcgatacttccagaaatgatccatcgggccggagccgtggccgagattcagctgggtcttcagcgcaccggtcaggtacttcttcgcatgcttgatggctttgggcagcgtgtcgccaagcgccagatacgaggcgatggcggagctcagcgtgcatccggtgccgtgcgtgttcggattcttgatacgcgcgccatcaaaccaggtcacggttccatccgtctcggcaagcacatcgttggcatcctcggtgccatgaccacccttgaccagcgcggcacagccgtaacgctccacgatgcggtgggcggcggcctccatatcctcctgatcgcgaatcagcgtatcggtcagtacttcggcctcgggaatgttcggagtcacgaccgtagccatcgggaacagcttgccggtcaaggccgcaatggcatcgtcactgatgagcttggcaccggaagtggccaccataaccgggtcgagcacgatgttcgtggcgtgatggaaggtgagtcgttcagcaatgacgtcgatgatgtcagtggcagacaccatgccgattttcaccgcgaccggcggaatatcctcaaacaccatgttgatctggtcggcgagaatgtccggtttggtgtcctgaatggaacgcacgccggtggtgttctgtgcggtgagcgcggtgatggcgctcatgccgaacacgccgcaagccagcatggtcttcagatcggcctgcatgccggcaccgccggacgagtcggagccggagatcgcgagaacagcgggcagtgtagatgttgcaatttgtgccatagtgttcattctaagtggggcccatgatgtttttcggagcgatttccttgatgttttgccgctcctgtggtgagatggggagggtttgctgattgcgattgattcatgaaatgttcgggaggggacatggctgataacgatgtactgcgccgtgacggcgtcttggtgcgcatcaccggttttgacgatgaacgcaccgcatattttggcgtaatgcctaatgggcacaccacacagctcacatttccgcgtcaggaggtgttcgatgtgggcgacgtgttgctcgtcggcacggatttctatcgtaaagtgccgcatgatgtgtggccgttgaagccccgtgtgggcatcgtgcgccgtgcgctcaacgaaggcgtggtcctggagacttccgatggcctcgaactgcttgaaggcgattacccgaattcgatcatgcccggcaacaccgtgcagttcaccgacctgttcggcatcgaacgagtgctgtggcccacggccatccgcccaggcgaatccgatcacgatgacgacatcaagcagtaccgcatcacgccgggcagcgatccgtcgcttaccttcgattcgttcggcggttatgagcaggtgatcacgcgcgccaaggagcttatcgaaacgcagctgggcaacagtgcgcagatgcgtgcgatcggtgccaagcccatcaagggcgtgatcttcaccggtgctccgggcaccggcaaaacgcatctggcccgcatcatcgccaatgtggcggacgcgcagttctatctggtgtccggcccgaccatcgtgagcaagtatgtgggcgatagtgaggaaacgctgcgcatgattttcgccgccgcgcaggcggacaagcgcgccatcatcttctttgatgagatcgattcgattgcgtcctcgcgcgagaacgataccaatggcgtcggcaagcgcttggtggcgcagttgctgacgttgatggatggtttcgagtccaagggcaatgttgtggtggtcgctgcgaccaatcgtattgaggacgtggatcccgctttgttgcgtccgggccgtttcgactggcagattcctttcccgatgccgtctgagcgcgaccgtttgggtattttgcaggtgcaggcccgttcgctgtcaatcgagggcgaactgccgttggcggatatcgcacagcggaccgaaggctggagcggcgccgaagtgtgcgccatctggaccgaggccgctctggtggccgccaaggaccgccgcggcgcgatccgggctgccgacctcgtcaccgccttcgagcgagtcgagcgtcgtcccgaattaagacaccaccgggcataataattggctcccctcagagaggggagccagagaggtttactcctgggcggtggagtagagcttgccgccttgggcggtgtacttttcgctcatcgcatccatgccggcgaggatttcttcggggctgagcacgttggcggacaccacgtcgttatcgacattggccttggccttagccagtgcctcggagtcgatgccagcagcagcctccttcacgatttgctgctgagcggcctcgccaccgaatgccttgcggatgttctgggagatggccatcgagcagaacttcgggccgcacatcgagcagaagtgcgccatcttggccggctcggcgggcagggtgtcatcgtggaaggcgatggcggtgtccggatcgtaggacagattgaactggtcgagccaacggaactcgaagcgagccttggaaatcgcattgtcacgatccatcgcgtgcgggtggtgcttggcgatgtctgcggcgtggcaggcgatcttgtaggcgatcacgccctgcttcacatcatccttgttcggcaggccgaggtgttccttcggggtcacgtagcacagcatagcggtgccgtaacgaccgatctcggtggcgccgatggcggaggtgatgtggtcgtaacccggagcggtatcggtggtcagcggtccgagggtgtagaacggggcgcccttgcacacggccttctccagctcgatgttcatacgcacggtgtcgaacggcacgtggcccgggccctcgatcatcacctgcacgtccttggcccaggcgcgctcggtcagctcgcccagagtcatgagctcggaaagctgcgcggcgtcgttcgcgtcggccagggagccggggcgcaggccatcgcccagagagaacgccacgtcgtacttggcgaagatgtcgcacagctcgtcgaagtgcgtgtacaggaagctctcctggtggtggcgcaggcaccagtcggccatgatggagccaccgcgggagacgatgccggtcacgcggttggcggtcagcggcacgtaacgcagcagcacaccggcgtggatggtcatgtaatccacaccctgctcgcactgttcgatcacggtgtcgcggaacagctcccagctcagcttggaggcatcatcctcgaccttttcgagggcctggtacatcggcacggtgccgatcggcacgggggagttgcgaagaatccactcacgggtggtgtggatgtcgttaccggtggacaggtccatcacggtatcggcgccccacttggtggcccacgtcagcttctccacttcctcgtcgatggaggaggtgacggccgagttgcccatgttggcgttgagcttggtcaggaaggcggatccgataatcatcggctcggcctcggggtggttgatgttgcagggcatcaccgcgcggccggcggccagctcggagcgcacgagctccacatcgcagttctcgcgggtggccacgtactgcatctccggggtgatgatgccgtggcgggcgtaccacatctgggtgatcgggtggtccttggcgcgcatcggctcatgcttgcgtccacgccattccttggtggcgcggccgcgcttgatggcgcgcttaccatcatcctcaaggttgcggcggcggccctcgtagtcttcgatgtcgccgcggtcgcggatccagtcgagacgcaggggcttcaaaccttccttcgggtcgcacttggggccttcggtgttgtagtcgtggaacggcgggttcgggcccacgccgggcgtgtcgctcagcttgatttcggtgtacggcacttccaggtcgtaggaaccatactgataggtgaacggtacggacttggtcttgcggatgtgcgccttgtcgcgctgcttggaaccacgggcggcgatgtccacgcgctgctgcttggcgagcttctgggcatccttggcgtccttggcgttggtgaacttcttctcagtggcctcggagccaggctttgcggccccttcctgagcagcctgagtatcagcagcgggggtgtgggctacgacgcgcggcgcgtagccgtgcttcttgtcgccgcggacggccttccagccttcgaccatggtgcgcgcggcctcttccgggttctcggcacccgcgatggcggagaccgcgaaccagccggcggccttggtgccggcgagcatggccatatcggctgcggtcacgccgccgcccacgaccaccgggaattcgctggcagcgcagatggtgttgatctgggcggcgtccagtgtcttgccggagccgtcgttgccgcccacggaagcctcgggcttggtggtggagacgtgcagagggccggcgccaatgtagtcgatgcagccgtcgggcagctcgttgatgagctgaacgaggctttcggtctcagccgacagacccacgatggcctcgtcgccgagcagggcgcgggcttctcgcggctccatgtcggtctggccgatatgcacaccgtccaccttgatgcccttgcggcgggcctgccacaccacgtcggcacggtcgtcgatcacaaaggccacggaatcggacttctcattgtcctcgatgatctgcgcgatgtcgcgggccatgtcggtcagctcagaggcatcggcctccttggcgcgcagttggatgaaggttgcgccgccgcgcagagcctgatccaccacgtcggtcagcggacggcctttgcagtcctccggccccaccacgaagtacgcggacaagtcgaagttgtctcgcatggaggcgtatgggtattcattactcattattattcctacctttgttgtttcttgtggaagtcttattgggaaaaactgttatgagctccctcatcagagggaactgaaactactgcaccaaaatctcggattccgccacctgttcggcggtaacattccacagcgcgtcaaggaacgcgacctggaacgagcccggcccgtgcgaagtcgtatcggctatctctgccgcgcggttgtacagcagagatgcggacagagcggcggtcaacggatcggaaaccgccagatatgtggcagccacgccgcccagcgagcagcctgcaccgatgatcttggtcatcatcgcgctgccgcccggcagtcggtacacggtttcgccgtcggtcaccagatcggcgatgccggacacagccactgcacagcgggtggaagcgtcatgggaggaatgcttggcgtgctgttcggtcagatactgtgccagcgccaccgccgcaccggttgcggactccacgtcgtcgacggattccactccggcggggcggtgctcggaagcgtcccccacggtttcggtattgagcccccacatgttcgccagcgcgattacctcggaggcgttcgcgcgaatcatggtcgggggagcggccttgaaggtctgaagaatggcggtgcgggtgtggccgatgccggcggccaccgggtcgagcacccacggcttgtccaagtagttgagtcgctgggcgatttcgggcagcgcatccttatagaacggcagcagcgtgcccacgttgatgtagttcgcgcccgcgattttcgcggtttcgatcacgtcgtccggcaggaaactcatggccgcagtgccgccggccgccagttgcgcgttggcaaccaaattgatggtcacaaaattggtgaatgactgggccaatggagtcgtctcgcgtacgcggcgaacggcatcggcgatattgtcgcggatgggtgaatcggctggaaccggagtcccggcggtacaaccgctggacacatcggcaaacgatgatgcactattgctcatttactgctccctacgatggtcttaaccaacaggttctaagggtcaggctcaggcctttctcaactcgcgaaccacatgcgagtccccctgcactacagtgccgacgctatgcgccaacatggacattatcgtgacggatttgttcgatacgtgtcgtcaggtctggcgcgtcccgtccattcgtgatatgtggacgcctccgccgagcaacatctcccgaatttgtgacgctaacgcgatgtcagtggtacaaattggggaagggcaaaacaacaggaacaatatggaggtgtttgcgatataggaatcgctgcgaacggccgctcgtgagacgcggaacatataccggacaatgccgcctgacctgtcaccgtatacggctatcctgaagcggttgttattagaccccaaaccgttcaaaccagaaggtgcattgtggctcagtccaaactcgatgaagtcgtatcccttgcgaagcgtcgcggcttcgtgttccccgccggcgaaatttacggcggcacccgttccgcttgggattatggccccctcggcgtcgctctcaaggacaatatcaagcgtgaatggtggcgctccatggtcgtcacccgtcctgatgtcgtcggtgtcgacacctccatcattctgccgcccgaagtgtgggtggcgtccggccacgtgagcgtgttcaacgatccgctcgtcgagtgcctcaactgccacaagcgcaaccgcgccgacaagctcgaggaatcctacgccgagaagcacggcgataagatgccggaaaacggcatgaaggacatcgtctgcccgaactgcggcacccgtggccagtggaccgaaccgcgcgacttcaacatgatgctgcgcacccacctcggcccggtcgaggacgagaacagcctgcactacctgcgtccggagactgcacagggcatcttcgtcgacttcaagaacgtgatgacctcctcccgttccaagccgccgttcggcatcgccaacatgggtaagtccttccgtaacgagatcaccccgggcaacttcatcttccgcacccgtgagttcgagcagatggagatggagttcttcgtcacgcccggcaccgatgaggaatggcaccagtactggatcgacgcccgtacccgctggtacatcgacctcggcgtcaagccggagaacctgcgccactacgagcacccgaaggagaagctctcccactactccaagcgcaccgtggacatcgaatacaagttcggcttccagggttccgactggggcgagctcgaaggcatcgccaaccgcaccgattacgatttgagcgcgcactccaagcactccggcgaagacctgagctacttcaaccaggccaccggcgagaagtacgtgccgtacgtcatcgaaccggccgccggtctgacccgttccctgatgtgcttcctcgtggacgcctacgatgtggacgaggccccgaacaccaagggcggcgtcgacaagcgcaccgtgctgcgtctcgacccgcgtctggccccggtcaaggccgccgtgctgccgctgagcaagaagcccgaactgcagaccgtggcccagaacctggccgacgacctgcgcttcaacgaatggatgatcgactacgacgagtccggcgccatcggccgccgttaccgtcgtcaggacgagatcggcaccccgctgtgcatcaccgtggacttcgacaccctcgaggaccacgctgtgaccatccgtgagcgtgacaccatggcccaggagcgcgtcgctcttgacaaggtggccgattacgtggccgcccgcatcggcgagaagcgcacccgcgtgcccctgaagcccgtggaaatgggcggcgaggcttggcctgagtccggcgttcaggaagccggcggtctgtactaaagacgggtctgtatagaggctcccctctatgaggggagctgtctacgaagtggactgagggggctcttgctgaggcgactcccctcagtcgcctacggcggcagctcccctcaaagaggggagccaaaactatttcagaacaggaaccacatggcagaatctgaaaccgaaaccaccatcaccgctactcacgagaccaacaatctcgacccgcgtacggacgcgccggcacggcccgagactccggtatacatcgcccccgtgcagctcggcaacattaccgtgccgaccccggtggtgctttcgccgatggcgggcgtgaccaactggccgttccgcgtgatctgcgaggaatacggtcccgatggtctttacgtggccgagatgatcaccgcgcgggccctcgtggcgcgcaacccgaaagccctgcgtctctgccatttcgccaaaagcgaaaaaattcgttcgctgcagttgtatggcgtgaatccgtccatcaccgaacaggcggcgaaaatcgtggtcgacggcaacatggccgaccatgtggacctgaacttcggttgcccggtacccaaggtcacccgtcgcgggggaggctcggccctgccatggaaaaccgacatcttcaccgagctcatccagcgcgtggtcgccgtatgcgagccggcgggcatccccgtcacctcgaagatccgcgtcggcatcgaccataaccatgagaccttcctcgaagccggacacatcgcgcaggaggagggctgcaaggccgtaaccctgcatgcccgcaccaccgccgaatactatggcggtcattccgactggtcccgcatcggcgagctcaaggaacacctcaacattccggtattcggcaatggcgatatctggggtgccgaggacgcgctcgaaatggtgcgcgagaccggctgcgacggcgtggccatcggccgcggatgtcagggccggccgtggctgttcgccaacatcagaaacgccttcgagggcaatcccgaacggctcaacccgaatctgggcgaggtctgccgggtgattcaccgtcatgccgagctgcttaccgagttctatgagggcgatgagatgatggccgtccacgatctgcgcaagcacatcgcctggtatctgaaagggttcccggtgggtgggtccacccgcaaggcctttatggaatgcgagagcctggccgatgtggaccgcgagatcggcaagctcgacccgaccatcgaatacccgccacgcgtggtcgacaaaccgcgcggccgcgtgcgtttcgccaagaaggtgcacttgccgtatgggtggttggaatcgcgtaccaccacccacgaagagcgtgaggcgctcttcggtgacgacccaatggacgccagttactgagaaaatactgaaaatacacgcaacacgcgccattctgcgcgtgaatttccctccaagagtagcctgtttgcgctactcttgggtgtaaccgtgaagtgacaggagccaaacgtgagcgagatcgcgcagaatgagttcaacgacaagaccaacatcaaggttgttggcgtcggcggtgccggcggtaatgccgtcaatcgcatgattgccgagggactgcagaatgttgaatttgtggcggtaaataccgatgcgaaggatcttctgcgctccgacgccgacgtgaaaatctccctgtccgatcagtccagccgcggactcggcgctggcgcggacccggagaagggtgctaaggccgcacaggatcatcagtctgatatcgaggaatccctgaagggtgccgacatggtgttcgtcacctgcggtgagggtggtggcaccggtaccggcgccagcccgatcgtcgctcgtgcggctcatcagcaaggtgctctcaccatcgcggttgtcactcgtccgttcagcttcgaaggtcctcagcgttccgcttccgccgaatacggcatcgacaacctgcgcaaggaagtcgacgcgctgatcgtcatcccgaacgatcgcctgcttgagctttccgaccgttccatcggcatcatcgaagccttcaagacggccgataccgcactcctcgccggcgtgcagggcatcaccgacctcatttcgatgaattcctacattcacgtcgatttctccgacgtgaactccattcttcgtggcgctggtactgcgctgttcggcattggttccgcgcggggcgaagaccgcgccacccaggccgccgaaatcgccatcagctccccgctgctcgaggagagcatcgagggtgcccacggcgcgttgatcaacattgccggcccgaccgatctgaagctgcaggaagcttccgccgccaccgagcttgtacgcaaggccattcaccccgaggcccagatcatctggggtcttgctctggacgatgcctatggcgacgaagtgcgtgttaccgtcatcgcggccggtttcgatccggttacaccgcaggatccctctgccgccgctccggcaattgccgtaccggccgcccagccggctgccacgcaaacgcagcagcccgccgccgctccggccgcccagcccgtggccactccgcgtccggaattcaccccgacgaccgcagacccggcatccctgccctttgacgatccgactacctcgcatccgaacatcgccgtgaacgatcccgccggcgatctcgacattcctgatttcctgcgctgaaaggactgatccatggctgggttcatgaaaaacgcgatgtcctatctgggcatgagcgacgttgtggacgatgaggacgactacatcgaagaggacgaggagcagaagccggctccgaagtccgcattcgattccgaccatacggtcacgccgctggcatcaaccaccgcgcctgccgcatcgtcgactaccaagccgttccccggtggtcgcgtgaacagaatcaccaccatccatccgaagtcatatgaggatgctcagctggtcggtcgcgcattgcgtgacggtgttccggtcgtactgaatctcaccggtgtggccgaagccgtggcatatcgcattgtggacttctccgccggcgtggtgttcggcgtgcgtggttccctcgagcgtgtcactccgcgcgtgttcctgttgagcccggcgcaggtgaacatcaaggtcgaagagccgacaaaaccaacctcgtcccacgatttgttcgctgactgaccggttcagtagttttcgcattcgacgttatatcggtattcggccgactcccagcaaggagtcggccgattcttattgcgctccgagcaaacttttcatgcgcggttgttagtctgtcagcatgctttccttagtgttctctctgatcggccgcattcttgcatggctcatcaacgcgtatatcacggttctgttcgtgcgcatgattctggactgggtctccgttctcgcacgaaactggtatccacgtggtgtggtggcccagctgatcaacattgtgtattccattaccgaaccccctctgcgctggctacgtcgctatattcgtccattgccgctcggctcgatttatcttgatgtcagcttcatcgtgctgtattttgcgttggtggtactagaaagtgttgttctgatagtgttctgaggccgtttttgacccgccggaggcatatatctggcataaaaacccacgttgaatgttctgaaacgatggggtcgtgatagcattctgacttgagaccaacgtaagtgcgggcaatgccccaaagcgaggtgcaagatttatggctctgttgacgccgaaggatattagggagcataccttccagactgttcgattcaaggaaggttatgatgtcgacgaggtcgatgacttccttgatcaggtcacggaaaccgtcgaggctcttggacgtcaggcggtagccggcggtcaggccactcagtctctgggccctgacgtgaccaaccttaatgcgaagatctccgatcttaccggtcaggtgcagcaactccagtcggagaatgctggtttgaagaacgctgtggctcaggcccagcaggccgctcaggctggcaatgatcaggcggcacagcttgcctctgccaagctcagcgaagccgaggaatccaaccgcgcgctgtcctcccagaatgagcagctcaagggtcaggtcgatcagctgaacgctcaaatcgatcagctcaccgcccaggccgctcaggcctccggtaaccaggaagccgtcggccagcagatcgccgccattcagcaggaacgtgatcagttccgcgcggccaacgaggagctgtcccgtcagctcgccgctgctcagcaggagggttccgccgctcagcagcagtccgctcagatcgctgaactgtctcgtcagctcgaagaagccaagcagcgtgaaaaccagcttcgtgcccaggtttccaaggtcgagccgagcactgagaccggttctctgcagaagatcgctggcgtcgcttccatgccgggcaccgagcccgagcgcgccaccgccatgctgaccctggctatgcagctgcacgatcagtacgtggagaagggcaagaacaaggccaaggaaatcaccgaggccagccagaacaagtacaacgatttggtcaccaaggccaacaactactccgagcgtacccgctccgaggccgacgactactccactcgtactcgttccgacgccgacacctattcggatcatacccgctccgaggccgacgcttaccgtgaccagattcacgcggatgccgagacctactcccagaacacccgttctgaggccgacgcatactccgtcaagactcgtcaggatgcggacaactactccaagtctcagcacgatgacgctgacaactacgagaaggaagtgcagcagcgtgccgccgagtatgacaagaacactcgttccgcagctgatgcgtacgacaagaacacccgctctgcagccgatacgtatgccgagcaggtgcgcgacaaccttcaggctcagtccaaggtcgtcgagggcaacatccagagcctcaagcagttcgagactgaataccgcgcccgcctcaccgagtacctcggccagctggcatcgcaggtttccgagtcgaacaactacgtcgaccagacctcgtccaagaccaactgagcgtaggcaggtacaggtcgtatgacgaaccaacagggacggctgcgcactcgcgtggccgtctttgcatgtgtggccgcggctgcgctgattgtcgatcagctcaccaaggcttgggcgatggccgcgttatccaacggtcagaccattcgcgtgattcccggactgctgtcctttaccttggtgcgtaatccgggcgcgtccttgggcatggggtcaggcgctacttgggtaatcagtctgttggccgttgtggcttgcgtggcccttgctgtggctggggtgcgcactatctccatgaaatggtcggtggcgctttctttcgcgtttgcaggtgctctgggcaacctgattgaccgtgttatgtacgctgacggcttcctcaacggcaaagtggtggatttccttaactatggctggtccgttggcaatgtggcggatatctatctggtagtcgccggtgtggtcctggtgattctgattcttatgggggagccgttctcccacaaggatcttatcgagcaatccgacgaatccctacagtctgagccggaggcggacgccaagtaatgagtcgaatggtccctgctcccgatgcattggtgggtaagcgtttcgacgtagccgtggccaaaatgctgggtatttcacgatctaaagccgccgatctggttgactccggacaggcgcgcgttttagggcgtgaagttgcgcggtccagcacgttgcaggcgggggagaccgtcgaatttgatttggcggaggaacaggccgggcctgagcctatcgcaactgatatggctgttgtctacgaagatgatgatgtcgtcgtagtcgataagcctgtaggcgtggcggcgcatgcctcggttggctggaccggtcccacggtattgggatcgttgcgtgatcgtggcgtgcatatcgcttcctatggcgcggccgggcgtgaaggcattgtttctcgccttgatgtaggcacttccggcttgatgttggtgtgcaagtccgaccttgcgtacaccgagatgcgtcggcagttcgccgagcatgaggtaaagaaaacctatcatgcgctcgtgcagggcggtcttaaagagaacaaagcgaccattgaggcaccgatcgggcgcgccaaagtgtccgatttccgcttctgcgtgactccggccggcaaaccggccgttacgcattgggatgtgttggagcgtttcggccatgaggccacactggtatccgtgaatctggagaccggacgtacccatcagattcgcgtgcatttctcctcgattgggcatcctctgtgcggcgaccccatgtatggtgccaatccggtgctgtctgaagctttgggacttgaccggcagtggctgcacgccatgaagctcgaattccgccatcctcgcacccgcgtctggaccacggtccggtcccagtacccggccgacctggccgccgccctcgatgccatgcgtgcccgtcacatcgaacccgctgaacctgccgagcatgccgaaattctggtggactaattccgcaacgtgtgcatcatgcgttttaatatttagattcagttccagcctcgccggattcatcccagaataatgagagatcggtcatgatggctctccgtcatgaccataccccaagtgactgcggatgctgagtaccgttcaggccaatggtcggtaaccgtacgtgaattaccggtatttccgctcaacgtgtctcggtactccagcgtgaagtgaacagaaatgagccaaagcagtaaggctgagtacgagtattcgtggccgtcatcaatcgatggtggtcattgggattcgcgccatgtactacgcagtatgttgtacgctctgcctggctgtgactggattctggggcccgctgccggttgacgaggctgaaggcatgtaaaacttatgcatactgatctgttttcttaaatttggctttatcaatggtgtcgcgcaggctctttacccgcgttcggattcgatcgttcgttttctccatggtcgtccgggctcgatcgagccggaccggtgccatatccggatcgcagatgactggcgattccggaagatctacgaaaacgtcatctttagatgacgattcaacgtttcatattgcaggtctccttacggggcgttacgtccgatcgcattctttgaaaaatgggccacctagatttccgaggagattgaagggcaacacgtgacttcggtagaccaaagctgccggaatatctccgtcaaaccgcctgtagctcgatggtgttgtcgcattgtgcggcgatgccaagatcgtgggtgacgatgatgagggtcttgccgtattcgtgctggaggcggagcatttcgtcgaagacatgttgggcgagatcgcggtcgagcgcgccggtgggctcgtcggcgaggatcaaatccccgggcttcaatatgcatcgtgcgagggcgacgcgctgctgttcaccgccggagagggtcatgatcttgtctcccgcgacatggccgagtccgagccgggagagcatggccttggccttgcgctgcctgacctgtttgctgtcacgggtgaagcgcatgccgagggtgacgttgtcaagggcgctcatgtcgtggtagggggctgcggatgcgggcaagccatttcttggaagacgtttcgtcgagattggcgggagcttgtgtcagcaggcgtcgatgaaggcgctgaggatgcgacgttggttgctatcggcgcggtgagagaactcaggatgccattggacggcccagacgaaacgcttggccggcatccagaccgcctccacgatgctgtccggcgcagtggccatcggttccagtccctggcccagcgtgcgaatcgcctgatggtgataactgttgacgcccagcgtataggcgcgcggatgatacggcctgccgaaggaatcgacctcatcggcctccgcctcactcgggccgttgtctcccagcggccacaacgcgcgggccaacggcgaatcgggcgcgatcgacacttcgtggaccaccgggtcatacggcggcttgtcgccatgatgcacgaccgggctgggatgttcgtccggcagatcctgccacaacgtgccacccaaggcgacgttgaggctctggatgccgcggcagatgcccagcaatggcttgtccgccgcgatgacggaggggatcaggcgctcctccatccggtcgcgggccttgcatagtttgaccgtcttggggccggc

SEQ ID NO: 1040 - DNA, 40078 bp, Unknown
  R13_10m  MAG No. k141_580
catacggttctcgcgacaccactgccacaccgtctgctcgttgaagccctcacgcctcgcccattccctgacacgcatgacttaattatatcacacgaaaacaaactaaagcaaataatcaatctagcaggttataaccccatcaccatctactttttaggaaacatcttcgctgagacctataagttgatccgagagtacattctgctgttggggagcaggattggcgtttattttattcctcgtccgccctgttctggcgcagctgctcaatgagatcgatgacggtttcgagttcaggagtcacatcgtctgaaggacgaacgttatcctcttcgtcgtccatctcatcatcctcatcatcatcggcaacggtgttgttgaggatgtcctcttcggtggcctcgtcgtcagcatcagacttggactcgtcgctggaatcagctgcatcaacatccacaacggaatcggatgcgttctgtgcaacagactcatcaccggcagactgggattgcgaggtcccgtcgcctgccgcctcctcagcgggctcagtatcgacggcgttcccgtcaacagtcttctgtgcttcgatatcatcaccggcaggctcgcctgtcttgtcggtttcgccttcggcctcgtcctgggcaacctgctcctgcttgcacggacggttggcaaccacgtcgatatgcagatcgtcaaaggctggcttggactgcacccacagctggcttggctcgggaggttcgatttcggaatgctcaccgcagccgtggtccagggagaccacgcggccgtcatccggactccacttgttggcgcacacgccgaacatacggtcgagttcgcccgcgagcggcacgaagaaaccacaggtggagcacaggttgccttcggcggttttggtgctcaacgctttggggcctcgcggaccttcataccagcgcttggcagcctgcgcacgacccaacgaggtcagcacgtgacggcgggtcagtcggaaggtctcgacggcatcgttgacatcctgcagcgaggattcctcgacttcgccttcctcgatgcgctcgtcatccggatcggtaccgatcgaatcggtgggagccagatctgtgggctcaaggcgatctttccaaggaatccacttgggcggcatcaacgcgccctcagtggggatcaaggaggattcgttgacggtccaggagtcgatctcctcgtcgtgatacagcgtcaccgaccattgccatccttcgtagccacggatattcgcggcgaagcggaagtcagtgacgtgatcctcaagatcatatgaggtaacgaaatcccccacctgatcgctctcgtcggccacttcgagcagcacggcgcgcgcgatggcgtgagggtccggtgtcacgatggtttcggtggtatcagtcataaatcagatcagtcctgtacatcgaattgatccgccaccgcacgcagcaacgtggccagctttttgctgtcggcagcagatgggtaacggtgacggcgcaacgtattgccggccgcatcaagcatcttgataaggtcctcgcagatggcggccatgtcatccgccttcgggcgggtggccttgaccaagctgggagtggaggcgatcaggcgaacatccatggcctgcggcccacgacggccgtccaccacggaatactccaccttggcccccttgcgcaacgtggtggcgccagtgggtagggcctgagccggcaggaacacgtccttgccttcctcactggtgatgaagccataacccttggctgcgtcaaaccaacgaactcgaccggtgggcattgcgaaccttccttaatcctcaatggaaatagtaaaccgaaggtacagtttacctcacagggcttgacctcacgctttgggctgagtcgcctgagtcttacgctcagagctgaaccaagaagtcttctgtttggcgtccttggttttgccggtgggccgcttgggctcaggagcgacgatctgctcaatcggcagcaccacggtgaaggtcaggcctcccccatcggtgccggtggcgcagataaagccgtgatgtgctttgaccacggattgcgcgatggccatgcccaaaccggtaccacccttttcgcgggcacgggatgggtccgcggtgtagaagcgttcgaaaatcttcgagcgcgattcaggcggcacgccggggccatggtccacgaaacgcaatacggcgtatcgatagccggtctgcatcgaggcacctacttcggcggcgtcgatgaaccgccgcattgacgcgtcgctggcgggcatgcgagcgagctgtcttggatcgatggcggccggcatcacaccgagcgcggcctcggcaggcgaatcggcaggcgtgtagcggtggatgttgcccacgatgttggtcaccacctggcgcagtcgagaggcgtcgccgggcagcacgacctcgggccaatcgccttcggcaaggttgaattcggcgggatggttcaaatcgcgcgccggttcgagggaaatctgcatgcggcgaacggcacggtccgggtcgagcgcatgcaagtcgtcgacggcgtcggtgaccagcgacgagagtttcaccgtgccggtcacatcgatgccgcgcccctcatcgagacgggccaaagacagcagatcctcaacaagaacagtcatgcgctggctggaccgttcgatatgtccgatggactcgtccgcacgctccaaggcaccaggcatatcgcgctgcatcttatacagctccgcatagccatggatggcggccaacggggtgcgcagctcatggctggcgtcggagacgaaccgtttcatcttgtcggtggtctcctcctgttcatggaaactggattctattcgggtgagcatggagttcagcgaggcggccagggagccgacctcggtgttttccggcgcggaaggaatacgttggctcaggtcgccggcggcaatctttgcagcggttttctcgatgcgcttcagcggcgtcatcgtgtgctggatgatcagcgtggacagggagccgccgagcagcaccacggcgatgccgaccacaatgcagtatcgggtgagtgtgttgacggtgtcgatctggtcggccagtgacaagccgatgtacaccacggcacggtccttgccgttttgctggaaggtcaccggcagaatacgccatggtgccctcgccgtgacgatggcggcatggttggcattgacagtggggttggccagtaccttggcgatggtgtcagaggaattggagtttccgttggccggatcgttctggctgtccgcactgtcggactgcaccgtgatgatctgcttggccactgcctgcgtagtgaatgcctggccgagcgtgatgccactggtatcaccataggtaggaagaatcggcaccgatacgataccgtcctgcatctgcggcatcagcggggtcacgaccagaggattgccctctttgtctttggtgccgtcagtatattgaatctgcagaaagtacgagttcggccccgatgagtcattttttgacagcagatcgatattgttgaccaccagctggctttgcgagcttaactgggtgtcggttttctgcagcatgtagttgttcaccaacgcgcggatggagaaggaaatcaccgacacgccgataagcagcacggcgatggtgcaggccaccagcttgctgctcaacgagatacggtcgatatgccgcatcagcatgtttttcttacgttcgtgccgctcttggaaatgggcggcgaacggcggcattgcaggcatgggattcgtgttcggggcggcgttcggcgtgctgctcggcggtacgccgcctgactgcttatcggggatactcatgagattgcgatgcgttatggatggggcgactagttcttcggttcgcgaatcatatatccgatgccgcgcttggtttcaatcagcgaagtcaccttgcgcttgccgccttcgccgtcgtcgacctcgatgccgtcgactttcttgcgcaggtaggagatgtacgattcgacgatggctgcgtcgccgccccagtcgtattgccagacatggtcgagaatctgtgccttggacagtactcggccctcattgtccatcaggtagcgaagcagcttgtattcggtggggctcaggtcaaccggctgccctgcacgggtcacatcgtgggagtcctcgttgatttccaagtcggcgacgcgaataatcgggtcgtcttccacctgttcgcgggtacggcgcagaatggcgcggatgcgagccacgacttcctcgaggctgaacggcttggtgacgtaatcgtcaccgccgacggtcaggcccatgatcttgtcttgggtgtcgtcacgagcggtgaggaacagcacaggggcgttaatgccttcctggcggatgcggcgggtgacggtaaatccatcgatgtcaggcagcatgacgtccaacacgatgagatcaggctgcactttttcgataacctcaatggcttcggaaccggaagcggcggtgtttacctcgaatccggcgaagtgtagggaagcgaccagcagttctcggatggacggctcgtcgtcgacaacaacaatcgatgcttcaataggcttactcatgcttcctagagtgtcgcgctcttctgggcgtttcctgaatgtcatcttggagttcggccttggaatccttcttgatctccttgcgccgacgaatcaccaccatgaccacgatgatgatgaccagcgccaccaacaccacacccatgatgattatgcctacggtcaccgtggatgatgaggtggaggcttttttggatttcacgatttgatccatcattgccgttgccgcgccagaccagctcggcgggttttccagtaacggctgctgtgcggcttcggatagcttatcgacggttttgttatcgagaagccacttatcggagttcttggacacgacgaccaccaggttgccgtcattcgaggccacggcaagcatcactgtgttcggcttgggattcatggactccatcacggttgccgcccagtcttccggtttctgttgactattgaaactggaaagatacagcagatgcacgtgtacaccggtttccttctcggttttggcgatggcatccgtgacttcggccgcatgggagcccaggagattttccgtatccgtgatgttctcggtgatggtcacgccgctgtcggtgctgctgctggagctgtcagagctgtcgcccgagttatccccataggcatttgcggttatccacattgcgttcatcgctactgcagcaaggacgcaaatggcacaaacaagccattttcggaccatattcccgaaggccgaacaggacggctccgaagataggaccacaatagttgtttttccgtcttcccgattcgttgttgacatatcctccaccttagcggccggtattggcaagcggccgccatacataccattaaccctctagaaaaggagcaacgatgccccaatatcaggtagattccgagcgaatccaatcatcctcggccgcagtggccacttcgatctcgcagatcaggcaggccgtgggcggcatgtacaccaatctcaatgccttgcaggatgcatggcgaggttcggcggccacccagttcaccgcggtagccgaacagtggcgtgcggcccaacagcagatggaggcctcactcgagtccatccaacgctcgctgacgcaagcctccaccgtgtacgctgacgccgaaatccaagcttcgcgcctgtttgccagctagtttcttggctctcctccctgaggggagctcgatcgcgaagcgaaactgagggagtatccctacaccgcagctccccttagtctcactgcgttcgacagctccccccaaagaggggagccagaatacaaaaaaggggactcccgaaggagtcccctttcagctcaatcagctagcgatcgcttgcggatcagtagcccatgtcggcaccggcggccggggcagcaggcttcggctccggcttgttggcaacgacggcctcggtggtcaggaacagaccagcgatggaggcggcgttctgcagagcggagcgggtcaccttgaccgggtcggtcacaccggcggccagcaggtcttcgtaggtgtcggtggcggcgttgaagccttcgccatcaggcagggaacggacggtgttgatgaccacgtcaccggacacgccggcgttctcggcgatctgcttgatcggggcttcgatggcgcggaacacgatggcggcaccggtagcctcttcgccggtcagggaggcgacggcctcggccttctcggctttggcagcagcctgaacgagggccacaccaccgccgggcagcaggccttcctcgatggcggccttggcgttacgcacggcatcttcgatgcggtgcttgcgctccttggcctcaacctcagtggcagcgccgaccttgatgacagccacgccgccggccagcttggccagacgctcctgcagcttctcacggtcgtaatcggagtcggtgttctcgatctcagcgcggatctgggccacgcgagcgtcgatgtcttccttggagccagcgccctgaacgatggtggtctcgtccttggagacgatgaccttcttggcgtggccgagcacggaggtgtcgacggactcgagcttcaggcccagttcgtcggagacaacctgagcaccggtcaggatggccatatcctgcagcatggccttgcgacggtcgccaaagcccggggccttgacggcgcaggacttgaaggtgccacggatgttgttcaggatcagggtcggcagtgcttcgccgtcgacgtcctcagcgatgatcagcagcggcttgccggtcttcatgaccagctcggccacgtgcacgatgtcctgctgggaggagaccttgccggaggtcagcagaatgtacggatcttcgagcactgcggtctggtcgtcagcgttggtgacgaagtacggggcgatgtagcccttgtcgaaacgcatgccctcggtgaagtcgaggtccaggccgaagcggttgttgtcttcaacggtcacaacgccgtcctggccgaccttgtccagagcctcagcgatcttctcgccgacctcagggtcggcggcggagatggtggcggtagcagcgatctggtccttggtctcgacgtccttggcggcggcgacgagttccttgacgatgacctcggtggccttctcgatgccgcgacgcagggcgatcgggttggagccggcgaccacgttcttcagaccctcgtgaaccagggactgagcaagcacggtcgcagtggtggtgccgtcaccggcgacgtcgtcggtcttcttggcgacttccttgaccagctcggcgccgatgcgctcgtacgggtcttcaaggtcgatttccttggcgatggacacaccatcgttggtgatggtcggagcgccgtaggtcttgtcgagcacgacgttgcggcccttcgggcccaaggtgaccttgacggtgttggcgagcttgtcaaggccctccagcatgccctgacgggcttcctcatcataagagatgatctttgccatggttgcgtattcctccaaatggctaggtataccggttatcactcgcaagcgtcgagtcgtgacgaccagccgtcagctgccgattatcactctcgacctccgagtgctaacccagacattagcactcgcgaccgccgagtgccaacatcatcggcggcgattgcgctttgggcatgaaaaggccccaaccgtcgaaacggtcagggccttcaatgcacatccttgcgtgcgtgttgctcactcggagcgggcttcacccgaagacagcttgacaacatcctttgcctgcgtgcctttgccggacgaagcgggcgtatactccacgcgatcgccctcgtacagcatcttgaacttattggtgctgccgtcgtccttgatttccgcgtagtgcacgaaaacgtcctcgctgccgtcgtccggctggatgaacccgaaccccttcttggcaaggaagaacttcacggtaccttgtgccatatctgatctttcctttgttcccttaggcgtcgcgacacaaaacctatagggaacgtagaaagaaccgcatcgcgctcccctacctcgcgactagatgacgattgtacagtgacgagggaacaatcccaaccgcagtggcacattttcggtacgaattatttcatagacgtgagaacgctcacagttttcgatgtattccacgccgatatcaggggcgcatcaacaacgctagttgagcagcaccaccgtaatgggaacggcgagtccttgcacctgctccacagccgaaatgccaagcgtggtcgccacatcttcggcggtggctttatcggcttcattctgataccataccacggaagaagccggcaatgtgccgcgcggattggtcgcctcgacgctggtgtaaccggcggtctgcagcacatcggcctgctgacctgcatatccttggattcctgtggcgttgaccacacgcacctgcgtggccttattcacagtcgcggtggctccggactgctgagactgctgatcggagtcttgattctcattcgaggatgtcgtatcactgttggtatcggattttgccgaatccgaagtcgagtccttggacggatcggtcgaagtggacgaggaatcatccttggtgctgtttttggtctcagccttgctggacgaatcggacttggaagcagtcccggacgtggtcgcagtctgggacgatcctcctattgcattcctgtattccccggaaatccatgcccagaccccgacaccgcacagtgcggccaccagaataacgacgatgaacgggcagaggcgggccactgccgaacgagcgccacggtgaactcccaccggtcccttcggaggattgtcgaaggaatccggttcataggattcgtaggtcatcatgtcgcgtgccataatcgccctttcttcctgtcaaaactacccatgagtgtaatcggcaaacaactcatcagtccaccacaccacgcctcgtgcaccggatatgcacgtttgactacagtggtgagtcatgatcaaaccattgagcgaactggtagagccggggtgggcccatgccttggccgacgtggagcccgccatccaccatatgggcgattttcttcgtgcggaaaacgccgccgggcgcccgtggctgccggcaagccacaatattctgcgcgcgttcaccatcccgttcgattccatcaaggtgctgattgtcggccaggacccctacccgaccccgggtcacccggtgggtttgagcttctgcgtggcgccgaatgttcacccgctgccgaaaagcctggtcaatatttataaggaattggttgacgaccttggggtgcccatgcccaccaacggcgatctgacaccatggacggaacgtgaggtgatgttgctcaacagatgtctgaccgtcggcgtcgggcggccgaattcgcatcagggcaaaggctgggaggaagtcaccgaggccgcgattcgtgcgttgaacgcgcgcacggacgccgacggcaagcccaagccgctggtggcgattctctgggggcgtaatgcgcaaagcctcgagccattgctgaccaatgccttcattatcaaatcgcctcatccgagtccgctgtccgcttcccgcggattcttcggctccaaaccattctccagagccaatcaagccctagtcaccatgggtgccgacccggtggattggactctttagacagaccaacagtcattgtgagtagttacagtgagggcatgactttgttccccacgcaaccgaacataccttcgccgaccaccgccgcacgaccggtcaccgttcccacgcccggcgtgtcggctccgctgggtgccgatgacgccaaacgcgcacgtatcctggccgacgccattcgggcgaggttcgcccagacactggtgggtcaggataatctacgcgaatcgcttatcgtgaccttggtggccggcgggcatattcttatcgaatccgtgccgggcttggccaagaccacggccgcccagacgctcgccacctgcgtatccggctcgttcaaacgcgtgcagtgcactcctgatctcatgccatccgatctggtgggcacgcaggtcttcgattttgcgtcgcagaagttcaccacgcagatcggcccgattcacgccaatttcgtactgctggacgagatcaaccgttcgaatgccaaaacccagtccgccatgcttgaggccatggccgagggtgccacgaccatcggcgggcagcgtatcgccttgcccaagccgttcatggtgatcgccaccgagaatccgattgaggaggagggcacgttcaacctgcccgaagcccagatggatcgtttcatgatgaaggccgtcatgacctatccttcgcccgacgaagaggctcgcatgctggccatgctcacccaccgtggctccgatatgatcggtcccgacaccatcaccggcgaacgcatttccgtgtctgacgttgattttctgcgcaaggcggcacgccgcgtgcatgtttccgacgcgatcatgcgttatgcggtcgatatcaccgccacgtcacgaggtgccggctcccgccccatcaagggactgtcgtccttggtacgtttgggtgcctcgccgcgcgccaccatcgccttgacccgtatcggccaggcgaaggcgttgctgtccgggcgcgactatgtggtgcccgaggacctcaaggcgttcgctcatgaggtgctgcgccaccgtattatgctgacgttcgaggcactggccgatggcgtggtcagcgatcagatcgtcgacaagatcgtcgaaacggttcctgttccgtgagttccgattccgttcgcaagaaaatcgaggcccttggcactcagctgagcctgcctaccgtaaggaaggctttgggcgtgctggagggcgaacacgcatccgggcgtcgtggcggcagcggcgatgcgatggatgtgcatgcctatgagccaggcgacgaatcccgtcttatcgattggaagaccagcgcccgccaaggccgccccatggtggtcgagcgcgagcgcctgtcgacgtcacgggtctggttgctgatggacgttggcctggagatgactggcgtatgcccttccggagaacgcgcatggcaggttgccgccaatgcgctgcgtatgttcgccgcactgtcgttgcgccggtcggacgatatttcgctggtgttcggcgatgagtccagcatcacccgcgtgccgttcaacggtgggttcgcgcagttcgaacgcacgctggacaaggcgcttgatcgtgattgggatcatcaccgtaatatcgacgcgctgctggaatatgcgcgccgtatcaaggatcgtgaggcattgatcgtattggccaccgatgagcatgcgatggaggagcggcatatcaccacgatccgtcgtattacccgcacccatccgatggtgctgatcgatgtggcgacgatgaatccgttcaaggccgtctcatcccgccacgctcccgccgacggcttgagtgcacggcgtgtgccggcattcctgcgcaacgccaaggcagcggccgaggtcgatactcatcgcgcgtatatggccgcggctttggaacaggagctcacccgtgccggttcccatatcattcgagccgcatccagcgaatccatgttcgatcgtttcgtcgccctggtgtcccgggcattggcccgcaccacacgcaatagactgggcactgcacccgaactggtcggactgactttggcgggtgatctatgatgcacagcatgttccccatcatcccgctcgccactgatcccggcgatctcaggcccgtggagtcgttggccttgaccactcccctggtgatggccatcgtcgcatgcctgttgctggcggtaggtctgatcgtgttgatcatcatgctggctcgccccgcacgcaaacctcggaacagcgaccgtgcgcgtggcactcatagcaatgccagctccaaggccgagtggcgtgcccgcatcgacgatgtggtggcccgtcatgaatccggagcactgccccggcatgaggctttcgtcgaattggccgtcatcgcccgtgatttcgccggtgccgcatcaggcaaggagcttagttccagtacgctgaccgatttggcgtacctgaatcgcacgcccgcgaatcgccaaggattggacgcattgaagcagaccattagcgcgttgtatccaccggaatttgcagatgatgcccgcaaccgaatcgcccagacgaccagcgtgcagcaggccgccgagtgggtggcgaatctggtggaaaggtggcgttcatgatgctggcatggcattggccttgggccgctctggccggcgtcttggcagcgctggcgattatcgtgctgattgtcgtgttcgcccgccgtaacgccgccgacgacacccctgtattctcgatggacgacgatctcaataccgagcacgcttcccgtctgttccgtcaatggcgcgctttgggccgtctcgccatcagcgtgctggtgcttgcgctggcgctggccattgtgctggtggctcgccccagccaagtggatgccggtgacgaacgcgcttccagccgagatatcgtcctgtgtctggatgtgtcgggatccacgctcccctatgatcgcgaggtcatcgatacctatttggaactggtcaagcatttcgagggggaacgtatcggtttgagtatcttcaactcgacctcacgcacggtgttcccgctgaccgacgactacgaactggtcaccaaacagttgacctccgccagcaaggcgctgaaaggcgtcgagtcgcaggatgacatcgataagatgtccgatgccgaatatcaggacatcgccaattggctcgaaggcacgcagaaccgcaaggacgccacctccttgattggcgacggcgtggtgtcttgcgcggcgatgctccccggtttcgcttatggcgaagccaatcatgcgaatgccgaccgtcagcgtgcggcatccatcgtgctggccaccgataacgtcgtgtcaggcaaacccacctattcgctgaccgaagcgttggacttgacccagcagaccaaaatcaccgtggacggcctgtattccgggccgaaagccagtgaatcggaccaaaccacaacggatatgaagtccgcgatcgagtcgcatggaggcatcttcctcacccaatcgaatggcgcgtcgatagatgagctggtacgggatattcagtcgcgtagagatacggatgtggagaacaaggcgaaatcctcaatggtggacgctcccagtctgtggacgcttgctctggccgtgatactcattatctggatcgtatgtgcatggaggttgagacgatgaacggattcaccttctcccccgccttgggctgggtcgccggcggactgctggcggccgggctcgccgtactggccattctcgaaatcgtattgtttgttcgccgccgtgcttccagtgacgagaccgtgtgggcttgcatacgacgtacgcttatgctgctcatcgtagcggtgatggtactgactcccagcgtggtatcgtctaccacctcacaggtcatcaatgccaccgacgtcatcgtggcggtggataccaccgggtcgatggcggtggctgatgccacatacgggtccgagaagaccattacccgcatcgatgccgcgcgtcaggccgtgcatgatgtgaccgctgcttacccggacgccagtttcgcggcgttacggttcggtgcttcgggaacacttgatgtgccgctgaccccggatgcgccggccatcgataattgggccaacacgttggcggtggaagccacatccgtgtcggcgggatccagtctggatgctccgatcgatcaattgctgctgaccgcgaagtcgattcgtgaagcgcacccggatgatgcgattgtgctgtacctcatcactgacggcgaacagacctcgaatgtgacgcgtcgtacgttctcgtcactgcgacagtatctcaatgatgggtttaccgtgggcgtcggctcgaccgagggcggcaagattcccgtcatcgccgatggcgtcagtgccggcgattccaacaccacggaccactgggtggtcgacccggataccggcgaacccggcatctccaagatggatgagaagaaccttaaagacattgccgacgagatcagcggcacatatgtggccgtggacgcttcacagactttggcggattcggtttcggccaagtcgtcgaagcagtggcgcatgaccaccacggtcaaggaacgcacacgcaccacgccggtggtatggccgttggccattgcgttggcgatattgcttgccatggaagtcggtgcatggatcgcaacctcaaggaggctgctgtgagaaacagtaacgaaatccacaagaacgatggctcggcgaatattcggatgcgggcgaaatgcccgctttgggcacgtatcgtcctggcttgtggcaccgtattgctgctgctggttgccggcgtggcggcagtaaacctgtccgcttcgattacgttcaatcaggccaccgcatcattgaatgccaatatcaaagcggctcaggatgagtccacggatatcaccacgctcaaggcgcaacagcagcagaccgatgcgcaattcgccgaggccgggcgaatgcgtacgcttctgttgccgcaagtcaaggacgccatcgacaccaatgcttcgatttcttccgagctgacgaagatcaccctgaaacaggccgaggcgcagaacagcggttccgattccgggcaagcccagtcggcgcagcaatccgagagttcctcagccaatgccaaaaagggcggcgcgttgaccgacgagcagaagaagcaggtcgaggagctgatgaaggccaatcagcaatccaccgatacccagtcgaacaccacccaatccgagcagaaggcgacgcagaacaagggtaccggggccaccaagccgtggtaagcagtcgttcacggttgctctttttctcacatcctcacgggtcatggccttatcgcggctgtttcccggtttcggctgtcggctttggcgtttgtctgatcccgatagcccatggctgatccaaggtgtgcccaaacaggctatttgtggataatcgttacggctatacacaacacttgtgaataacttcgcccaaaatcggcaagctagaaccacattggtcgttccggctggacaagcatgagtcctgtccttttagctggatatatgaatacctacaccagcaccccagcacccatcgatcccgccggcggctttgccggcaatacggtgacgccgttcgattacggcacttgcccttgccatgcggcggtacagcgtagtcgcgacctcgtgtccgtccaacgtgcggccacactggcgcaatcggaccagatggcggtggccgtgaaccgctcccgcaacatcgtgtggaccggtaaagccgccgacctattccgatcgcggctcagtcgcaccgcacagtattcggccagtctcgcgcaagacatggagaccacccaccgattggcttgggggtcatcatgagcgagcacgattactggcaggtggaatcgtccgtttacggcggagtgggatatgcgccagccactcttgaagaatatgccgccatagccaaggctctcgatgacgaggcggcaggatttgcggccatagccacggcttgggaatcggccgcattacagttgcagtcacatcggcatagtgcgccgatgtgcgtcaccttgcagtcgggcgatccgagcgccgttgttcccggccatgtcactgcaccatatgccgcgctgggcaatcggtgttatgaccatgcaacggcatgtcagcggttgagcgatgacctgcgtggcgcggccgatctgctgattcgcgcacactctctgtattctcaggcggagatgacggctcggcgcatgtttaccgaattattgcaggccggtacacaggccaaaccgggatatgccgcggtgggtgttgccgctgtggcggcgggcggctttctggccggctgggctattgacggcaaaccgaacccagcatggatgtccacgttcacctatccgttccaggaaggagtgctcagcggcgcgggcggaatcattggcggcgtacctatcggcaagagcattgcgcacaccgatgaggtcaacaaggctgcggggaaaatcgccaatttctccggcccggcgaaagacgtcgtccaaggcaatcatctgaacgtgcgcgaggtgcaggcgaatgccgacgtcgtccgtgcaagcggatcggtggccgagtcaatggagaatctgcgcaggctcgccgaagaacggctcggcaaaatcgagctgaacagcggactcgaatatgggaccatcgccattcaacgctatgaacgggctgatggaaccaactcctggctggtcaccatcccgggtaccgatggacaacctgactcaccattcggctgggcgcagaacgtggaactgatgagcgccgatcaggagcgccgcaggaaagcggacagcgctcgcacggttgccgaggcgatgcgtcaggctggtatcggcaaggacgagcccgtggcactgatcggccactcccaaggtggcatcgttgccgccacgcttgcctcggattgggcagaggaatataccatcgagcatgtggtgacagccggatcgccggtggccaatcatccgattccgcaacgcacgtgggtcaccagcgtggagatcgatgatgaactggtcgccgcgctggatggtgccgccaacccggtcaccgataattggctcaccgtgcaagggcatgtatcgcccgcgcccacggcaacaccatccacagtgcattcggacgtctcatgcactcccggcgcaacgcccatcaacggtctgaccccatatgacgccgcatccgtggctggttcgaccaacggcagggagttgtcgcattggctcaaataccatcaggccgcttatcagaacgccaccgacctcggctcccccgccgtgcagcgccacgaagcgcattttcaggaagtcatcaacggagaactcaaggaaacccgctattaccaaggccgcatgacccagtccacaaccattgctcccggcgagcgcaccaccgagttcagcacgttcggcggttaaaagtaaataccacacttgacagagttgtcaagaaaggagttaacaatataatgacgagtaggagatggctcatcaaactgatgaagcaagcggcgaaacgcaagaatattacgtttgagagtatcaggcaaagagggagtcatgagatattccaactcgatggactcatgattcccatcccacgccataacgaaatcgacaacgacctcgcgaacatcatttgtaaggaagcagaagccaaactcgggaaaggctggtatcagcagtgaaaacatatcaggtcatcgttcgtcctggcgaaaaatactggattcttgagattcccggtatcggtttcacgcaggcaagaacaacagcagagattgaaagtatggcacgcgaccttatcaccgtcatgacgcaagatgctgatttcgcactcaccatagagacaaaactgccgcaatccgtacaagagcaccttgatgaagctcggcgactgcgcaaggaagaagcggaatgcagatcgaacgcagcgcgggaaactcgcgccgcggcacaagaactacatggcatgggtctcgccctacagcaaataggcgatatactcggggtctcacggcaacgggcacatcaacttgtcaatgctgtcaatgcttagcatcaatcggctaccccccacaatgcaatcaccgcagagacgcggctagcgccactttcccgggattgttgcgctagcatgcccgaaaccccctctatcagcgcaacatccccgggaaagtggcgcgcaaagagtgtcaggcgcgtcgctcgatgagtgcgcggccggatgcgaggcggtcgagcacaccggttttggcgatggccagcatcagataccaggccatcacgccgctgataagcacgccgccggtgacctcggaaatcatgtgcacgatgccacgcgggctgacgaatgacacacccacgtagcgaaacagcatcagatatgtgccgtattccaaggcgaccaacgcaccggatgcaatggaaatcggcagattgaacatgcggtaacgggtcaaagcgaacggaatctcagcgaaaacaccctgcagcagcgccgagataatcacgaagcccaaatcgaactggctaccaatcaccgtttcgaccagcgtgccgataaggttcacgtacagcgccgctccgggtttgcgcagaatcagcaccgccagcgtaccggagaaataccagacggcgtgcacgatgctggcgaaaccgggcagaatcgcgccaaacaccgaagagatcggcatgtacgcgaagttgaatccccagaagatcacgccgcaggccgcgcccagtgtggcaccgaccgcgatgtccaacggctgccatttcagcgacgatacggcgaccgaacgtttcggaagagtatgaatggtggttgcaggcatggtgatctcctagccttaaaggccgcacacagtaatcgaatcacgggcgttccttgacctgtgcggctcgggcgggaacgccacaccacagtgtagccgctcggttcacggctggaagtacccttggaggttatgaagcttaccgatatttcccccgcaatcgcattgaccccgctcgacggccgttaccacaaggccaccgccccgctcgtcgaatacatgagcgaacctgccctgaaccgcgaacgcatgcgtgtcgaagtcgaatggatgattcttctggccaacggctttgagggcaacggcaaccagccaatcgttgacggcgtcaagccgttcactgccgaagagcaggccttcctgcgcgccattcccgaggacttcggcgccgaaggcatcaagcagcacgccgctcatgaggccatcacccaccacgatgtgaaggccgtggagtactacatcgatgatcagatcgacaaggctccggccgagctggccaacatcaacgacgagctgaagaccctcgtgcacttcgcctgcacgtccgaagacattaacaacctctccatcgcccgttgcgtcaagaacgcgatggaaaacgtgtggaccccggagttcaagcgcatcatcgaccacctcgccggcaaggccgaggaattcaaggatatgccgctgctctccctcacccacggccagccggccacgccgaccacgctcggcaaggagctcgccgtctacgtctaccgtctgaaccgtcagctcaagcacatcgaaaaccaggagtacttgggcaagatcaacggcgcgaccggcacgttcggcgcccacctggccgcatgcccggatgtcgactgggtcgccgtctcccgcgaattcggcaccaaccgcatgggcctgacctggaacccgctgaccacgcagatcgaaagccacgactggcaggccgagctgtactccaccgtctcccacgccaaccgcatcatgcacaacctgtgtgtggacgtgtggatgtacatctcccgtggagtgttcgcccaggtgccggtcaagggtgccactggttcctccaccatgccgcacaaggtcaacccgattcgtttcgagaacgccgaagccaacttcgaaatcagctgctcgctgctcgacaccctctccgccacgctggtggaatcccgttggcagcgcgatctgaccgattcgaccacccagcgcaacatcggttccgcgctcggctactccttgctcgccctgaccaacctcatgggcggccttgagtccatccacccgaacacccacgtcatcgagcgtgagcttgatgagaactgggaggtgcttggcgagccgatccaaaccgccatgcgcgcctgcgagctcaagggcctgccgggcatggacaagccgtacgagaaggtcaaggagcttatgcgcggccacaccatcaacaaggaacaggtcgagcagttcatcgaccagcagtccttcgacccggaaaccgccgctcgcttgaaggctctgacccccgccacctacaccggtgtggccagccagctcgtcgctttcgaccgctgaaataggtgcgatgcgagtccctcgagcccatcgcatccaccacactactgcgctgagtcacaaaccaaaccgcaaactgaaccgaacaaggacaggcgtcaggtaaccatttcatgactactgaacaggagcagtccactacggaagatcgcccggacaaggcgacctcctccactaccgaccggccgatcgcctctggtgacggccggtcggccagttttgctgtcagcggaccggacagcccggcaaccgacgacagcaacgattccggaccgtacatcgacgacatcgctccgcgccgcacgcgcgacttcggcgatctgacccgggccggtctgtcgctgttgatggccgccgtggtcatggtgttcgccgtgtatctgggcggcatgacgcgcggcgtcgaatccgacgcacacaccgcagcccaggtcatcaactggttggctgacttcccctccaccgtgctgacgcagctggccaccatcgtcatcgtgatcatcgtgctcgctcaattgctactggcccgggaatggctgcaggccgcggtgtccgcgctggccatgttcgccggctacggcatggtgtgggtcgtatcgacggcaatcagcagtctgaacgatttcaccctgccaatggcactagtctcagccgccacctcatacggctccgggctgttgcccgacatctacgccggcatggcgtccttcctgaccgccgccgggccacgccgcacccgctccacggtcaaatggagctggaatatcctgtatgccatcgctgcggtgatggtggtgctgtcgtggcattcggtcaccggcatgctggtgtcgatggccgccggccgcacagtgggcatgctgatccgattcgtggtcggcacgcagaacaagggcgtgtggggccaagatctggtcgccgccctgaaaggcatcggactggacaccgcctcgctgattcggcatcaggagcccggcgtcggccacggttcactggccgtcacgctggacgacgatctggccgaaggctcgcgcatctacgatctggataccacggacaaccgtcgtttcatcgtttccgtcatcgacgcgcaaacccataccgtcggctatctgaagcagttgtgggactgggtgcgtttcaccagtgtgtccatccgacgtgaccgttccgtgcgtgacgccgtccagcatcatttcgccatgctgctgggtctgcacaatatcaaactgcccgcgcccgcaccctacggcatcgccgataccgacgaatccgcgattctggtgctggatgcacacaccatcgaactgcccgccaacctgaacacgcttaccaaggcggatgccgtggcctacatgcgctacctgtccgtggcgagccggcgcggctatacgcaccggcgcatcacgccggacacgctcgcccggcttgaagacggcaccgccgtgattgccggctggctcaacggcgacaacgcttccggtccggccaacaccgcgctcgacaaagttcagctgctagtgctgttcgccgcgctgatcggcgtggaaccggcggtggaggccgcccgcgaggcgtggggagacacgactctgacggccttggccccgttcattcagaaggtcgcggtcccctcccccacgcgcgcgctggaatcctgggacaagcagctgctcaagggcctgaggagtcgtatcaccgcgctggctgacgaggagacggtggaatccgccgaaccggtgacgctggcccgattctcctggcgttcgatgatcaccatgctgctggtcatcgtggccgtggtcgtggtcttcacccaactgaagcccgaggagatcatcaccgcgctgaccaacgccaacccgttgatggcggtggtgacgctcgcgttcggtgtctgcggctggatcggctcgtcgatttcgctcggttccctgatggcgcggcacaagcgtgacaatatgggcgtcttcatgagccaggtggcaggcggcttcgccaccgtatccatgccagccggcgtgggcccctcgttcgtcaacctgcagttcctgcgcaaatccggctatcgcaacacccaggcgaccgcaattatgagcgccgtgctcgtggtgtattacgccgtgtacttctccatgctggtcatcatcggcctgttcaccggccgcaacatgttctccggcgcaatcccgacaaacacgttggttatcgtgctgggcgttgtggtcgtggtgctgtccattgcgatgatgattccaccgttgcgccactgggtgacccgtcgtcttatgccgctggccaagacgtatatcaaccagctgctggacgtgctttcccagccccgacagctcacagtcagctgcctgggcgcgctgttccagaacgccaccactgggctcgctttctgggcggccctgcaagcgttcggccattcatcgaatccgattgaaacgacgttcgtcttcctgctggcctatgcattgggttccgcagtgcccactccaggcggtctgggcggtgtggaagcggcgctgacattcgcgttcgtggcggtcggagtgccgcagggcgtggcgctttccgccactttgctgcaccgcgtggtgttctactggctgcgcattccgctgggcgcggcggccatgaagtggcttgacaagcataatcttgtctgattcgtctattttcatacccccttcggggaaatagatgtgaaaacccttataaaacgcgggttttcgcagaaacatgcgctagtatcattgatgacaacatggactaagcaaaagtgcttgtcccctgacccaagaaggatgctttatggcatacaacaagtctgacctcgtttcgaagatcgcccagaagtccaacctgaccaaggctcaggccgaggctgctgttaacgccttccaggatgtgttcgtcgaggccatgaagtccggcgaaggcctgaagctcaccggcctgttctccgctgagcgcgtcaagcgcgccgctcgcaccggccgcaacccgcgcactggcgagcagattgacattccggcttcctacggcgttcgtatctccgctggctccctgctgaagaaggccgtcaccgagtgaccttctgctcgtagcgattacttcgagcattactgacgacaaagaccccgaccgagatggtcggggtctttttgttgtggtgctgtgacgtgttgtccaaccgtattattccggactagttcagcgcttccataagctgctcgaatcccagggtgggctcggcctcgaagggatcgaggagtatggcttcccggcgttcgggggcggtcagggtcaggtgggtccagtcggcggagaactgggctccgacgttcagggccgcgtccacgaaccggccacgcagggcggcacgggtgtcggtcggcggattgtgcacggcgtattccacgttgtctcctgtcagcagctcacgcatctggttgcgggctacgagcgaaccgtacaggcgaccgttggcgatgtcgtggtagtcgagctcaagctgttccatctgagcgaaggtgacgtccgggcgacggcgtttgagcgcgtcgaacagacgcttcttggcggcccagtccacgcggtcggcgagcgcatcgtatgcaccacgctccagcgcgtccagaacgcggctccactcccccataatcgcgtcgatcgtggtggcaggcagcgaacttgccagcgcatcgccatgggtttcgatgaaggccttgaccgccgcataataccggcgctgcagacccagtgcggacacggattcgcctgattcgagcgtcagttcggcgcgcggattgtcaaggaatcgactgaccgtgcgattggcggcagccggatcagcaaaggcatactgctcgaatccggacggaacgccatggcggaaggcgtcttcgatcgcgcacagcacaaggtgcgtgacggcaagcttcatccatgtggaccattgcgaacggttcgagtcgccgatgatcacatgcagccggcggaaggagtcggggtcggcgtgcggttcgtcgcgcgtgttgaccatcgggcgggagcgggtggtggccgaggagacggcctcgtccaggaagtccgcgcgctgggtgatctggaagccgtccggggtcatgcggccggcaccggtgtacagctggcgggtgatgaggaacggcagcagctggtgttcgatggtctccaacggcacgaagcggcggaccaggtagttttcgtggcagccgaaggcgtggccggcggagtcgacgttgtttttgaacacatggatcgtggcgtgtgcgccgtaggattcgcgcagcttgcgctgggccttcagggctaggttgcgcatcacgtgttcgccggcgaggtcctgggccagggcctcgcgcgggtcgcgcgcttcggcggtggcgtattcggggtgggatccgacgtccagatacagacgtgagccattggccagatacgtgttggtggagcgggaacgggagacgatgggctggaacatggtcatcgccacctggccggcgtccacggggcgttcggcaccggtgaccgccacgccgtattcggtttcgacgccgaaaatacggcagaacccgtccatctcggcggatggtacgggttccgtggcgtgcagggagcgggtgccgctgtcacgcagttggggcatcactcgccgcctttttgcacgaagctgttgacgtattcctcggcgttggtttccaaggcggattcgatgtcgtcgaggatgtcgtccaacacgtcggcttggtcggtggactcggtttgggcggcggcctgcgtggtggcgagggcgtcgtcttcctgggtcgcggcctgctgtgcttgaggttgttcgaattgttgtggcatgttgtcttctttttgggctgtcaaactcccctcagtcagccttcggccgacggctcccctcacccgaggggagccggaggagtcaaaaaattatcgctggttgatggagtcgagccacggatactgctgcaggtaatgctgcagttcgcggatgatgagtccattggaggccactacatcgttatcgtgacgccagtggatgcgttcgccgtcccaacggctcagcgtgccctgtgcctcccagaccactacggtgccggcggcgatgcccgcgatatcccacacgtgcagcatcggctcgaagtaggcatcataggtgccgtcggccactttgcacaggtcgagcgagacggggcccacgcgcttgatgtcggccgggcgtccggcgagcgaggaggccacgtcgagcgcacgctgcgattcgctggggatgaaggacatgccgtagctcagcacagaaccatccagcgaggaggtcatcgacggcacgaccttgtcgcgcttctcgccgaccgcggttttgtggatgcgcacggcacccgctcccctggcggccaggtaggtcaggccgagggccggggcgtgcacgatgccgatgatcggcttgggctcgttgtccgggccgaattcgaacagggcggcggtcaccgtccattcgctcatgcgacgtacgtagttgatcacaccgtcgatcttgccgatgtaccagtaacgctggccagggcggctttcggcggggcgggtggtccagaagccgtcgaagtgggcgatgtcggcgattctggcgctcatgaagcgcatgatcttgttgtccacttcaagcttgtagcgggggccacggtccgcgttctcggtgctcggctgggcgaggttacgcggattgagttggtcgtggagggcatgctggccggcttcttcgagcaggccggcgactttgagcgcaaggttgcgcaggtcctgtggggtctcttcgcgtgtttcttccatagctaccaagtctatcgttcggcgttgatggccagcgacttcagcagatcgatggcgtgttcggctgaattgagttcggtttcgcagtgcgccttggtgaaggcgagcggatcggagatgtcgagggagaacaggtgatggtcggtagcggccatatggccggcattgccgtagaattcgaccgcctcgccctcgtctgcggcgcgcgggtcgcgaacagtgagtcgggaccagctggcggcggccacctcatcgccgaattgcgccacgagttttgccctgagccaggcgcgggtgtcttccggcggttcggtggtggcgcgtgcgatgtcggcggcgctcaccacccgttcggtgcggggttcgagtttggtgaagatgctgtccgcggggtcgagcgccgcccatttcaggtcgatgaccttcagtcgcggatcattccatccgttggccacgccgggtgcggacgttgtggtgattttgcggcgcagtttttcgagcagctgccatttgagcagccattcgatgcggctggcctcgccggtcatggccagacgttcgtcatcgtcggcggcatggcggatggaggcgcagtcgatgagcgcctgctgccacatcgccataatggatgtggtggatttgtccggccaggcgggttcgccggcggtgtcggtaccttcgaccagtgcggcaacctggtagacggcttggcgcagtttgagctggataagccatgcgttggtttcgccgccgttggccagcggcaagattgcccccagcgtcaggtcgcgggaaacggtgtgtatggcctcgactgggtcagacagttcgagttcgtcgaggaaggcgttcaggtcgaatccggcctcgtccgcatgttcgagcagccacagcagcatgctcgtggtgccgagtttcagtgcctgcggcacctccatgcgattggcgtcgccgacgatgacgtgcagacggcggtatgcatcggtggagtgggattcgtcgcgcgtattgatgatcgggcgttcgaaggtggtttgcaggccgactttggcgtggatgtagtcggcgcgctggctgagctggtagcccgggatctcgctgttctcgccaatccctacgcggccggagccggcgtagatctggcgggtgacgaagtggagggtcatcaggcgtgtgaccaagtcgaatggcaccgcgcgggccatcatatagttctcgtgcgtgccccagcaggagcccttgccatccacattgttgcgatgcagggcaatgggagtaccagtctgtttgcgggcgcgttcggtggcggcctgcatgatgaggtctccggcgtggtcgtatcggaccgcttcgaacgggtcggtggtttccggcgccgagtattcggggtgggcgtggtccacatagacgcggccgccgttgggggcgatcacgttggtgatgttgagctgcggggcgtcggtgagcatgtccgggcgggcggcggcgcgttcgagacgggtgccgcgcgcgtcgttgaccgggtcctcctgccggtagtcccagcggatggatttgctgtggctgtccgcggcgccgttcaccacgtcgaaggacagttgcaccggattgtagcggtccggggtgttcagggataccgcgtattcggtttcggtgcccatcactcgtttaacggtcatgtagtgctccttgagcttgagctattcggcggtgcggatgcggcggatcgggtccatgccgttgatgcgcgaccattgttcggggtccacgtcggccatggaatcgcgggtctcgcggtattcgtcttccacggcggcagcgagcagcggcacggtgagtgccacgtccaagccggtttcgatggattccttgaccgctcgggtcttggcccggtccacgatgttcttgagcatcgcgccggagaccacgtcggccaggaacaacgcatgccactggccgttctcctcctgcacgtcgcatagatggcggcgttcggaggttccgtagatgtcatgcaccagcacggcggacaaggcgtgcgcgtcgacgccatcttccagaggcaggtcgtcggtgaggtaatggtccacgatggcgatggcctgattggttttgggccggccgacgcgaatcttgacgtcgagacgccccggtcgcaacacagccggatcgatcatgtccacgcggttggaggcaccgattaccatcacattgtcgagtgattccacgccgtcgagttcggagaggaactggggcacaatcgtggtctccacatcggaggagacgccggagccgcgggtgcgtagcagcgaatccatctcatcgatgaacacgaccaccggattgccgtccgcggcgcgttcacgggcgcgctggaaaatcaggcgaatcagtcgttcggattcaccgacgtatttgttgagcagttccgggcccttgacggacaggaacacgcctttaacgcgggtttcggccggactgattgcgccgtcgccattcgaatcgtaaccaccctcgcatagggcgttcgccacggccttggcgatcatcgtcttgccgttgccgggcgggccgtacagcagcacgccctttggcggcttcagatcgtagcgctcaaacagcgcacgatgctggaacggcagttggacggcgtccctgatacgaccgatctcactatccaggccgccgatgtcggcgaacgtgacatccggggtctcctccagcaccagatccttgtcgccctcggcgggcagcacttcgatggcgaggcggacggacggatcgacgataatacggtcgccctgattgatgcccgcatacgcgagcgcgccggaacggcggatgagcacgggattgccggaggcgtcggtaacgatcagtcgaccgtcgtcaagtacctgcttgacactgcgaatctggcccacggtgtcagcatcgcgctgctcgaccagcacgagcttctcgttgagcatcacggtggccccggcggtcaggcgggcggcgttgacgttggaggccacaggcaccaccatgcggcgggtgccggaaatgacttcggccgacgcgtgctggatgccgtcttcatcggtgcgggtggaatcgaccttgaccatggtggcgaaggtgagcggcggctgagcgagctgggcgagctgtgacttcgccttggtcagttccttgccggcgcggctcagcgcttcggcgagcgcatggttcttggccatcaggcgatcgttcagcgcggcgagatcttcggtgtcgctcatgcgggttcttcgcttcccttctatccgggattttcggcaacttatggcagtcggcagaccctattcgttgccgtcggcggatttcctgttacgtataacagtacgcacttttcgcaccacgaaccatacgatgaccacaatcacggccgcgatgaccacgtcctcgaacacgccgagcgcgccttgaatcgagcaccactggtcgccgagcaggtaaccggcggaaacgaggatggtgttccacacggccgagccgagcagggtccagccggtgaagtgcaggaagttcatgcggttgaatccggcgggaatcgaaatcagcgagcgtaccacgggaatcacgcggccgatgagcaccgaccatgtgccgtatttggtgaaccagtcgttggctttgctcacgtctttgcggctgacgccggggattctgtctgccgcgagattgatgcgatgcaggcccacccagcgggagatgccgtacaaggtccaggcacccagtacggagccgatggtggcccagatgattgcgcccggcagactcagggtgccgcgtgcggcggtgaagccggcgagcggaagaatgacttcggacgggatgggcgggaagatggattcgagggcgatggccaaggccacgccgataccgccgatggtttccatcagcatgatcagccagtcggtgatggtgccgatcaggccgggttcggtggtggtgcagatgggtgtggggtcggttgcaagaatagtggcggctgccatggaaaaactcatagagggcattgtcccaaggttttcccagaatcaggagcatgacgcaagaagatgtgcattttgttgacaagtccgccgagagcgaagttgggagcccggctggttctgcggtttctgtgccgacgctgagcgagcccggcctgctggttatggatgtggactccacgctcattgacgaagaggttatcgacgagttgggcgtggtggctggctgcggtgaggagattgccggagtgaccgcacgcgccatgcgcggcgaactggagttctgcgacgccttgcgcgcacgagtggccctgttggaggggctgccggtttccgtgttcgatacggtgcatgacaagctgcatttcaccaagggtgcgctggagcttatcgacacgctgcatgaacacggttggaaggtcggcgtggtgtccggcggcttccatgaagtggtcgatatgctggcggccgagggccatatcgactattggattgccaaccggcttgaggttgccgatgggtgcttgaccggcaaggtgctcggcgaaatcgtgagcaagaccgtgaagttgcacgccttgcagacatgggcggaccgtttgggtattccgatgagccagaccgtggctgtgggcgatggcgccaacgatattccgatgattcaggccgccggtctgggtctcgcgttctgtgccaagccaaagacccagctcgccgccgacaaagccatcaacgaccgcgacctaacccacgtactcgattacctgcgccggtaaaattttaccgacctcggctccggcacttatagttgagccatgactacttcaggcgcagaacagttgacgcttgcggggctggctccccgcaagcggcgtaaacgtgcgcctgcggagcatacgccggccgagcagcatcccatagcgcaagtcgtgctggatgtgcaggcgctccacctcggccaggcattcgattacttcattgatgaaaaagacagcgaggccgcacaaccgggtgtgctggtgcgcgtgcggtttggcggtcagagggtcagcggcgtgatctgggcacgcaccgataccagcgatacgccgcgctcttcgattcgctatatcgagcgagtgctaagccccgatgtactggttcccgcttcgatgcgtgaggatatcagtctggttgccaaagcctatggcggcacacgggccaatattctgcgtttcgccgtgccaccgcgcgtggccaaggtggagaccgagcagcggttggccgcatcgttccgtcggccggtcggcggctcattgccggataatacgcagggtggttttgccgggcgtggcaccaatcccgatgggaccaaacctgctggctctacctttgccgttgccagtaccgtttcggagggagctgcgcaggggtatcgtcgtctgaccgccaattacgccgatgtcaatgtgcttcatgacgcgcttaccggtcaacgtttccaatcttttgtgtttgattcgttgcccggtgcacaggagtggcaacggaacatggcatggatggtggccactgcgctgagtgccggtaaagctgccgtggttgaattgcccaccatgcgcgaggtcgaagacctgatgcctatgctgcgcaattatgggctcaaaccgttcgcccctgctccggccggcggctgggtgggcgacgtcgccgtgcttaacgcggagaccatgcccgcggccgaccggtatcgcacctatctggctgtggcgttgggacaggtgaaggtggtgatcggcacccgtgcggtgatgtatgcgccggttgaaggcccggcgctgttcgccattctggaggatgccgcctatcagaacatggacggtatgatgccatatccacaggcccgtggcgtgatgcggctgcgcgccaagtcccatggcggcgtgttcgtggccatggccaatgcgcgcaccccgcaaagccagtgggaaaacaccggtccaggtacagtggagaccccagtgagcggctattccaccacaattcatccgctcgcctcgccgctgaaggacgccactccttgggtgcgttggctcaatcgcgatgaacttgcgcgtcttgccgacccgtccatcggggcgcgcgtgccgcatacggccgtccgcgtgctatctaaggctttggagagcggccccgtgctgctgtccattccgcaagacagcgtcagtgagactctgagttgtgcgaaatgccatcgtcaggtgcgctgcgccaagtgttccggaccattgcaactaccggccgaccgccgggactccacaccgcgatgccgttggtgcggggctgccgccatcaactggaagtgtccgggctgtgggcatgaacgtatgcgcgtggtgcgcgtgggtgctgcaggcactgcggcggagctggccggattattccgtggcgtgccagtagttttgtccagcaagacgcagggcctggtgcgcgatgtggcttgtcagccgatgatcgtcatcgccactcccggtttcgaaccgcgcgtgcgtccgatcagtgccgagcagggaacatccggtcatgagtatcgcgcagtggccgtgctcgacgcttggaccagcctgtatgcgttgggcgtggatgctcggttggatacgttgaccgcgtggatgcgtgcggtgtcgttgtgcgcgccgcgttcccgtggcggccaggcgttgattctcggcgaaaccgacccggccatcgcccaatcgctgatgctctgggattcgaggattcttgcagccaaggatcttgaggagcgtgtggagaccggtatgccgccggccgtggccgccgcctgcgtgtggggccgccgtgatgcggtgatgatgctgatgcagcgtatcggcgccctgggcggcgattggacggcctgcggcgagctgcccggcatgttgggcccggtgccgatcgcgcaaccggacacggtcgacgcccgggagctcgaagccacggccgaccgggtgaaggcagtaatccgtgtgccgcagagtcggcgagccgagctggcggcccgactgcaccgggaaaccgctcgtcatgtggcgtcccgcgaacccggcgagcttcgcttccgagtagatcccaaggacctgatctaatcgtcttcaacacgtgaaacgataattacagaatgaacatcgctagaaggaggacactatgaagggttggcctggagagccggatatggattacgacgtgctggtcgcggatggcgaggccgctgcgaacgccggcaagccgatcaccgacgtgatcttcgatttcggcaacgtgctgatttactgggatccggtcgccgtactcatcccccgctacagccagaagaccatcgacgaattcctcgacaacgacatctccggcttctacgatgtcaacgacctgatggacggcggcaccagcaccgacgaggccatcgccatcatgcgccgtgacaagggcgataagtgggcggacatcctcgactactacatcaagaacttccgcgactccctgaccggcatcgtgccgggcgcgcgcgtgctggtcaatgacctgaaggctgccggcatcggcgtgtggggcctgagcaactgggaatccagtctgttccacgtggccgaggaacagtgcgatattttgcagcagcttgatggcaagctcgtctccggttttgtcaagctgcgcaagccgcacaaggaaatctacgaggccgcgttggaccagttcggcatcaaggccgatggcgcgttgttcatcgacgacaaggccatgaacatcgtcggctcgaatgcggccggcatccgtggcgtacgtttccaggatccggtcaagctgcgtgaactgctcatcgccaatggcgtgaacattccggccgtgcagtgagcatcgacatttcaaggaggaccatgctcaaactcgtgttcgccggcacccccgacgtggcggtgccctcgctcaaggcctttgccaccgatccacgttttgatgtggtcggcgtcattacccgccccgatgcgcctaccggtcgcggccgcaagctcacgcccagcccggtcaaggcgacggctctggagctcgggttgcccgtcatcgatctcaaaccccgctcccccgaattcatggaggcgttgaacgacctgcatgcggatatcgccgctgtcatcgcctatggcaatatcctgcccaagaacgtgcttgatgcggtgcccatgggctggtacaacctgcatttctccaacctgccgaagtggcgtggcgccgctcccgcccagcgtgcgatttgggcgggcgacccgaccaccggcgccgacgtgttcaaggtgggcgagggtttggatgatggcccgatcgtcgcttccctgaccatcgaactgaccggccgtgagacttccggcgaactgcttgaccgtctggccgaggaaggcgcgcccatgtatgtggatgcgctggccgccgtaggtgaaggcaccgccacattcaccgcgcagccggccgagagcctggaatacgcgcacaagatcacggtgaaggacgcccgcatcagttggacggacgaggccgaggccatcgaccgtcagattcgcgcctgcacgccacatcccggggcatggaccgaactgtttgcggaagggccaatcgccgataatgacgagtcaaccgctaaatccctcgccctgcatattctcgccgcacaaccggccgaccagtccaatcccaacactccggccgagcttcagcccggcgagctgaaggtgggcaagaagaacgtgtgggttggtaccggcagcacgccgctggaactcacccaagtcaaggcgcaaggcaagaaggccatgcgcgccgccgactgggcccgaggcgcacgcctctcccccgccgcctgcgtgcgataacaagcaatatcgctcccgccttcggaagcacagtaaaggcccggcatcttcataaagaagatgccgggcctttcagctatgcaatcggcgatcagttgagaccggagagcttgttgatcagctccgggtcacgcgtcgcacccttgtcggccgagcgggcgaaggcggcgtacgccttcagcgcctgggagacgtggcggttgcggtgagccacgtagccgtcgccagcctcaagctcgcgacgacgctcgtccagctgctcgtcagtcagttcgacgttcacggaacgggcttcgatatcgatatcgatgatgtcgccgttcttgatgagcgccaccgggcccttgttggcagcctcaggcgccatgtggccgatggccagaccggaggaaccgccggagtagcgaccgtcggtgagcatggcgacctgtttgccgatgcccttgcccttgacgaaggaggtcgggtacagcatttcctgcatacccgggccgcccttcggaccctcgtaacgaatcacaagcgccatgccaggcttcagggtgtcgttcagaatgacctcgatggcctgctcctgggagtcgaccaccagagccggtccacggaacttccagatctccggcggaacaccggcggtcttgaccacgcagccgtcgggggccaggttgccgcgcagcacggcgaggccgccttcgtgaatctccgggtggttgatgtcgtggatggcgccgttggtgcggtcgcggtcgagcgagtcgaacagggtggtgtgcgtccacggctccggggagatgatgtggccaggagcggccttgtacatctgctgggcttcctcggtgcaggtctggcgcatgatgtcccaatcggccagcttggcttccagcgtcgggtagtcgatggaatgcacgttggtgtgcagcttgccggcgcggtcgagctcgccgaggatgccggtgatgccgccggcgcgatgcacgtcggaaatctcccacttgccggacggcgaggccttgcagatgcacggcacggtgtgggaaatacgctcgatgtcgtccagggtgaagtccacgtcggcggactgggccatggcgaggatgtgcagcacggtgttggtggaaccgcccatggccacatccatggtcatggcgttctcgaaggcttccttggtggcgatggagcgcggcagcacggaatcgtcggaatcgtcgtagtactggtgagcgatcttgacgacttgcttggcggcacgcttgaacaggtccttgcggtaggagtgggaggcgaggatggtgccgttgccgggcagagccaggccgatggcctcggtcaggcagttcatcgagttggcggtgaacatgccggcgcaggagccgcaggtcgggcagacggtcttctcatagttgagcagttcctcatcggagacgctgtcgtcagcggtggcgtacatcacgtcgataaggtcggtgctcttgactgtgccgtcggcgagcaccgtggtgccggcctccatcgggccaccggagacgaacacggtcggaatgttgaggcgcagggctgccatcagcatgcccggcacgaccttgtcgcagttcgggatgcagatgagggcgtcggcgcagtgcgcgttgcactgatattcgacggtgtcggcgatgatgtcgcgggaaggcagggagtagagcatgccagtgtggcccatggcgatgccgtcatccacggccatcgtgttgaactcgcgcggaatgccgccggcttccttgatagcctcggaaacgatgcggccgaccttgttgaggtggacatggccgggcaggaactcatcgaacgagttggcgatggcgatgatgggcttcttgcccatgtcgtctccgctgacgcccgcagcacggtagagggctcgggcgcctgcaaagacgcgccctgacataatttttgcagatcgcatttcagtcatggttctattcaagcctttgcgagggacacgccatttgtcaagagtcgaataatggaatttgcaaaaacgtaatgtttctcacacatttttttggaatacattcctctggcgagagtccggtatagggctgacagaagtccccccaaacggctacacttgcttcggttgagatagattttccaatgtttggagataagaacaatggcttttggtactgacccgacacccgacggtcttgcgaacccgccgatcgacgatctgatgaagcacgccgattccaagtacgcgctggccattttcgccgctaagcgcgcacgccagatcaactcctacttcacgcagctcaacgagggcctgctgcagaacgtcggcccactggtcgaataccagaacaacgagaagcctctgtccatcgccttccgcgagatcgacgagggtctgcttgaggagaccttgggcgaggacgacgccaacgagggcaactgatcgattcagacgattcgtttggattgtttggacagttcgtcgccgaatgatggtgtgagagttctctcacaactgattttgagcgacacgcttgcctgagttatcgcaatcagctataactcatcatcaggagcgaacaagacgtaaggctcgagccaccgcgctggttggcacgggcctttatttatgcccgcttccgcagtgacaagtaaaaattgacaccgtatcattgtgcctcgcaccccgcggggcgataagtcctgaagaaagggatgatatgacagaagaacatcggcttatctccgccgaatccgtgaccgaaggccaccctgacaaggtctgcgatcaaatctccgacgccattcttgatgatctgctggcccaggatccgtccagccatgtggccgtggagacctccgccgccaccggcgtgttcctggtcttcggcgaagtcacgtccaaggggtactgcgacgtgcagtccaaggtccgcgaaaccctgcgcaacatcggctatacctcctccgaagtcggccttgacgccgattcctgcggcgttgtggtggccatcaccgagcaaagcgccgaaatcaaccagggcgttgcccgtctgactggcgatcaggagaccgccgccagccgcgaagaacgttacgaagcacagggtgccggcgatcagggcgtgatgttcggctacgccaccgacgagactccgacgctgatgccgcttccgatctatttggcacatcgcctcgccttccgtctgaccgaggtccgcaagtccggtgaagtgccgcacctgcgcccggacggcaagacccaggtaaccattgagtatgacgataacgataagcccgttcgtctggacaccgtgctgatctccacccagcatgatcctgaggttacgcaggattggcttgctgttgagctgaagaagcacgtgattgacccggtgcttgatgaggtgctgggttccaaggtgccgcatgacaactaccgccagctggtcaacccgaccggttcgttcatcctgggcggcccggcggccgacgccggtctgaccggccgcaagatcatcgtcgacacctacggtggcgccgcccaccacggcggtggcgcgttctccggcaaggacccgtccaaggtcgatcgttccgccgcgtacgccacccgttgggttgcgaagaacatcgtagctgccggcttggctcacaaagtcgagatccagatcgcctacgctattggcgttgccgacccggtgtccgtcaacgtggagaccttcggcaccgagcaaggcgtgacgcgcggccagatcgccgccgccgtacgcaaggtcttcgacctgcgccccgccgcaatcatcgacaagctcgacctgaagcgcccgatctacctgaagaccgccgcttacggccacttcggccgtaccgacgttgagttcccgtgggaaaagaccaacaaggtcgaggagctcaaggccgcgattgctgcggagtgaggtgctctaattaggacagagagatcataagaataccataagaatagggtgctttccgctgttgatggcggaaagcaccctatttgtttttcgcagtgtcctacgaatctgttcttatttcaatccacgcaccccagtggggtgcgaccttctcgaaatcagcatccgtgggaatctcgtcgttatttcaatccacgcaccccagtggggtgcgacgacatgcatattcatgttgcgccatattttttatatttcaatccacgcaccccagtggggtgcaacggaacgcgatctcgtcgttcttccagaccgtgtgatttcaatccacgcaccccagtggggtgcgacgcggcatgctcgccgcattgggtgtcaacaatacatttcaatccacgcaccccagtggggtgcgacggccgctgacctatgctatggcgcggctccgttacatttcaatccacgcaccccagtggggtgcgaccaatgccatccctgccgttccaaggcggcacgcttgatttcaatccacgcaccccagtggggtgcgacgccatcgcgcgatatgacggccagccggacaggcaatttcaatccacgcaccccagtggggtgcgacggccgccgacgaggaggccgccagaaaagctgagatttcaatccacgcaccccagtggggtgcgacgaagccgactggggacggttggctgacttgtatatttcaatccacgcaccccagtggggtgcgacactaccggcagacggccgccgacctcaacgccctatttcaatccacgcaccccagtggggtgcgaccgccgtcctgctggccgtgccgaccatccgccgcgtatttcaatccacgcaccccagtggggtgctgtttttgttcaataggaagttgaggtttaagtcacgaaggtttttcgggtttaggcggaaaggcatgccgaccacccgtgggccttagcctgatggtgcttctagttccattcgggaaaggtccggaaaggcaatgatcagcatgccccaaatacagtctatccgttcgc

SEQ ID NO: 1041 - DNA, 65403 bp, Unknown
  R13_10m  MAG No. k141_591
cggccctcgcccgcgaaggtgatggacgacgtatccaccatcaacagcaacaacagttcctccttcgcggtgaagaaggacggatccctctgggcatggggaagcaactcctacggcaagctgggagtcggagacaccaacgaccggccctcgcccgcgaaggtgatggacgacgtatccaccatcagcatcggcggcatttcctccttcgcggtgaagaaggacggatccctctgggcatggggaagcaacttctacggcaatctgggagtcggagacaccaacgaccggccctcgcccgcgaaggtgatgtagtccgggccgtgcagccgcgcacggcttctcaagggggctggaattcgagttccgaccccctttttccatgccctccgacacgggacgcatggtcatcggcatgacggaagtcgaagaagctcctctccggagaccggccctacaccgaacacgtccaagtacgcgacgacctgtgtcaccccatataggaaaccccacttgcgtccgatcgtggacgaagtggggtttcctgaaacactataggcgcaacgggctattccgaataatgcgaaaggactactgccgactatcctttgacttatcaatctgcgtaatcgtcattgccctatcgctaagcaaggcgtagtttcggtttcgtgcgtcgcgaatcacgaaggtgcaggcattctcgtccaatgccactgccaccgcatccgtcatggtatcgtcgccaggcgtaggagtgcgcagcgacgtaatcagacggaactcgccatcgttgaacagattcagaggcatttcgaagtacaccgtctgatgcccatgctttcccattctgatggtctttgcgccggtatcgtaggtgatacctccgcgccggacatcatgcaatgcaatggccaggtagaagtcgcccggctcgtcgtactgatattcgacggcgaacttgaacgtgtcagaactcttcaggattagcggcgagacaccatacgtccgcagcagcgggcaacgagcattcaggccattggggtattcatccctattttcggcaatggtcttcttgcgcttttcctgcttcttctcttccgcctcaagattggctagggtgtatttctctgcgactgtttcgcgatcgccaatcgcggcaaccacaccatcctgaatgaacatggcacgagtgcagtaccgcttgacagcactcatatcatgcgtgaccagaatcacggtctttgtcggatccttcttgatttccgtgaaatagtcgttgcacttccgttggaaagcctcatcaccaacggccagaacctcatccaataccaggatgtctccctgggccttgatcgccacggaaaaagcaagacgaacctgcatgcccgaggagtagttcttgagcttctgatccatgaactcgtcaagctcggcgaattcgacgatgtcgtcgtacattgcgtcgacctgttccctggtgaagcccagcaaagccccattaagatacacgttctctcggccggtaagctccgggttgaagccgacgcctagttcaatgaacggaaccaacttgccatgaactcgaatctcgccatcattgggatagtagatctgcgaaatcagcttcaacagagtcgacttgccgccgccattgcgacctacgatgccaaagaactcgccctgatggacttcaaagctgacatccttgagtaccgtctgttttttgtagcccttcacgcccttggtccagtttatgacagcctgcttaagaccggtcgcctgctccgttggcagcttgaagctcttggagacatggtccgccgacagcacaaccggggtcttggtgtaatcgtatttcttcactgcactgttctcagccatcacatgacctccgcaaacttgcgactattccggcggaaaagatatatgccgagccaaagcaacgcgaccgtgagagctatggggaacaatctgaccccccaattgccgaactggttccaaatcgtcggctgcgtctccggcgcaatgaaattatgccgaatatcctgaatggtctgggcaaacggattcagcaactccagacgagccgcattagcgatccatcctcctcgatcagtcacatacgtaagagggtagatgataggcatgctgtaaaacaccaactgctggagcacttcccaaatatgggcaatgtctcggaaatacacgtacatggtggccatgagcagcgtcagagccagtgtgacggcatacagctccacgatattgaacggcaatagcacgacacgccaagtgagcctcactcccgaaatcagcgcaaaaacaaggacaaccaccaaattgatggcatagccgatcaaagcgccgatagtcgcggaaacgaccacgatatagttggggaagtgcaccttgcgcagcaaatcaccacgatcgacgaccgcacgcaaaccgacgttcgtggactcggtcacgaattgccatgagctgatgcccagaagcaacaccaccggatatgtggacgttccgtcggacatccgcaggaatttgccgaagaccacgtacatcacgcagaacatcatcaatggtttcagaaccgaccaagcgatgcccaggaaagacccctgatagcgcagcttgaagtccgttttcaccaagccacgcagaacggtccatgcataaccgtatctgtttcttatcttctgtaccaactgttccacgaatagcatcctatcaacgacgattccaccagaagcaaatgagcatgaacctgagacggacaagtactccgacccattattttcgacgacgaagatcttcgcactcgaattcatcgtgaaggggccttgccctatcgagaccccttcacgacaaacgacatcagttcatcttcaggtagtttttccagtattccagcgaggtcagttccgaacgcgcagcggcgtattccttacgaagacgctcgatattggccttgtagtacttaaggtcgtgggcgtaacgcttcttgatctccttgtaacgttccgcgtccttggtgcgaatgatgcccttccggttgtaccagtcaagaacaacaagcttgtgcttcccccggatgaccccagcggggtacagccatccctgcaacgggatgatcgcatacccggaaccatccttcttgaaataacgctggttgttgtcggaaatcaggtcctcgatacgctccggaaggctgcgcggcttgtccccgtcgatcagctggcgatcgacatccgcgatacgcagtccatccagctcgggatcagcgtcgatctgcgactgaagcgttgcgaaatcaacgagctgctccttgttccggtttgcggccatgaagctctgttccgcctgtcccggcttcttgatgaaggacggtcccttcaggaaatcctcgaaggcgtccagacagagctcggcgttcctataaccgaacttcttgagttcgagacgaatattgttgtgcagctcatacatgaaatccgccttcggagccatgccgcaagtcgcctgggcgatcatggtgttgcgcgtggtctgataccgttccacagccgggttatagcgctcgaagaacgacatatgccatacgcaaaggctgttcatggtgatgaaaccggtcttgcaacgaataccgtactcggcgtcatcgcaacggacaaacaccggcaaaggcaggccgttcttttcgatgaccgagatcggaatgcagcagtaccaccaagcggcatacatgttcttcttctgccactttgtgggaatgtacagttcgttgtacacaagatcctcgaacaaggtcagacgcagaggcggcttgcacccggcgaaggtaccctgcggggtcatgttgccgatgtcttcccactggtcttcgccgacctcgtagttcagcatcgcgccactgatcatatccccgcgatattcgggcttaagaatgcgaagcagattgtaggtacgctttatgctttcgggggaaacggccacgtcatcgtccataagcagaatgttcgtggccttcggttcctgctccatggcggtgatcatgccccgggtgaatccgccggccccaccgacattatcgttcggaaccacctgaacacgatcgtcgctcagcttctccgcatccagtgtgcgcccattatccatcacatacatgtggaaatgctcggcgatggaatcacccgagttgatgatctggtccttgaccaaaccgatgttccgttcgatgaacgcttcctttttgaacgtggtcgtggacagcaccagctcaatgtcgttcagcgccgcactggtctcaagaacgtaatagctattgcggatggacaccgctccttcggtcttcacaagaaaaccgaggatcaccatatcgtccgtgacttccagcggcaggtcgacggtctgccaatcgtcagaagccatcagttccgaggaaacaccctcaacgggaatcgaactatgcgcgaacgcatcgcccatggtctgctgcaccttgcatgccgcacccttgagttcaaggtgcaacgcgaacttggccgcagtggtgtacttcctcagcttcatcacggacagggaattgaaatacgtgctgaaatcaaaggttccggcaccggtcatcgtccactcgccaagatggccgtcaaacacgacgggatggtcggaacgacagtacagcgtcggataggcgacagaacgaggattggtctccagaaggatattcgcaaatttcaaagtcggcattcgactaccacctcatcttttccaggccgttacttctcaatccaacaaaacaactgtacaaagcctacttcaatcattatcgtcgtgcaattccgccgctttcccgatcgcccccgtcccaacccgcgccaacggtgccgcgggggccgcaaacgtcgccggtcgctaagccgaatcaccgcagatcagggtatatcgcggcggtactccgcctgatctgcgcagaataccgttgagccagtgccacactcacgaatccgtcccccgcaggaggcgccgggtgcccgattacgtttctggtccagtgggaacccatccgtataacagcctcgtgcttgacgtcgtaatatccggcatccaccgatatgtatgagcctccacagcccttcgcggccgcaaggatgtgcggatggtagcgagtagacaaccatcgttgcccggcgcgagctggaaaacccttttccaacacgtcaatgaccgggaagaaacgaagattcgagtaaccatgccgggcaagatagggcaatattggatagtcgatccgaggattgcattcgaccacgcccacggcctcgtctttcttgactccccaacgttccagcgtacgttcaacctgttcgaacagggcaccgtcgttctccacaaagtcggactgcacgcacaccatcacatcgggaagaccctccgaagatgaataacagcctttcagcccgttgacgaagcaatcatccggcgccacgatgatggcagcctctccgcgaccgtcattattcctctgcaacgcatgttgagtgggcacgtctcggacggtgaacatgtcgaacgacgatgccgccgacctcgcgaattccaaggcggctccgctgatcggcatgagcccgagaccagtcgcgaccaccggtatattacgcgagcgagcccacggacctacggccagacgcgatagattgcacgtccagtcgccacgcatataaccgcctccgagcatgtgcacgctgcgggcgccccgctgtaataatctgattccactcgcatagttcggagcaatggattcatcatccagcgcccgccttacaaaagcggctatatcgttgatcggcccatcataaggcagtgaattttccgtgcccagccttcgcaatgtgtccgtgaaaatggcgtgcgggtgcttatctttcagaatcacagcggcaggacccggacgggcgcaatccacgacaaccgacacgtcaggataccgctccccgagtaatttgagccattctccggcgattagctcatcgccgtaattcgggtaccctggctccgccaccagataaaaaactcttccgtcttggctcgcctcggcatcctgcacggactttccgatacgcgaccgtaatgcgcgcagcatggacttcatcgtttcgcttcctcgaggtacgtatgccagaactcaaaagaagtcatctcgtcacggcattttcgatacgcctgccgaacatcggtatcgtccagcagtgtttgggccagtcgttcgaaacgctctcgcaattgcccgttgcgcgcctcgtcccgcacgcgcaacgctccatgccttccggtcgtgtcaacggctagggctttgcccgcatcatgcaagattcgccaaggtcggcaccatccatcattgggaatgatcaccatcttgtcatcggatatcggtcgttcctgaatcggatgcgcttccactgcctcgcccctctgcaaaacacgccggagcctacgccggacacgggccatgaggcgcgcacgatcccgtgaatcgggaatgtcgggcttctcgatggcctcgacgttctcgtcattggcgttcaattccagtgcaaagatatcgatggcatcgggagcatcgggaattccctccaagggcgtcaaacgctctgccttatcccgggctttcctgaacaagtcttcgcccacggggcgacgataataatcaggtcccctaagataatcttcaatcgcatcacaggtaagctccatggaagcgtagtcgaagcggcgaccgtgattgatcacattatcccgcatgagttgaatcatggcggacatgctgtgatgcggatccggcgtaaaagcctcttggatcaacatgttacgtgtggcaagatacacttccaccgcggcgttccagcgcaggtcaaaagcatcatgccatacgcatacaccatttatcgtgatgaatttcaacggttctttctcttgaatgcgtgtcgcatattcaacgtcatccctacggtagaacaacgggatcggcagaccataatccgtgatgcgtcgtgcggggaagcaggaataccaccatgcggagtacagaccatccgcatcggatgcgggaataagctcctcattaaacgagatgtcgtattcgcgatccatgatcagacgcggcttgaaaggtcgtagattccgttcaggggttatcacaccgatatcttcttgctgcatctcaaagtttgcagtagagagcatcgcaccggcaatggtggcctcctgatattcaggccctgcgtattccaacaatcgcagagagcgcttgaacgattccggacagacggtaacatcatcatccatcaacagcacatgcgtggcccaacccgattccacggcgtgcagcatgcctgccgcgaatcctccggcaccgcccacattcccgttgggaatcagcgttacggcagggttatcggcgcacaccgcctcggacagggtacggccgttatccaccaccgtcaggcggaaatgatccccccaagcgccgttgtccagcagttctttgcgaatcagctcgatgttacgtgcgacttgccgttcttttcggtaagtcgttgtaatgatctcgatacgggtttcttgaggcgacggcaagtcggcatagtacgctgcattccgcaccgtggcgggatatgcattcgttgttattgtaaatgcgaccaactgcgcgtcaagttccttgggataagcgatggtgtagcggtaccaaccatcttgagtttgggaaggagcatgatccgactcacagatgacacgcttctcgagacgccgatagatcatctccgtcaaggtgatatgaaccggagcgctcgtctcgacgatcaacgtcggcgtcagatcgtcgattcccgtgtagcgccgccacttcttcaacgaaaaagcgccgaaataagtcatgaaatccgcataactatgtgctccgacagtgagtgttccatcaccgaccccggaatatgacggtgacttcacgtacagcggcagaatcgcgcaggacgaaagagacggcttccaaactggacggctcaagtcgacgagcataaacggcaccttctagataaaaaaccctgtaacggattcagattaccatcaggccattcgcaccgtccatccctgccgtctcaatgccgacccccagccgttggcatgcgacggtatgctggaatggtgaacagcatggcgtgcggcggcgtattcgagccgcgtaatattctggtgactggcggatgtggcttcattggcgcgaacttcgtgcgatacgtggcgcggaaccatccgcacgtgcacatcaccgtgctcgacaagttgacgtacggcggcaatccggagaacatcgccggtctgccgccgtcgcaagtcgaccttgtcgtgggggatatctgcgacgtcgcgctgttggagcgtatcgtgcccggtcacgacgccatcgtccacttcgccgcggaatcgcacaacgataattccatcgccgatccggaaccgttcatccgcacgaacgtggaaggcacgatgcggctgctggaggccgcccggaaacacgacgtgcgcttccaccacatcagcaccggcgagaacgtgcacgacaggcccgggcacgacagacggtacgcgatcgacgcatccaaactgcgcgccgaactgggctggtcgccgatgcacaccgacttcgccagcggattgcgcaacgtcatcgattggtatgcggaacaccgcgactggtgggcgccggccaaggaagccaccgaggcccgctaccgcgcgcaagggcagtgaaacgaccggctgctacgggcggcccttccgcgacagagcgacgttccgcagcagacgctgcacaggcttaagcaccacggtgtcggcgaccaccgcgaacgccagcgccgcgagcaacgtggctgcgaacatcagcacgctgatgcccgcgtacgaccatccgtccgtgggcgcgggaatccgcgggccgatcagcaccttggacagcggcgaatgcaccagatagatcgtgtaggagtatcccgccagccaggtgatcgccctgcgcagccgcgccgacgccggatgcacgtcgtaccggaagaacaggaacaccgcagccaccaccaccgcgaaggagaccgtgagcgtgcggccgacctgcatctgctggccggcgaacagatatggcgtggcgacggtccaggccaggacgaatggtgccaacgcatacacaccgtgccgtatacgcgcggacggcggatagtattccaacacgaatcccaacagatagtagaccagcagtccccgccaggggaacgactgcaggaacgtcaacgggtatccggcaagattgcagatctgctcggcggcggccacggcggcggccaggccgatcagcagccaggcgcccgaccggcctatcgcgcgcatcatcgcggccaggaacggcgtcgccaacacaaacccggcaagcatgaacacgaaccagtacacggaatcgtcatacccggagaacagatcgaacaacgttccagacacagcgccgccaaccgaacgatgatcaatcaccaggtaggcgacgaatcccatgccgcccgcatacagcagatacggcacaatcagcgagataaaacgtttgtagtagtagcgcacgtacggcgcgagaccattggggcgtggccgcacgccgcggtccgggccgcatgcgtcattccgcccggcgccttgcgcggcgtcgcacgtcaggttgaaccggcccgacaccataatgaacagcggattgcagaccatgaacaacgcgaacagcacggatcgcaccgtttccgcgctgccggcgagggccatcttgacgggcatgtagttgttgatcacgtggacgccgatgaccaggcacatcgccaccacgcgcagcagatcgtagttcacgtcgcgcggcctgccggcgacgccggaaacggtggcgtcggaaacggcgacgccggaaacggaatcgggcatggtcatcacatggatcccgtcagggacttcagatcgaccgggcagctgatctggctcttcagcttgtccaaggtgtccaggccggccgagggatcggaggacgcgcccttatgcgcgtcgttcttgccgccgttcgcaccatcggcgccgttcgcaccatcggcgccgttcgtatcggccgggcactcatccgtcaccttaccgttggagcccgtctcgacgccatccgcattcaccaccggcgtggttaccacgttcagtggatgtgtggcatcgctgctgacccgaacggtataggcaatcgtcaattcttttccgggctcgatccactgctggttgaacataatgtactgacggtcatacaggctcgcggtgttggtaccccatgaatctatatcagcctgcacagcggtgatttcgccaccgtacggggcggtaagcaccacgcggtacagcatgccaccgagcactggattctccgagccgccattaacgaaatcaggcaacgattcggccttagccttagtcagcgtgttcttcatggtgaaggtgaccgtgtattcgtcaccgagctgatcttccgtaaactgacccagctgcgtgttacgcacagctgtcgtgatgcgcttatccagcacgccagaatacagggcgttccggctggccgaggcgtcgccgcaggtttttgtgaccgtggtggaggtcttcagataccaatcctgcttgccttgctgcagctccgaaagatagatgccggtttcaggtacctgactgtcagcagacaactcgccactggccttatcgtcgataagtccggtggcaatcagcgcctcctgctcatccggatcagccatccatagcttgaaatgaccgctagcgctggtatctctgattgccttcaacagcggggatgcggtggaagcattcgcgttgccaagcacatggttcataattgcttgagccgcttcggaaacgaagttgttctgctgctcgaagtccgggtaatccgtgtacaggtctgaagcgaagaacggcaccgtggtggtgccatccagcactcggccgtccgaaagcttgaccttgcctgtggctcccagcaatgcctggaggaatacgggatcgaatgacaatacacccgctacgttctcgtcttcgttgcctttctgatacagccacatgtatttgttcatctgtgccacacgctggaattcggggtcgatggtcgtggtggccgggtactggtcaaaagtgtcgccaaatacctggcgctccttcagcaccgtagcatccattggcttctcaggaatgtcccaaccagaagtggtggcgaaatcaccgatggtaatcgtgcccttatctgccgtgattgcggcgatggtgcccaccatgccgcccgccgaacgcagctcggccgggttctgcaccatcaccagatacgtgcgcttgccgtcctcgccaagcagttgcggtagcaagttaatgaggccatcgtattcgctgagcatcgaatccacggtcttgagcgcagccttttcggattcgagcacggtggccaccttggcgacgctcggagtcggcaccttgttgagcttggtgagctgctgcgagatatccttatgcacctgcttgacgatatccggcatatccatcagggcgctgacgtccaccgagccattcttcagggagaagccctgcaatcgtttggacaggttcagcagatcagtgaacggaccgttgaccagcgtatccacggaagccagcatttcgcgagcagcggtgatgtcgctgccaaatcgcgaatggtcgcggaagaagtcccactgcgggccgttcagctcctcgttgagatcactggtggcattgaccaactcttgggagatgtccgacagactcttatcgctgccgcagccaagtgccgaattggccagactttcggcggatgtcagcacacgctgcgcatccgtggccattctcgagacggatgccgcgtagagcgtgcccacacaggtgacgctggccagcaacgtcagcagcagtacaaccaccactcgcacccatatcggcgtacggctgatcagcgaacggccgtcgccacccacgtgctggggagtcttcaggtttacgggacccgtctgctgatttgcaacgctattcgtagatgcggagcgattggatttcccgttaccggcatggcggcttctcctacgccccacagccttatggctcgaatgccctgaagtgaatcgcatacttatcctacccgaaaatctgctcagctcatactcttatccaacggcgcaaggccacgcttccggatgccggactccgggcgaatccggaatcgcagacatgccggagcacacgtgacgccacgcatatctcatgccagtgtaccgatgccaccgaaatagaccgagggtttatcccataccgggtgcaaatcccctcatgaccaccacatcgctgtcagaatgttctcagacttcattgaggagtataacagtattgcgcaagaaaacggtcactaaacgcaacaatagttaaagccgtattgatttgttcggcttaggagaacgggagaggcaattagatgttcgtcctcagcaacgcctggcgggccctgacacgttctaaaggacgtacggccctgaccgcgttcatcaccttggcggtcaccttcggcacagtcgccggactggccatcattcaagaagataccaacgcacacaccaccgcgtacgatcagcagaaggccacgttggccattcgcccgactgcggctacgtggaagaaggtctccgctacggactcggcttccaccaagcattacatgacgtggacctcatacaccgaatacgccacgctcgtccagtcggccaccaactcgttgaactttacggttaccgaaaccgtgccggcccgcgtgagcggtgatttgaaggccctggacggcggatcgctgggctcggcctccgatgatgagaccggcggccagctcatttggcgagccttctggaccgaggatgccgccaaggccagcgacctcggtaccttcgaaatcgtggacggcaaggacctgagctacgacaacaagtcctccaacccgaacaccaccggcgcactggtctctgaagcgtttgcctccgccaacaacctgaaggtgggcgatacgctcaaggtggcggccgcctcggacgcccagaccacggccgagctcaaggtgcgcggcatctacaagtacacatccgaatccgccgtcgccaatccggtgacggccgcccgcaaccgcgagaacgcgatcttcaccaactatcagaccttcgccaaggccggactcgacccacagtccaacgacaagaccgcctccggctgggcggtgccggatctggacgtggtgttcgacaccggtgatcccgctacatacaagtccttggtatccaccctcaagaagtccaagctgcccgccaagggatacgaggtgtcttccccttcgctggaatcctacaacgcttctctggagccgctggatacgctatcctcgcgcgcgaagaccggcaccattgcgttggttgccgtgggcggcgtgctgttgctcatcctcgtgctgtcaggcgtgtgggcgcccaagcgtgacgacgagatcggcatggcactggtgtccggcgtcactcgcgggcgtttgggatggcagttcatgctggaagtgttcatcgtcaccctgcccttctacgtaattggtctggtcggaggcgcgttcgccgccaagccgatcggacctgctctggcatccggccatgccatcccggtgacatcggacctgatttggaccatggtctggtatggactgggttcaatcctgatcctggcgattcttgccgccctgcgccttgcgttcttcagcgcgaacaagctgttcgccgccgatggcgactggggcaccgtgagcgaggctgaggcgattgaaacggccgaaaccactggcgctgccgagaccgatgaagctgctgaggccaccgctcatgatgccggcgaggccaataagacgaccaccacaaccgacgatgcggaggcacaggcatgagcgacaagaacaacgatcaggaactcgagaagaccactgacgcaacggctgacgaagtgacttctgagactgagacgaacgacgccattgaatccgttccagctgactccgtgcagttcagcgtgaccttcgatgacgttgatgacgaaggcactgttgacgatggtatttacagcgcactggcatctgccgaaaccggagcaaccgacgagaccagcgaggccgaagcagacgccatcgcttcggccaacgcatccgccgaagtgaccgagcgcaatgccgcccgcgtcaacgaaacactccgactggccaaaaccgatcacaaagacgcattggccgagcatgcggagcctcagggcaaagcggccgaacccaccatgacgctggcctcgcgtatcgatcgcgtgttggtgggcggcggttccgacgacattctgctcaagacctacccgacctttgccctgaacaaggtgacggtcgccggtcccaagggcaaggtcaacatcctcgatggcgcgaatttcttctgctactccggacacgcatacgcgctgctgatcagcgacgaccccgattcgggcatcaccgccgacgccaaacgtcgcgcgctgatgggcgtgatgagcggtttggccacgccggtgtctggcacggtgatgaacaagagcgccaacattgttgagctcgagcccgtggaactgcgcggccaccgtctgggcatcgtaccgcagctgcacgccgtgcagccgaagctcgacgccgaacaaaacgtgctgtacgccatggatgcgtccaaccgcaacttcctgaagcccaagccggtgatcgcccgcgaactgctggccaaggtcggcttctccgaggccaccagcggcgtggccgtcggcacattgcctttggtgcagcagcgtttggtggccatcgcccgtgcaatcagcaccgaggccgaagtgctgatcctcgacgagccgacacgagggctgaacgcggatgacgaggtgaccgtgttcgccgcgctggccaagctggcgcacaccggcgacccgaagcattgcgttatcgtgctcactgcgtcgcgcgagctcgctgaagcagccgacacactcttcaagatctgatctgtccggcagcaatacacaccagacacaccagcacaggctcttgaagctcacgatgttcggatacataccaaacatcgtgagctttttcgatttcgaggggctgatttgcgtgttccgggaggtctacttccgtttcaaggggctggtcatccgccaaaccccgagtataaacggcttcatgccaacgtcattccgccgtttttacgccgcgtatacttgggcaccagccccttgaaacggaagtagacctcaggaggatgccgaatcagccccttgaaacggagataggcatgtcgagatgtccgaatcagctcctgacaatcctgatgcggctcattgccgcgctaatctgaggataaatctgaccgtacgaggcgaaacctgataatcatgaccggatatattcccacactggagcagatcgacgagttgcaccgcaaaatcgcgccgtccaaggcggcgtacgagctggtgcatacgcattgcgtgattgtagcgaccatcggctgccagatcgtgcgccggcagaacgcgctgttcacgcgccgctgcacattaccgaaggacgcggaggtaccgcccaccgcaggcgtcaccggcggccatgtgccgccgcgtctgctcgacgagcatttagtactcatcggcggactgctgcatgacatcggcacctaccgcgtgttcaagcatgacggctctgacgacgaaccgctcaaattcagcaagaaacgctacattctgcacggtcttaagggctacgagtatctgctcgacgagggcgtggacgagtccatcgcccagttctgccgcaaccataccggcgtgggacttacgcgcgaggatgtggtgcgccaggagctgccattgtcaccagccgactatgtgccgatgaatctcgagcaggaagtggtgatgtacgccgacaagttccatagcaagtcagtgccgccgaagttcctgcaggtcgagacgtatacggcccgagccgagcgatttggcggagagaacaaacaacgatggctggatctggtggccaagtatggcgtgccggatattccggcgttggcggagaagtatgggatgcggatgatttgaggctctaggggcctccccccccccagtcagtctgtcggctgacagcccccctcgtcagagggagcttatgaagctatttcagatggaacggagacggtaggtgccgttgcggttggaggcgatgatcatctggtcgttctccagcacgttccagccttcctgctcatagccggaagaggagaccaccacaccggcggagtcgccgttgtcgtcgcgcagctcacggtagcgcatcacacggtagtcggcggcctgcgcgccacggccatactcgtcgtagatttccacgatgcgcgggctggtcttctcacgaccggcggcgcacagggcgatgagctggtcctcggactgaatcatgcagttgtagctggacttcgggtaggcttggcgcagttcgcgcacggcctgggccacggcctcgtcgagcgggaagccgaaaccgatgtattccagaatcaccgcgaagaagatagcggagtcggaacggccgccggtggagaggagcacgctgtggttcaccgggtatgagcggttggtgacgatgttgcggccattggcgtccgagatatcgccattgtggatgaagctcaggccgttcgcatagaacgggtgctggttctccatgatgagcggcagattggagcttgccaagcgcaggtgccagatggcaccgcgagacggttcgtcggccagcgtctcaaacgtgctgtcatgacgggccgcgatggtcgacttgtagattcgggtgccggtttccggggtgggtgcgccaccgtcgcgcacgtgcggcgcttcggcgggatcggaaagctgggctacaccccagccatcattgtggatttcagacagttcacggaaatcctcgacattgtcttgccccaacacggcgttgagactcaggttgaagcctgccgtcgcgtatcccagtaatctgcacatggtatttcaacttaccgaaaccgtgtggcgacgtgcggcaactgttataggcattctttatagaacgcatcagcgccgctgcaaactggtatgttatcgcttctgtttggaggagcgctgaggcttggcggcgggtttgccgttcttggccttgcccttatcgcctttatcgccctgctcagcgaccgcagcggcggcagcggtctcagcgatcttccgctcctcggccgatacggcggcatcgagctcctgtaccaatcgcccaagcccggacgtggtgtccatcgggtcggggacggcggccgggtcggccactgcacgagtcggcgtgggcgtcgtgatggtcttggccgtatcggtgcgcttcagacgcggtgggcggcgggtggagacgaacagcggctgcacctcgaccagcgggttgtaaggtgccagaccgaaccacttaaccggcgagccggccatgcggcggattgcgtacttggcttgcaacgacagggcaccgcgtgcggaaaccttggattccggcatcagggccttgtgaatcagcacgtaacggatggtgccgatgtccggatcggcgtcaaccttggggtaaatcgacttctgcttaggcagttcgccggttttggacaggtcgtgcatgatctggtggatgtacgccgggatggactgcgaaaccttgaagcccaaacggaagcgcacgcggtagatgtagttcgtgccgaagtcctccaccgagtattcacgggtgaacggctcgtcggtggtttccacgctgactgcccaccaagcacgggcacgcttggggtggtcggcgaagatggagaagaagatgtccgtgtcgagtcgcttggtttccgagtcggaggtcaggtacacgatgttgtccgcaaaatacgggatgcggaaatcaccgtgcagcttgtcgagcgcgggtaggaagtcgttgggccgcatgtgacggcgttgcgcacgttcgagcttggtgccctcattccacgtgtacatgacgaacagaatcgcggcggtcagcaacatggtgaaccaaccaccgtgcaggaatttggccatagacgcgatgaagaacatagcctgaatcgccaagaacagcacggtgaacacgatggcaccgacccgcttgccggaatgccataagtagacgccgagcaacacggtggtggtgatcatcgtaatggtcaacgccaggccgtacgcggcggagatgtgttcggaatccttgaagatggcgagcacggcgagcgtggccacgcacaacacgccgttgaccaccggaatgtacagctggccgcgcgtacgggccgggtaacgcacctgcagatggggcatccagttgaggcgggtggcctcggaaaccatggtgaacgcgcccgtgatcagggcctgggaggcgatcacgccggccgaaacagacagaatcacggccaggtaccgcacgttcggggtcatcatctggaagaacgggttgagcgacttcatcgcggtgtattgcgggttatcgctattggccaacatccacgcgccttggccgaagtagttgagcaccagcgcaaccttgatgaatggccaggtgaagtagatgttgccgcgccccacgtggcccatgtcggagtacagcgcctcggcaccggtggtcgagaggaacacggtgcccatcagggcgatgccggcagcattgtccgggctgaacaggaatttgatgccgtacaccgggttcagggccgcgaacacagaccagtcgttagagagattcgtgacgcctacgatggcgaggaagctgaaccagaccagcaccatcgagccgaatactttgccgatgctttcggtgccgcgcgactgcacggagaagagaatcacgatgatcacgacggtaatcatcagggtcaggcttgggttttcgtcgaacaacccttccaatggcggcagggtctgcaagccttcgactgcggaactgatggaaaccgccggggtaagtaccgaatccgcaaggaatgccgcgccgccgagcatggcgggaatcgcgagccatgcgccgtacttgcgaatcaacgagtacagtgcgaagatgccgccttcgccattgttgtcgatgcgcatggcgatgagcacatatttgacggtggtgatcagcgtaatcgaccagaagaccagcgacagcatgccgagcacggcctctcggtttacgctgccaagccctccctgaccggcaaggaaggtctgcgcggtgtagaggggcgaggtgccgatgtcgccgtacaccacgccgagcgccacgatcgccatgccccaggtaaccttgtctgggctggattgcaagcgggcccaccatcggccgaggccgcctttcgaccatgcgctggcgattttctcggcttccttggtttcggcttccctctgcttggcgagtgcctcgcgctcctccttggtgagagtgcggcgggacaccttgggagcattggtaaaggtgtcggccctcagcagtgcttcttcttcctgtcgggccttggctttggcggcgccagcctgggctgtctgggcctttgaggctttttgggcgcgtgcggtcctttggttcgactcagccatacgttcagtcctccattgaggtggagatcatccccctcgcttatgtcaggtacatcatggtagacctcgttcacaattctgacaaattttacaagtcaacacatcgccgcgacggccgcacacccggccctcacagtccgtatacggcgcgggcggtatcgcgggtgccgcgcgccacatccgcgatggacaggtcgagcgtatcggccatggcccgcaaggtgtaggggatcatgtacggcgcgttggtgcggccacggtacggcatgggcgtcagatacggcgcgtcggtttcgaccatcgcatggcccagacccacaatccgtagcgattcgcggataccgtcattgcctttgtagctcacggtgccggagaagctcagataccagccatgttcgcgcgcaatctcggccatctcacggtcgccggaatacgagtggaatacggtgcgttcgggcgcgccgtcggccagcagagtctcgatgacttcgcgatgagagtcgcggtcgtgaatctgcatgggcaggcccagttccttggccagggcaatatgcgcgcggaaagcctcgcgctgcagttccttggcaccttcgccggtgcggaagaggtccatgccggtctcgccgatagccaccacttgctcggggtatgtggtggcgaggcgatgtacttcggcgagcgcgtcctcgaaagacgtgtcatggtaaggcttgtatttgagaggcagaccatccggccccggaacaccgcgatgcccgtggagcacggactcattggggtgtattgcgagcgccgcgtgcacgttacctggatgatcgagggccatctggacggcggtcatcaggtgcggcagctcgcaaccgcagtcgatgatacccccaatgccgacagattgcgcctgcgccagcaattggtcgacgtcgtacaccgggacttcgggctgccccttctcctgcgcctcatggctcatagcgcgcgcgaaagggattacggaggccacgtgagtgtggttgtcgatggtctgggcgtcgtccggcaatgcttcaggtgccggggcccagctacggtcgcgatggtggtgcttgctcatggtttctcagtgtaggctgtttctcagtgtaggctaccgtcagcaacgctcgtaaggcagtccggtaagacgttcgactacacgacgggtatcgccaatctcggccgcctgaacttgccgtctcttgccacgagcgcaacattcccgggaaagtagcgcaaccggcaagcgagatggccaccatcctgccgccttttctgcctcatcagcccattttctacctcattttgataaaatatgatgcagaaaagttcgtatgatgcagaaaatgaggcagtatgagatcattcgactacatcgaatactgatcgaacgcgcgtgttccgcctacacgcaagcaatccgagatggacataccgatccattgcttgccatcgccatgttcatcctcgatttcacctgcatacatccgttcaatgacggcaacggccgcatgagtcggctactcacgctcctgatgttgtaccgcaatggctatatggtcggcaaatacatcagtatcgaacaccttatcgagcaaagtaaaagcacttattatgaggcactggccgcaagcacccaaggatgggacgacaacgccaatgattatgcgccattcacgaactacctgcttggcatcatactgtccgcgtgcaaggaattcgacgaacgcatcaatctcacggcaggcggcagagcgcagggagcaccgcgagtagccaccaagggaatgcggattgaagcactgcttgatcgatccctagttccactctccaaggccgatattctcgctcgcatgcccgataccagcaccaccaccattgagcgcacgctgaaatcactgttggactccggtacgatcatcaaaatcggtgccggtcgcagcacccgctatgtgaaacgccgctaaacgcatccttgtgcgcaacatctcgtcactcttccggcgctccgctggccacgcgaatcatcgcgtactgggactcgtagaggcggtagtacgcgcccttggcggcgagcagctgcgcgtgcgagccgtgctcgacgatctggccgtgatcgatgtagaagatctcgtccgcgttctcgatcgtcgacaggcggtgcgcgatgatgaagctcgtgcgccccttgagcagatgctgcaggccggcctgcatcgcctcctcggtgcgcgtgtcgatgttgctcgtcgcctcgtccaggatcaggatacgcgggtcggcgagcagcacgcgcgcgaaggcgatgagctggcgctggccggccgacagggtcgatccgcgctcctccaccaccgtgtcgtacccgtcgggcagttccatgatgaactcgtgcgcgtgcacggccttcgccgccgcctcgatttcctcgtcggtagcgtcgagcttgccgtagcggatgttctcgcgcacgttgccggagaagatgaaggtgtcctgtagcatcacgcccatctgccggcgcagcgatgcgagcgtcacgtcacgcacgtcgtagccgtcgatcgtcaccgagccctcggacacgtcgtagaagcgcgacagcaggttgatgatcgtcgtcttgccggcgcccgtcgggccgaccagcgcgatcgtgcgccccggttcgacgtggaagtccacgaggttgaggatgttacggccgtccttctcgtagcggaacaccacgtcgttgaagtcgacgcgcccgcgaatctgcggcaggtccgccgcgtcgggcttgttgcggatctccggcgtgacgtcgagcgtctcgaagatgcgctcgaggtacgccgagcaggtgatgagctggttgtagaagttgccgatgttgatcaccggattccagaagttgttcgcgtagccgacaaacgcgatgagcacgccggtggtcacgttcacgcccccgaagcccatcacgccgacgaagtagatgaacgagatggtcatcacggagatggtctgcacgcccggccacatgaggaactggatgtgcacggcgtgcatccacgcggaacgcacctcgccctgctgctcctggaaggtcctgaactgggcctgctcctgcgcgaaggtctgcgtggtcttcacgccggcgatcgactcgtggatgtaggcgttcaggttgctctgcttgttggagagcttctggaaggcgcgccgctggaagatctgcagcacgcgcacccagatgatgagcaccgggaacaggatcaagctccacagggccagctgccagtcgatcacgaacatcacgatcagcgtgatcacgaaggtgaacacgtcggagatcacgttgatcagaccggagctcagcgtgtccgaaagcgtgttcacatagttgaccacgcggatcaggatcttgccgtgcgggcgcgaatcgaagtagctgaagggcagcgtctggatatgcgtgaagatatcgcggcgcatgtccttgagcatgagctggccgacgcgcgtgatcgccaccgtgcggtagcgcagcccgaactcgtacagcacgatcagcgcggcgaggattacggcgaggatgccgagcttgccgaggtccttgttcgggatcgcctcgtcgatcatgatcttggtcaggtacggcacggcgacgacgatgcagctcatcgagatgacgacgacgagaatgcgcgccacctgtgccatatacggtttgagatatttgccgacgcgagcgatgtcgtggaggttaatggactcctccagctcctcatcctcgcggaatgtattgcgttgtgccataagtcctcttctaaaacccctgtgcggcgccggactggagtccgagctgcttgtggtagatgtcccagtagcggccgtgtgcggccacgagttcggcgtgggtgccgcgttcgacgatacgtccgtgctcgagcaccagaatcaggtcggaatccttgaccgacgagatgcggtgggcgatggcgacgatggtcttgccgccgtccatctccttgaggtgcttctggatctccgcctcggtctccatatcgacggccgaggtcgtatcgtccataatcaggatcgacggattgtccgcgagcgcgcgggccagcgacaggcgctgcttctgcccgccggacaggcccacgccgcgttcgcccacgacggtgtcataaccctgcggcatcgacctgatgaaattgtccgcgccggcgatctgggccattttctggatatatcggtcgtcgctatcatcgctggcaccaaaaccgatgttgccgccgatggtgtcggagaacaggaacgtatcctgcgccacgatgcacacctgcgagcgcaaggtggtcagcggccagtcgcgtgcgtcgatgccgtcgatgagcacatggcccacggtcgggtcgtagaagcgggagataaggctgacgagcgtggacttgcccgcgccggtttcgccgaggatgccgagcttggagccggcgggcacggtgaagtcgaggtccttgaggatcggggtctccgggtcgtccgggaaggcgaagctgacgtggtcgaagcggatgtcgcccttgatgtgcagcgggcaggacttgcgttcggcggactgctgggcaccggatgttccggaagccccgggcgctccggtagcctcatcatcgtgcttgacctgctcgacgatcgtgaccgcctgcttgacggcttcggccgcgtcgggcttctccacgatgcgcggctgttcggtgagcagcttacgaatcttgatgcagctggcgttgaatcgctgccagtcgttgatgagccagccggactggcgcaccgggccgtcgatcatccacaggaaggagttgaaactcaccagattgccgagggtcatgtagcccttgatgacaagaaagccgccgaggccgagcgtgatgagctgcagcgagaagccgaggccgtccagccagggcatgtacctgcgcgagttgtaggccagggccatgttgcgctgcatgtagtcgtcgttgtgctcgtcgaacttttcggtctcgtacggttcgcgcacgaatgccttgaccacacggttgccctcgatgttctcttcgaccatggagttgagggaggccagcgagttgcggatggcgaagaacagcgggtgagcgtgcgtggacaggccgcgcgtgagcacaaaaatgaacggcgtgacgcaggccaggacgagcgcgagtcgccagtcgatggcgaacatcacgcacagggcgcccacgaacatgaccacgcagtcggcgatctgatagctcacccaactcaggcagtggcggatcgcgtcggtgtcggaggtcaggcggctcatgatgtcgccggtgcgtgtgtggttgaagtacgtgaagtcgagctcgtgcagcttctcgtattcgtcggagacgaggcggtagaccgagttctggccgaaacgctccatccacatctggtagccgtatcgcgcgcccacgcggatgatggtcatgaggatcatcagtccacacagacgtggcagttcgtcggcatgtccgccgacgatgacgcggtccacgatgataccggacagaatcggaatggtcagggccatcgtgttgttggcgatgaacagtaggagcgcgcctaccacgcggggcaggtctggtttgcagtatggcagcacccatttgagattgcttgcgctggtatcgattcccggatcgacgtacatgtgaggagatcaccgtttcttggggattgtttgcttgtggtatggtgcggcatgctcctgcgccgcacgcggcaatcgctgccgccgcgattcacgatcagccgtgcttcgcactgcgcctgtcattggccgcacgaccggagctctccttcaccggtcgaagcacgttcgactttcgcaaacgcgtactagtctagacggcctgcgtccaatcgcaacagcctacaaccctgcgtgttccccgcattagcaacgcggcacgacccgctaagcgcaacattccccggaatgtgtcgcgcgaaacgttgcgcatgcggcaatgcacgctcgagacctgttgcataccagtcgaccaaattatagaatcataattaagtaaattacgattctataatttgcgcgtgtgcgccagggcagacagcaaagcaaggagacaagggccatgttcgtcgggcgagataaggagctttcggcactggaacgccgctggagctcacagcagttcgagtgcgtcgtggtctacggccgtcgccgcgtgggcaagaccacactcatcaaccgcttcctcgaagatcgccccacgattttcttttcggcaatcgaatccagcgctcccaagaatctcgaatcgttaagccgcagcattgctctgtatgaaaagggctcagaggcgttcgagacagcgcccgtataccgcagctttgaatccgcactggaagcggtgttcgcgctggccgcaaagcaacgcatcgccttcgtcatcgacgagtacccatatctggctaaagcagaccggaccatcaattcggtcctgcagcatgccatcgaccgccataaggatgacagtcagctcatgatggtgttatgcggctcttccatgtcgttcatggagcgccaggtgcttgggtatgagagccccctgtacggcagacgcaccgctcaaatcaaagtggagccattcggctacgccgatgtccgcaagttcttgccaagatacagcaacgaggacgccgccactgcttacggacttaccgacggtatcccgcagtatcttcggcaactggacgacggcatcagcatccgagacaacatccgttggaacatcctcgacccaagctgctatctgtttgaggagccagacaacttgctgaagcaggagctgcgcagtccggccgagtacaacgccgtaatccaggccattgcctccggggcatctcggtcgaacaccatcgccaccgcatgccatatggaatcgtcctcatgcgccacctatttgcgcaatctcatcgatctgggaatcgttcgcaaggagacacctttcggcgaggacgctcctcgcaagacgatctaccgtatcgaggactcgttcttccgattctggtaccgatatgtgccgaacaacatgtccctcattcaatccggtcatgccgatctcgccgccgaccgtgttatgcgcactatctccgactttatggggcaggtgttcgaagacatctgcgttcagtggatatggtcccataacggtaccgaggcattgcctttcctcatgcttgatgccggacgttggtggggcgccaatccgaccacccgcagtcaggaggaaattgacatcgtggcttcaggagaaaaaccgaaaactctcctattctgcgaatgcaaatggcgcagcgtgccatccggtctgcagcagttggaagtgctgcgcaatcgcgccagactgctgcaccccgaaaccagccattacatgctgttctccaaatcaggcttcgacgagcatgtcgccgcccgcgcggcgcaagacggtacagtgacgcttgtcgattttgcggatatggattagtcggttcactccattgcggacggtaagggtgaagtaacaggctgggtcaatggaccgaaccgctagaccgggcaacagacccaatccgtgacacattcccgggaaagtggcgcatgtcatatcacgctcaaacaacccagcatgtatatgggcaggtattcggctcgtccaacagtctccgcgttgccatcatggaacacgtaggcatgtcctcacacgcttgtatctcgtcaagaaacagcagagtcttgcccggcgtaatttccgcgccggaaagtaccgataaccgcagtatcaggtcttcggtgtccttggccttgcttaccgtttcgaccgcctgaggcatttcgatgaaattcacctcagccacatgctcataatggtctgcaccgaactgctcaatcagcgtggtcttgcccacctgccgggcacccgtgaccaataagccctacttggttttacggttcttccaagtcagcaaccggccgaaccatatctcgcggcttcagtcatccttcatcatcagtattcggtagcggccctaaatcagctccgccatccggctcataatcactcgccaaccacgggcggaagtagctcccgactatccacagtgggacattggtcagccaatcctgctccttgtaattccgcatcgacgtacggtaaccgcaaatcccgtatttgtcgcacagccacttcaagctacgcttatgacgctcggtaccagctttggcctccagcggaatgattgcgccattacctgcaaagacaaaatcaacttctcccgtactgttcgcattcgaccagtacatcggtgtgatgccggcggccactaattgctggcaaacatactgttccgttaacgcaccacggaattcggtcagcccgtcatcaccaaggaccacgcttgcgggagtcagatccagggccgctgccagcagcccaacatcatggagatacagtttgaacgcggaatcatcacggtatgacggcaatggtgccgcaggtttttcgacgcgatacacccgcaacgcaagaccagaatcgacaatctgctgaatcgcggattcatattgcgccacccgagcgccacgagcgatgtggccaaaaataaatttataccgcaatacacacttttcctagggttgcaattcgcgtattctacatttttcctagggttgcgattgtccaaaattacatttttcctagggttaataatgcagaatactgcacttttcccagggttagtaccctgaccttccctaatcacacggtgttgtaaaggcgggcggggaaggcgtcgcggtattggccgggggtgagtccggtgcggcgcttgaagacgcgcataatagaatatctcaagcatcgatgaatacggagatgatcacaatggctgattacatcggaacagtcaacaaccaatcttcaacacagcccaacggtcacagttcacatagcaacaccaccgagtcgctatggcgcggcacggattatggcaaatggttcgtagcggattcatgcacgtcgctgtcatcaagtatccaaggtttcgcaatgccactcatcgcgcagaccgtcacgggctcaccggcacaggcgacgctgctggattcaatcatgaccatgatatcgtcggtattgcggttgccaggtggcgtggtacaagataagtacgaccgcaaaaaacttatgattgcgttcggcctgattggtttcgcactgttcggcatatgcgcggccctaggatgggcgggattactcatatacccggtgctgatggtacttgcgatatgcctcggcatacgctcaggcctcctaggaaccacgagcaacacgatgctacgaggcatcgttcccgatcaattgctgcccaaggcgtcaagcctcaatgatggccgcgatgccgccctcgaactcgccggcgcaccagtaggtggcgtattgatcggcggcggtctatggctgccattcgcagtcagcgcgctgctgaatctattggaaaccgcggcggcgatgcggatcacaaaatactggcatcgtggcgggcggaccaatgcggagggccgcgcccttgccgacgatgaggccgatgagaatggcgatgcggccaacatcactcaggccgctgacgagcaggcaacgaccacgacatcatccgcgtcacagtattggcgtgagatgttttccggattccgctggcttcttagcgagcgattcgaacgtcgcctgattttgtcgagcgcgctggcgttcgcgtgcttcaactcgttcctgctgattacggtgctctcgatcggctccgacccatcacatgtggtgtcagccagtttcatgaacgtttctgtgtctgtgggcgtcatcgttggctcgctcatctcttccgtgctggttcagcatgtgcgcggcggcatagtcgccgtatcgttctacgtgctgatgagcatcggcgcgctcggcgcagcgctggctccgtggattcttgcgcgtatggcgtttctggcaatttcgctgctggccctaccggccggcaatgcggtaatcaacggattccaatcattgctcatcaacaaggagcatatgggccgcgtattcgccggcatgggcatgattgagacgattgctgccccggtgatcacatttctgtccggcatcgccatgcaacactggggttactcagtcacgtccgtggctttgggcttgtgcatcgtggcggccgcgatccctgcagtgacaatgagggaactggtcacactgcctaagccggatggctgggaggaccatatccgcaaatccgggctcaccaagttctgacaacaagtaagggcgactatctcccggatttgtgacgctcggcaaccgtcagcgtcacaaatccgggaagaggaaggtggatacggtttcagccgcgcgggcagcaaggtggacaaatcgttgccgggatggaatcgcggcaagtatgcaaaagcctcccgttcgcgcgcgacgcataagcgcgcaaacgggaggcttcccaaccgcagcatcatatgcagaaataaggagagtaaggcatatgctgccgcggtcacaccccgccgggaacctgccgcaggccgcgtccggcatcgaaagccctgcagtcgatgcgtgcggccggccgttcccggcgcggtggccatgtcagacgtcagtcagacgtcatcacttctgccagccgatgtcctgcggcaggttgccggcgaagccggacgggccgtagttggccaggcccttcttcgcaccgaggtacgaagccgggttggagaccgggatggtgccgtacagcttgagggcttccttctcggcggcgttgacggccttggtctgctcgtcgtagtcggagaggccaccggccaccttgacgagcttgtcgatcttttcgttgcccacgtaggtgaagttggacggaccgtcggaggtgtacagctgcggggcggacaccacgaaggtcatggcgctcggagcctgccaagccatcggcagcacctggtagttgccggaagacacggtgtcggagaacttggactcggccacgttcacgaccttgaccttgatgccggccttcttcatcatcgcctggtaggcgttggcgagggcctgctgggtggcgttgtcaccgaagaaagtgaaggagatctcaagggtcttgccgcccttggcgtagtagccgtccttgcccatcttgtagccgtcggcctcaagggttttcttggcgttgtccacgttgtacttggcctcggcgggcaggttgttctcgtagcccttctggaacggcagcagcagctcggagcccggctgctcggccttccagttcaggccctggaactgcacgttgttgtaggtgttcacgtcgaaggcctgagtgatggccttacgcacctgcaggtcgtcaagcggcttggacttgctgttgtactccagcacgcgggtcttggtgctgtagccgatgcgcagctgggcgtccttgacggaacggatggccttgatgtcgtccttggtgttggcctccacggcgtcgatctcgccgttctggaaggcgttgagggaggcggtgtcggccatctgcttgtagacgatcttgtccagcttcggcttgttgccccaccacttctcgttcggcacgaaggtgacctgggagtcggagaaggagtcgaccttgtacggaccggcggcccactcgttgtgcgggttcttcacccagccctgggtgaaggtcttcgggtcggcggccttcgggttcaccagagcgccgaagacttcctgccacgggtagtacggggtcttgtaggtcaccttgacctgcttcgggctgtcgccctgctcaacgctagcgatacggtcgaagccgtcggtgctcggcgggttgtagtccgggttggagccgttgttggcttcccacgtggccttgaaggcggtccagtcgatgtcggagccgtcgttccacttggccttcgggttgatgtcgtactgcacgaccatcgggtccttgctcacgagcttcatgtcggtcaggaagtccgggttcaccttaatcggggagccattgacctggtcggtcatgagcaggctgggctggtaccagctccacagctcggacatgtagccggtgttgccgtcggaagacaggtagttccagttcgggccgatttcgacgatggacagggtcagcgtgccgccgtccttgacgttgtcacggctctggtggttgtcgtaacgctcggtgaccttcggcatgggcaggtcgccggtgtacgacgaatcgatgccggccggcggttcggtggcgctcgaggcattgctggaaccgttgccattgcccgcgccgcagccggcaagcagcatggcaagcgccgcagtggccgcggcgagcgcggtcagcttacgtgtcttgttcattgttatttcctcctctatatggttccgaccgtcatgcgaaatggcatgcaacctgatggccgctcggtcgggaagtgtcatacggccgcagcgccgggcgttcgccgcggcagcgggcctgttgttcggcgctcagcttgggcatgagcgggcagcggcccatgaacgggcagccttcgaacgtctcggtggggctgggcacctcgccctgcagcacgatgcgctggcgggtgcgttccgccttcgggtccggcaccggcacggcgctgatgagcgcctgggtgtacgggtgcaacgggtgctcgaacacgtcttcggtgtcgccggattccacgatgcggcccaggtacatcaccgccacgcggctggagatatggcgcaccaccgacaggttatgggccacgaacaggtaggccacgcccagcttgttctgcaggtcctcaagcaggttgatcacgccggcctggatggacacgtccagtgcggagaccggctcgtcgagcagcacgagcttcgggttgaccgacagcgcacgcgcgatggcgatgcgctggcgctgaccgccggagaactgcgtggggaagcggtccacctggtcggggttcagctccaccagacgcatgagttcaccgatgcgttcgcggatctgctctttggagtagtgctggaccttcatcggctcggccaggatgtcgtagatcggcaggcgcgggtcgagcgaactcatcgggtcctggaagacatactgcacggccgaacgcagctcgcggcgcttctcgcacggaatcttgtgttcgagcttggtgccgaacatctcgatctcgccgtcctgcggctgcttgaactccatgatctccatgagcgtggtggacttgcccgagccggactcgcccacgagcgccacggtctcgccttcgcgcacgtccagcgtcacgtcgtccacggccttgacctcgccgatcttacggcgcaggaatccgccggcggtcagcgggaaggtcttgcgcatgtgcttgacgtcgagcaccatcttgcgttcgtcgcgcgggatgccggcgaacttcgacttggcggcctcggccaccgtgtacacgtcgtggaaggtcaggcccttgtccacgatctcctgggtgcggtggcaggccacgaactggcccgggcggcccggcaccggctccatggccggctcggtggtgtggcatatgtcggtggccagcgggcagcgcggcgcgaacgggcagcccttgggcatgttgaccaggttcatcggggagccaggaatcggcaccaggcggctgttgcgttcgcggtcggaacgcggcacggcacccagcaggcccatggtgtacggcatggccgggtggtcgaagatggagtcgacgtccgccttctcgaccgggcggccggcgtacatgacgacgatgtcgtcggccacgccggcgatcacgcccagatcgtgggtgatgaagatgacggccgcgccggtttcacgctgggccttgcgcagcacttcgagcacctgggcctggatcgtcacgtccagtgcggtggtcggttcgtcggcgatgatcacgtccgggtcgttggcaatggccatggcgatcatcacgcgctggcgcatgccgccggagaactcgtgcgggaaggacttcaggcggtcctccgggtccgggatgccgaccaggttcatgagctcgatggagcggtcgtgaatctgctgttcggtcatcttcggattgtgggtgaccagcgcttccttgatctggtcgccgatggagaacaccggggtcagagcggagagcgggtcctggaagaccatggcgatgcccttgccacggatctcgctcatctcaagatcggacttgctgagcaattcctcgccgtggtaggtgatggagcccttgacgctggcgttcttgtccagcaggcccatgatggccatggaggtcacggacttgccggagccggactcgcccacgatgccgagggtcttgccggggtacaggtcgaagttcatgccgcgcaccgcgtgcacggtgccggcttcggaggcgaagctgacggtgaggtcgcgtactgaaatcaccggttcggatgccatgccttgcgctcctgtggtgttggggttggtgttggttgttacgttgcttgcgttgcgttcgtcgctcatgatgcccgtctcccctctcactcggccttgccgccggaacgggagtacgggtcgatggcgtcacgcagtccgtcgccgatcagctgcacggagaaggtcaggacgaccagcaccacggacgggaagatcagcacccatggcgaggtctgcaccacggactggccggcgttgagcagcgtaccgagcgaggtgtcgggcgccttgatgcccaggcccaggaagctcagcgaggtttcgctgttgaccgcaccgatcacgccgagcacggtgttgatgaccagcaccgaacccaggttcggcaccagatgacgcacgatgatggtgaaggacggcacacccatgaacttcgccgcgcggatgtattcgcgatcgcgcaggctcagggtcagcgtgcgcagcgtacgggcgtagccgatccaaccgaatgcggtcaggccgatggccagccacagccagtcgctgccgccggccgccatgccgacgatcagggcgatgagcaggaaggacggcacgacgagcagcatatccagcagccacatgcccacgcgctcgaaccagccttcgaagaacgccacggccgtgcccaccagggcggcgatgatcgtggtgccgaacgagctgaagataccgatggtcaacgaacggccgaggccgcggatgatcatcgcgtacatatccgagccaccgaccgtggtgcccagccagtgctgggcggacggcggcgaggcgagggcggcgaaatcgggctcatcgtagctccactgggagaatttcgagccgaaaatcgccaaaagaatcagcagaatcagcaccaccagacccaccacggccgaggggcggcgcatgaagcggcgcacgtacagctgcatgcggccggtgcggtggaagtcgtcggcgctggaagcctcctgggcgttcctggcgtcggcggactgcggttcgctgccctgcggatcggtgagttccatatcctgggcggcggcgtcggagaccatgttttcgttgtcgttcatcatgttagatcgtcctttgcgcggggctcagctcagtcggatacgcgggtcaagccaggcggagaagatatccgccagcagcgcgccggacagcgtgcacacgccaccgaacgcggccacggccacggcaccgttgatgtcgttgttggcgatggtctgggtgaagtacatgcccaggccgttgatggcgaacacgttttcggtgatcaccgcgccggtgaacacgccggcgatggagaaggccacatccacggcggtcggaatcagcgaggtgcgcagtgcgtggcggcgaatggccgcgttgagcgtcaggcccttggcgcgggcggtgcgtacgtagtcggcgttcatggtgtcgagcaggtacgtgcgctgggtgaggtggtagcccaccatgcccggaatcgtcatcacgatggtgggcaggatcaggtgctgcagatagtcaaacacccaaagcaccgggttggagccttggtaggagtgcaggccggtcacgtagaacgcgcggctgcccacgatgttgttgaagttgatggccagcagcaccaccatcaggcccatgacggcggccgggaccaccaggaagaacgttgcggtggtgttgagcacgcggtcctgccacttgtactggcggatggccgtgtacacgccgatgctcacgccgaagaggatggagagcacggtggcgagcgtcaccagctgcagcgaagcggagatacgggaggcgatggccggcgccaccggcgactggtccgggctcaggccccagttccactgggtgaggatgcccttgagccagcggaaatagcggatgacgaccggcgtctggtcgttgatgttggccagatcgagcgaccggttaatcgacgcgatcggcggatgcggattgcgcgacatgtagttcgaacgcggatccatgaatgcgctggccaggaaatacgtcatcgatactgccacgaacagcatgatcacgtagttcacaatgcgcttgatgatgtacttgaacacccaaccacctcccaaataactagggaagtgatacccccccccgctcaaaaccacaaattgagttcaatatatggaatatgggtattgacttttccgactttttcctgtacggaaaaccgcgaaaacacttactgtatattgggcaaacatccgtttgttaattttgtatttcctgagcctttgctggacttgccttatactttcgtgtcagcagtccgccggcccggatggtgacagtccccgccgccggcaacggattatccatcagcatcatcagcatcagacaggggcatcatgacgacagacgccagcgcacgggccatcaaacccgaacttctacgtacgtacaccgaggatttcaacaaggaccgcgccaacctgatcgcggcggacgcggcggtttcggccggcgtactcaaggcggccaccgactatcgcggcgtgcgtgcgctgccgcgcgacttctccatcgaactcaagcagggttcgatcaccaatcaggagcgttccggccgctgctggatgttcgcctccctgaacacgctgcgctacgagcttatgcatcgctggaaccttgaggacttcgagttctccgagacctacctcttcttctgggatgcgatggagaagtcgaacacttatctggagaacgtgctgcgcacgctcgacgaggcgaccgattcgcgtctgttcgaagccatcaactggggcccgtccgacgacggcggctggtggcagatgttcgccgcgctggtgaacaagtacggtctggtgcccaagagcgcctacccggagtctgagaactcccgtaattccgatgatttcaagcagtacctcaactccaagctgcgcgagttcgcggccgagctgcgccgccgttcggctgcgggcgctggcgaggacgagctgcgcgcgctgaaggacgagtacatgggcaccgtgtaccgcatctgcgccgtgtcgcttggcgagccgccggagaagttcgacttcttcgcgcgcaccaaggatgatgatgaggataagaagggcgaggcttgcaagtgcaaggccgaggccgacgcagacggcaaggccgaatcctgcaagtgcggcgactcctgcaaatgcgagggcaaatccgacgccaaggcctgcaagtgcgataagaacaagtccgacaagccgaaaaccggtaaggacgagcgcccgcagattcgcgagatcggcatcaccccgcttgagttctacaagaagtacgtgccggtggacgtcaacgatttcgcgacgctggccaacgccccactcaagagccgcccgttcaaccggcgctaccgcatccgcttcagcgcgaacgtggccgaggcgggcgatatggagttcgtcaacgtgccgctggacgtgttcaagaaggccgcgcttgaccagctcaccgccggccacccgatctggttcgcctgcgactgcacgcagttcgcgctgcgcaaggacggcttcttcgaccagtccgtggtgcgcgtcgaccagctgttcggcaccgagttcaccggcgacaaggcccacggccttgaatacggcgacagcccgagcaaccacgccatgactttcaccggcgtgaacctcggcgaggacggcaagccgaaccgctggaaggtggagaacagctggggcaaggacgccggcaaggacggctactacgtcatgtccgacgcctggttcgaccgctacgtcaccgagctcatcatccgcaaggaatacctcgacgacgccacccgcgccctgctcaccgccgaaccggtcgagctcgacccttggcagcccctcacccgccgctgccgctgacgttccgctggcgggagcatatattcgaatgccccttctctctgttcagagagaaggggcattacgttatgcgagtacgcccggccgcacctattcgagactatcgcggctgagctgagcaaaagtgccgtcatcatcggccaattgccggtaggttccagcctcgctaattgttccgaactagttatccacagagttatccacatctcccgcaagctagagccacataccccggttttcatagcgagcatgtgaccgctgcgctacggtggcgtcatgaacgacatattgcccactccaccgcccggcgtattcgacgacgaaccgtccggctggacccagccccacacaccgggcgttgcgtctgcgcgcaccatcaatcctgagctacgttcatcaccacgtatggcgagttccgcgccaactgtgattacaggccctgtgtcgccagcaatgagcaaaaccctcacccaacgtaagcgggaaatgcttaaacgatgcacggacgccgcgcaacagctcgggcaaccggtgctcttcggcatggccacatcgctgatactgcaatccgtgccgcttcccaaggattgcgatatcgaccccgccgagctccataccgtctccgactcacaccgcacacgaatacgtgccatcgtgccgccaacgacaccacacatctggaagccgctgagcgatgcgcacaatgtgcgtatcaacaaacatgtgtacgcactggatctgatacacacttgggcacaactcgccgctcatatatcgctcgaatcgctggtcatacttggcgacgcaatccttacggcaatcgcccgcaagccgggtctggcgaacggccgcactgctgacggcatttatcaggacttcgtgcggcaagtcactggactcccgaaattcaacgcaaaatccaagtgcatgatcgctcttgcattcattacgccccgcgtggactctccgatggaatcaaagacccgcatcgcgacgacgaaatacgggcttccgccagccgtgacaaattacacggtgcccggcgcgacattcagcaacggcgcgccgataacgctcgatctcgcttggcccgaatttcgcgtcgccatcgaatatgacggcgatcatcatcgcaccgacaaaaaccagtggcggcgggacaacgacaagcgcgaactgctgcgacatcatcattggatcgtcatcatcgccactgccgcgaacatggccgatgagccatcccaagccgaactcgcctaccgggtcgggcggcagttggcattgcgaggtgccgtattcgatttcactttgacggcaacgccactcgatgagatcgcccggcggaggcgacgaagaatataacgtttatcgcgaaagtcgtacagtatccatgttgcgccgacgctgcgcgactcggtgtccgtgtccgatgtcccggtagcgatgtcaatcgatttatgtgtggaccgggccagatttcgctgtcccggttctccatttcgcccctttttgagcaaccaagacaaaatttcattcacctatcaccccaccgtgcaatattcgccatcgtacatcggcggaattccggggttttgggattacggataatgggcgtttacaggggggctgtcccggttcccaaaaagaagccgaaatcacgaaccgggacagcgaaatctgtcccggtaatcgcgtcaatcggttgccgtcatcaccggaacatcaactgcgcataggtcgaacgcttcaatgcgcaacaggcatgcgaccatatcgcgatagcgatattccgacggaagtatgggactcaccacgcgaccaatattatttgccgagctttggagcctcgtgcttggcgtggcggatcacggcatcggggaaaccggcgtggatgtagtcggacagcatccgcaatagcctctcgtcaaaggtgtgccgctcatcgctgctggcatcgaccaggatgaaatcccatgagtattcggtgtcaccgtcgttgatgatgagtccgcggccagtgatttttgcggccagcaacgcggcgatctgtatggcgcctcgcttgaccaaggccgattccgcttgagtcaggttgcccgaaaatgtgacggtatacatcatcagccccccccttctttgttattttctagaacagcaatgccttattgtaaacagacagcactctgccataatccttttttcaatatgcggcccatggcattcccagcattaaaaaaaaagaaacccggcggagggggccgccgggtgagagagaagagagaagaagggttcagttatggggttcgaagaacctcgccaccggtatgaacttcattccgttgacatcttctatataaccgctccatgcttggcgaattgatgtgcttgtctgggaaaagtcttggcggagtgtgacgaatttgtgacgcccgccgacaaccggcctcgcattgtcggggcttgaccgcacatacggcaacgggccacctcgcaacacttcatgtgcgaggtggcccgtcagctacgagctagcaatgccgaatcactcggcggcgagcttggccttctcggcggccagacgctcggcttcggcggcacggcgagcagccagcgcttcatcgaagcgagccagctcctcttccacggcctcggtcggaatcttggcgaagatcggtgcgggcttaggcaccacggcgccgacctcgatcgcctcgctcttccacgggtgcacgttcacaccgagctcgtaatcgccggtgatgatcgggtacgtgaagccgggcttgtcgagatcctcgacttccttgagctcaggcagcggcgagaaggtaccggtgccgccgagcgcctcccacaccttctgtgcggagtgcggcaggaacggcgcgagcaggtggttcgcgtcagacacggcctgagcggccacgtgcagcacggtgccgagacgagcctggtcgtccttaatcttccatggttcggtggcggaaatgtacttgttgatgtcgccgaccacacgcatcgcctcggacagggcgtgcttctggtggtgggtttcgatggaggagccgaccacgtcgaacgcggcggaagcctcttccagaaggccacggtcttcgttggtcatcgaatcctcgtccagcggcggaatctcgccgaagttcttgttgatgaggttggccacgcggttcaccaggttgccccacgaagaggcgagctcctcgttgttgtggcgcacgaactcggcccaggtgaagtcggaatccgaggattcggggccagccacggaaatgtagtagcgcacggcgtccacggggtagcgggcgaggatgtccttgacgtagatcacgatgccgcgggaggagctgaacttcttgccttccatggtcatgaactcgctggccaccacctgctcaggcaggttgagcggacccatcgggccggtttcgccgcccttggagcccttgccgttgtatgcgagcatttcggacggccagatctgggagtggaaggtgatgttgtccttgcccatgaagtagtaggccgggcactttgggtcgttccaccattcgcgccacttctccgggtcgccctggcggcgggcccattcgatggaggccgacaggtagccgatcacggcgtcgaaccacacgtacagcttcttgttcgggttgtcgatccagcccttcaccggcaccgggataccccagtcgatgtcacgggtgatggcgcgcggcttgacttccttgaacaggccgagcgagaagttgatgacgttggtgcgccagcccttgcgggtctccagccatgccttgttggcttcggcgagcgccggcaggtcgaggaagtagtgctcggtctgctcgaagcgcggggtttcgccgttaatcttggagacggggttgatgagctcgtccgggtcgagctcgttgccgcaggcgtcgcactggtcgccacgcgcaccttcggcgtggcaaatcgggcactcgccctcgatgtagcggtcgggcagggtacggccggtggacgggctaatcgccacctgctgggtgcccttgtagatgtagccgttctccaagcactgcttgaacatctcctgcaccacgtgctcgtggttaccggtggtggttcgggtgaacaggtcgtagctcaggccgaggtcgcacagatccttggcgatcacgcggttgtaacggttggccagttcctgggcagtgaggccttccttctccgcctcgacgagaatcggggtgccgtgctcgtcggtgccggacaccatgagcacgtcattgcccttcatgcgctcgtagcgcgcgtagacgtcggagggcacaccaaatcctgcaacgtgaccgatatgacgggggccgtttgcatacggccaagcaacattcaccaaaacatgactcataaggcttgattatccggcgcggcggggacacgcccggatagctgccgcgccgccatcctcatcccactcacctatccgcccgtaacttcccccacatacttatccgtacaccgcttgcgcgcttatccgcatacgcattcgcacacgtatccgtacgtgcatccgtacacacgtccacgcacccatccgtacgcacgtccacgcacatccgcacacacttccgcctgtcgatatccaccgagttatccacatcattcgcgcacctagtgaagttatgcacttatccaccgttttcgcttatccggtggcgcgcaagccgtacttctgcatattgttcggtcatggatatcacagcaggtccgatgacggacatcacaacagtcacctcgccggcaaccgcgcagcccgcggtgccgccgatactgtttaccaaggatctgccgggaccgctcagccttaaccgtctggccgccttcggcgcgttacgtaagctcgacgattccgccggctactggatcgagcattcgggcacactgtatggtcgcgcaaaaatcgtcgcggaggtcgccccgtttggcactgtggtgtgttcgatgaccgccgcttgggtatggctgggaggccccgactttccgagcaccatagacgtgatctccacatcgcacttccgctcggcatccgtcagccgccgtatccgcgtattcaaaagattgacgttgccggagcaaatcatcaagctcggcgggctgcctgtcaccacgccagcccgtacggcttgcgacctggtgatgagtcctgaagacatccccgatccttccaccgtcaacgcactggtgtgtcagctgatgtccgcgtaccagtttcggccaaacgactgtctgcaaatcgtcaaggagcatcggcatcacaagtatgccggacgtgcacgcatgttttttgaatcggtgcagaaggagattgacgaaccggctttggagcaatgcgcatgacgaggggattcattgccagaggccatcgcagaggccgccatgccgctcaccgtttacggcatttgcggcaggcgcaacggttgcctcgccacgcggcggcggcacactcatccgaatccgcatcgcgcgcaatctcggatatgaccgcgccgcctgaaccacccatcagacttacgcccgcggtggcatgttcgcccgatacggatgttgccgtgctctggcacatcgcatatcacgtgcccgaactgcgtaaatggctggttgccaatcccaaagccgacgcgcctttgctggaattggtctcgcagcgtggtgggcccggggtccggcaggcgttggaaatattgttcgagtcgatggaagcgtaacggggagataatcgccggctgctgcgctatcccttgattttcagcacagccgcatacacctgcttgcgattggccaacgatccgtcagccagtggatgctcctgcaccacttgcgcgatggcgtccttgatacgcaggccgtcctccaaagcacggtcgatggccagcacggccatgtcatccacgctcaacgtactgggcgcggccgcttcggcctcctcgttggacgcgccgccgacgaccagcaccatctcgccacggggcggatcatcaatcacactttggcgaatctcgccaatcgggccgcgacgaatctgctcataatccttggtgagttcgcggcacagggccatcgggcgattcgggccgaacgcgtccagcagatcgtccatcgaatcggcaatgcgatgaggcgtctcgtagaacacgatggtgcggcgttcgggcaacagcgtgcgcagatactgcacgcgctcggaatgctttcgcggtaggaagccctcgtagcagaaacggtcggtgggcaggccggagagggcgagcgcgtcgagcacagcggaggggccgggcgcgcaggtgacgggcaggccgcgttcgatggcacggcgcacgatggccaagccggggtcgttgatggtgggcatgccggcatcggacacgacgagcacggtggcgccggtttcgacctggtcgagcaggccgtcggccttgtcgcgctcgttgtggtcgtgataggcgatgacgcgaccgttcacatagacgccgaggcgacgggcgagatcgtagaggcggcgcgtgtcttcggcggccacgatatcggcccgctccaagagggccaccagacgggcggaggcgtcgccaacgttgccgatcggggttgcggcgagcaccacggtgccggcggggacggtcacggccgattcgcgggattgggtggcggcggattcgccggcatgaacttcatcattgcgttcaggcacttgcgtcacgctaccgtcagcgtcatactgctcattcaactcatctgcgcttgtcatactcccagtattgcccataccacagagcaatccacgacaatccatggcggaatcgaggcattctccctttgcaggggctgatttcacatgttccggaagtctacttccgtttcaaggggctcctcatccggtgaagcaccagtacaaacggctttgacgcaacgctattccgccattttggcggcatatctacttgaccatcagcccctcgaaacgcaagtagacctccggcaaaccccaaatcagccccttgaaacgcgagatggcacaataccaacgaagacaaatgaaaagaccctctgcggtggaatgaatgcagagggtctcgtggagctgacggtagtcgaaaccgcgacctcttcgatgcgaacgaagcgctctaccaactgagctacagccccttggatgttactttgctccgcaaagcaactcgcaacaatatagtacggagtgcggtcaaacgcaatttgacgccgaagtgtcgcagacggggtaaatcacccacaccgctccgcatggataccgcggtggcacccggcaacgtcatcatgcttccagcacatgcagcactttcttttcgttgtagaacgcgaatacgatgccgcccaagccgcacagcacggccgcgcacacggcggcgatgcgatagcccgcgccggacgccatgccgatggtggagacgccggtgaacagcagcatggccacggactgccccatcttcatcgcaaaggtgcgggccgcgtagaacatgccctgacggtcctggccggtggtcttggagctggcgtcggcgatattcgccacgatggcttgcggcagaatgccgaacgcggccatcggaatcgcgccgaccaccgagagcgccaaaccctgggccatcgccggaatgaagccgagcgcggccgaaccaagggcgccggcaaatgcgaacgcacaggtgaagatcacgaaggcaaccagcagcaggcgcttcttgccgaccttattggccaagatattgaccggcagatagaacagcacggagacgccggtcatgagcacgaagtagatggtcgtggtggtttccggcagcttgagcaggctggtcacgaagaacggcagaccggtctggaaggtggtgatggccacccagtagaccacgtcggaacacacgaacttgcggaattcgccgtcgccgaacgtctgcttcagggattcgatggccgattcggaggtgggctgggagttgacgtagtccttctcgcggatggccagcggcggcaccagcatgcacacgaacgccacggcggccatgatggtgaaggtcacgcggatggcggtgatacggcccatcatcggcacgaacgcgccccaaatcaccggcgccacgtacgcgatggccgtgccggccacccaagtgaaggagatggcggtggagatggtgagttgctgcttggagtcgtggccgagttcggcgatgagcgcgttgtacggcgtgcagtagaacgtgaggacgatgtagtagccgatcacggtgacgaacaggaacgccgcgttcacccagccggtgccgttgatcggactccagaacacgagtacggtgaccaccgcgagcggcagggcggcgaatttcaggaacggcatacggcggccggatttggcgtcgcaacggtcggagagggacgccacggccgggtccacgaacgcgtcgaagaatcgggcgaaggcggtgatgccgcccaccacggtcacgataccgagaacgaccaggccctgcggcacgaatacggtctgaccttgggagatggtctcctggtcaggttggtagaaatacacgagccagttggagatgatgccggaaagcagcgcccacccgaactggccgaccgcaaacgcccacactttggcgatggggagatctttgatggctgatttcgccggtgcaacttgcgcgcccgttacacttgctgtagtcgtattgcccattccccataacctccgaatcaacattgacacagtgtcaaaaaccagtatacaccggggttttacactcaattccctgcagggcaaaaccgcacaccacaatccacaccccgagccgccttcccctcagccatccgcaggctctacgatgagagccatgactggtctggccgaacgactaccgcacgtcgccgctttccccgaagcgctgggcaccgggttgctgctgcataccgatgtcgcgctggacgacgggctcagtaactgcatcgatatgttcatcagcacctatgaagccgcattgtcccggttcaaggatgattcgacggtcggccggatgcgcacggccacgcatggcggcacgttcgattttcctgactgggcattgggtttatttggcctgtacgaccagctgtttgcgtcgactaatgggaccatcgacccatgcgtgggcgaggatttgattcggcttggctatgacgagtcgtattcgtttacgcctgcgccagatgccgctgaacatgcaggcgcgatccacggacgagccatttggtcagccgacgttgagcggcatggcacaacactggtgacgcgcggaccggtcgcgctcgatttcggcgcgtgcggtaaggggtatttggtggatttgcttgcggggatgttgggtgatggcgcgggtcaccctcaacccattcaatacgtcatcgacgccgggggtgatttgctagtgcacacggacgaaccaatcaccatcgcccttgaagatcctgccgatccggccaacgccgtaggtacggtcgaaatcagccacggcgcattctgcgcgagctcccccagccgccgccactggtctgacgccgcaggtcaccaacttcaccatctgctcaacgccatcgacggactaccggttgacgatgtagccgccacatgggtggccgtcacgccgccatcgagcgccataaccacgaagacatcgacgcatggcagcaatgcctcgacaacggcaaaccgcgataccgacgattcgtcgaacaccgttgcggcacacgtccctgtcacactggccgacggcctcgccaccgccctgttcaccaccccggccacccagctgcgcgctcacttccccttcgaatgcgccattctcaacgccaaccgcaccgccgcccaatcccccaattttcccggcggctttttcacacactaatgtacgaaatcatcagtatcacatccctcgggtggaccgatgggttgctcccctcagtcagctacgctgacagctcccctcggagaggggagccgagtatagctaatccgctaatccgctaacgcaggaaacaatccgtcagtcagcgagtgcgaactggctgttgtagaggtcggcgtaaaaaccgcccgccgccagcagctcgtcgtgcgtgccgcgctcgatcacgtcgccgtggttcatgacgagaatcatgtcggcgtcgcgaatcgtggagaggcggtgcgcgatcacaaagctcgtacgccccacggtcagcgcgtccatggccttctggatcagctcttcggtgcgggtatcgaccgaggaggtggcctcgtcgagaatcagaatcggcgcgtcctgcaccatcgcacgggcgatggtcagcagctgcttctggccctgggagagcgacgacttgtcgtcgagcacggtgtcatagccgtccggcagcgagcggatgaagtggtcgaggcccacggccttgcacgcatcctcgatctgcttgttggtcacgccgggcttggagtaggcgatgttctcacgcacagtgccgcggaacacccacgtatcctgcagcaccatggagaactggtcgtgcacgttccagcgcggcacggacttggtgtccacgccgtcaatcgcaatcgagccgccggaaatctcatagaagcgcatgagcaggttgaccatggtggtcttgccggcaccggtcgggccgacgatggcgaccttctgcccggccttgacggaggcggagaagtcgtggatgatcggcttgcccggttcgtaaccgaactgtacgtggctgaattccacgtcgcccttcacttcgtgaccgttggtcccaagcaaagcggacttgccggattcgtcctccatctccggctcctcaaggaaaccgaacacgcgttcggcggccgccgcgcaacgctgcaggttctggaaggcctgggcgaactgcgccaacggctgggtgaacaggcggacatacatcatgaacgccacgatcacgccgaactcgatctgcccgtcgagcgcgagcgccgcgcccaccacgcacaccaccacgtagccgaagttgcccacgaaattcatgagcggcatcatcaggccggagaggaactgcgacttccagccggactcgtagaggtccgagttgtacttctcgaagcgacgaatcgaatcggcctcgccgttgtatgccttgacgatgaggtgaccggcgtacatctcctccacgtggccgttgacgtcgcccagcgccatctgctgccgggcgaagtacttctgggaggacttcatgatggccatcatgatgatcaggccgatgaggctggcaccgatggcgcacagggtcatgatcacgttgttgtagaacatcatcaccagcgcgcccacgaacagcgtcaccgaggtaatcagcgagccgagcgactggcccagcgtctggccgatggcgtccacatcgttggtgatgcgcgacagcacgtcgccgtagctaaccttgtcgaagtatttgagcggcagtttgttgattttgaccgagatggactcgcgcagtcgctgggcggtgcgctgggtgacgttggccatcatccagctttgcacgtagccgagcacggcgtagcccacgtacagggccaccaaagtccaggcgatgtggcccaccgtgccgaaatctaccgagttcatcaccggtctgccgttgacgatggcgggcagacctttgacgatctcgttggtcatgtccttgagcttgtccgggccgacgatctggcagacggtgccggccgcgcccaggatgagcgcgatgatgatgacgggaagatagttgcggcagtagttcacgagtttgcccatgactttgccgaaatcatggggcttttcgacggcacgcctgccgcccattggtcctcttggcatttgttttactccttaaaagtccgtattgacctccctctgatgagggaggtggcgcgaagcgccggagggagagaagccgtacgcgactacccctcagtcagctgtgctgttttattcgctcgcttatcagctcgtcttcgcctgggaacagcccactgggctgttccctttacggctcagcccctgacatggggagctaccgctgccgcccccctacgccgtaagctccgactggctgagctgggattcggcgatctggcggtatacgtcgcagttgtcgagcagttccttgtgcgtgccctgacccacgaccttgccgtcgtcgagcacgacgatgcggtcggcgttcatgatggtgccgatgcgctgggccacgatgagcttggtggaatccttggcctcgcgggcgagcgcgtcgcgcacttcgcggtcggtcttgaagtcgagcgcggagaacgagtcgtcgaaaatcaggatttccgggtgacggtacaccgcgcgcgcaatcgacaggcgctgcttctggccgccggacacgttcgatccgccttgggcgatcgcggcggaatacccgccgtccatgcgcgccacgaactcgctggcctgcgccacgtcggcggcggccttgacgcgattcagctgctcggccggtatatcggcaccttccgcggcctcgccagcggcgatcaacgcggcctcgcgcttgcgcccggccggggtggaggtatcggccatctcgacctccgccgggtcgcccggctgatcgccgtagctcacgttggaggccacggtgcccttgaacagcacggactgctgcggcacgtagccgatcttgtcgcgcagggccttcaggtcgtagtcgcgcacgtccacgccgtcgaccaacacctggccttggctggtgtcatagaagcgcggcacgagattgataagggacgacttgccggagccggtggagccgatgaacgccaccgtctggccctgctcggcggtgaagttgatgccttccagcatcgcctcgcgcgaatccgggtaggtgaagctgacgttgcggaattccacggtgcccctctggccggttttggccacgtcggcggcggttttggtgccgttctcgacgattggctcagtgtcgagcacctccatgatgcgctgcgcggacacgtcggcgcgcggccagagcacgaacaccatgctcatgagcaggaagctcatgatgacctgcacggagtagttggagaacacgaccatgttggagaacacggtgagcttgtccttgagcccggcggcgtcgatgaggtaagcgccgatccagtagacggcgagcatcaggccgttcaggacggtgttcatcaacggcatcatgaacgccatgacgcggttggtgaacagctgggtctcggtgaggtccttgttggccttggtgaatttggcttcctggtagtcctcggcattgtaggcgcgcaccacgcgcaggccggtgaggttctcgcgggccacgaggttgatgttgtcggtcagggtctgcatgaccttgaacttcggcatgaccatggccatcatgacggtgatggacaccagcaggaccgccacggcgatgccggtggcgagcgtccattcgaagccttcgccggcgatcttgcacacggcccatacggccatgatcggcgacttgacgatgagctgcaggcccatggtgatgaacatctgcacctgcgtgacgtcgttggtggaacgggtgatgaggctggcggtggagaacttgctcatctcggccgggccgaaggactcgaccttgcggaattcgagcgagcgcagacgctgggtgaacgaggcggccacgcgcgcagcgatgtagccggtgatgatggcacacgccacggatccgagcgagatgagcagcatcttgccgcccgcgatccagatgtccttcatgtcgctgcccggcgtctcgaccagcgtggtgatgtctgacatatagtcgggcagtttcaggtcgaagtagacctgcccgacgatggtcaccagggcgatgagcatctgaccgatctccgctttggagaggtatttcatgatgcgaaacattggtttccccttgtgttggttgggttggttattggttattggcgattggttcttaagttggctgggttatcggtgattatcggttcacgatgtcttaatagtttccattgtttgattacttacactgtgagatattatacgcacttctgtatgttcgctgtgagcgtcctcaatcacctttacctccctctgacgagggaggcgtcaccgcgcagcagtgacggagggagagacccgccagcgggaggaagctagtctcgctcagcctccgcgcgcttagctgccatgtgttcagccacgcgcttgtcccgctccacgaatgcctcacgcacttgttcagccgtcggccgaggccgccccggatggcaaatcgacatatatgtggtgaactcagacaccaggtcaacgaattcgcgcgtgcgccgctcccccatttgcgagaaaatccagcaaattgcggaacgcatttcctctatcatccgatgagactgctcgcgcccggaatcagtgagattcacgcgaataatgcgccgatccttggaatcaatgtcacgcgtgacccagccttttttctccagagacgacagcacagtggagatgcggccggaactggcctgcagcgccgatgccaattgcgacggcgtttgcgtccccttcatggacagctcccggagcacgaactgctcaccatgggctccacgagtgaattccctctgcatcgtcgaacgattgccccacacgctggcatacagttcactaactgcttcctgctcaaatcccataagagcaccatccattcccattcgccacacggcagagcgccgcaaacacccccaagaatatctcacaccgtaaacaattcattactagaaactatttttggaacgcataatgcacacactccacgctctttgatattctgaaagccgcatagatattcacttcggggcgtcgtctaagaatatttgctgggccaacggtagcgacgttggcattgtgctccatgaggtatctggtcgaaaaggcggacgaagacagaccagttgggcggagcgcgcccatacctcaaaaccattgcaattattggctttgaccattttcgtggagtcacgaaaatggtcatgaaaaacataaggacacacccatgaaccgcgacgaaatcacacgcaaaaccagcgaactcagcactatcgcacacaccaccgaggactccaaagttgagtattggtatgcacgcgagctaatgacctatatggggtacgacagatgggaaaacttcagcaaagctattacacgagccaagcaagcttgcgacaattccggcgtatccgttgaatcccatttccgtgacactacgcgagacgtgactctcggcagcggtgccacccgctccatcgcggacgtcaagctcacccgatacgcctgctatctcattgctcaaaacggtgatccaaagaaagaagaagtggcacttctccagagctattttgccgttcagactcgcaaaacggaaatcattgagcaacgcatgggagaaatcagccggctcgccggccgagaggcccttgccactgcagagaagaaactctatccgtatacccaaatcacacacaacaaaaccacacaagagcacatgtacacgcccaaccacgccgcagaacgccggcaaggatgtgatacaggccacagaaagcgttgtaccgcctaggcaatgcaacaattgtccgctatgctctgaaggcagatggcggcacggatgccatcccaaagagggggtatgaccatgattcggggtatgaacctatgcagcatcgccggctgcacgcacgaagcagaagaagcgggcatgtgcaacatgcatttcacatcggcgctggttcacggagcgctgcactacactgcggacggacgtccgtcgcactgctgagcgcaacaacaaagcaaaacaaccagtaacgctcaacggcttccacatgttcatgctctaattgcatgtacttgcagacacaatggccggtctgagccagctgccctcgcatggagcagctggctcagaccggccattattgttgctttgtactgtttgcactgtattgcgcctgcattgcgcaagctcgggcgcactcgggtgcactcgctgagtggcgtgaatcgcagattgctcaatagcaacgcaatccacgccactcagcagttgccatggttatgcgcggcgtttgcggatgacgagcaaggcaccagccgcagctgtcagcaccacaaccacgaccgcaatggcagccacggcaacacccgtattcgaaaggggcgcagcgccattagcagccggcttattcgtggcagtgttaccgggcttagcagtgttgccaggattgttggtatcgccgggcttctgctctccagggccgggagtgacctccgtggccgtgaccgtgacttcgaacgtcgcgttcacgccacgataagagacggtgatggtcttcgtgcctgcggtggcagaatcaaagccagtgaacttcagatcaccatcagttggatcaatcagcttgcgcagcgtttcggtatcgccgactttgtaaatggcggataccttcacatcggcagcgttgaacttatcgcctacctgataggaatccttggtcacttccacagcaagctcggccaactgaggcagttcgccgaatgtcactgtgtaggtttccgccgtgccatcctcagcagttacagtcaccgtggccacgccgctgttctcggtcgaagcctgctccacctgcaccgtagccttcgcgtcagcagcagtcgcctccaccgtcgggtaagaagcagcgtctccggccagcgcaccggcatattcggtgatatccgcggagaatccgtcaaccgtcttgccatccacagtcagatcagcaagattggcgttactagacggctgcggctttggcgttgcttcaccttcggcgatgcgtacttcagcgatcttggcatagtcattgccatcggcgtaggtgaagttgaggcgaatgcccttggtggcgggcagagcgctcacatcggcttccgtcacggctccagcagcaccattcacagtgactgccggcagcgtggcatcagtccacgtggcgttgtcttcagctaggtacgatacagtgaagctcttcggagcggcctcgcccttggccttatccaccgcaacgctgagcttgcccagctgatatgccttatcgaaggtgtagctgagccacggcgaggtgtcgccggtgccccagttcgaccagttggtgctcagattgttgtcgcaagtcaggtcggccgtagaagcggaggcccagctgctggccggctcatacttcgaggctgcggcggacgagcagaacaaccgggcaaggttgctttccacagtcacggtgagcgtggcagttactgaagaatcactgacaaggcgtaccgtcacggtttgctcgcccaatttggtggtgtcgaagccttccaacgtgtattcatctggctccagtacacgcgtcttgccattggtgagcgtagcggtaaccgtcacgtccttatgcgcgagcgtctgcctcttggcgatagtggcttcagggcccttggccgcgatggactccacagcagcagtctgcgaaccgaacgcagtgccgttgaaggccacggtgaatgcgccggcattgctgttcgacgtggcgaaagcacctgcatcgagcccggttacgtccgcaccggtcagcgttaccgtagcgacatcctgccattcatcgttcgcggaagcacgccagtagcctttcagagtatcggttgaggtgcgctccagcttgagctgcacttggtcgccgaagccggtaccaacatgcgatgtttccttatcgatgtagccatcggcattggaatcgtactgcatgtaaacgccgcttgggctggcaagtaacgtggcatatcccttgccgccgttagcgccagtaagaccgttacggaccgccagaccggcgcgcggatcgccattaccgcccaagtcgagcggcttgaccgtggtttccagcgtttcgttcacgtccagagcatcaggctggtacaccgcactgccctcgttgcgatccgtccagacgccacgattggcgttgtccgtaatcgtgaagtcataagcaccgccggacgcagaaacctggcacgcgctgccgcccttccaatgagcttccttccaacttccggaaatcgggttggagcaggaaacatcgatggttctacggaatgtacggcccggattgaagttactgctctcggcaagagtgcccgtaatggtgtaggttcccggcacattgaatgcgtaggtgttaccagcagccttggtcgacttgctgactgccgtaccgccttccacattccatgtcaccttggtagcaatggtatcgtcgccttccttgacgttgacggtgtccggcagagtaacggttccgcccgtgttcacggtcttcgggagatcatcgccggtttccacagtccagttgaccagcttgcccttggcgctaccatggttgccccaatagctcagatcccaaccgtcgggctcgccttcttgagcaggattgtgcatttcgatggtgccgttctcaccgatggtcagcggcagccaaacataggtggaatcggctttaccggaatcccaacggtcaccaaggtagatgaagtgacctttctcctggtctactgcgagcacactagccgactgcgaaccgaatgtggtgccgcgggtatcgcccacggacaacagaccatccgcgccttccggcatgttgttgtaccacgtgttctcgttgacatcgtccttttccacgccacgggtccagcttcccagcatggagtcggcggtgtagtaggtctgcttgttcggggcccagccggttgcaccagatgcgatgatgttgtaacgcccgtcatattggaatacggcaggagcttccagcgaaccattttgtttgacgatttggaaatcttcgccacgcaccggggcatccgtagtagcgtctgcaagaatgtatgggtactgcccgtcagcagagtactgcttttgtccctcagactggtccacattcgtggtcttgactacattggtgtaatcatcgttgagcttggcgatgtacagcgtggcattggcttcggaagaatacagtacataggcactgtcgtccttcgggtccacgaacacagtcatatcgcggctgtcaccgttctcaccccagctggggttacctgcggcttctttccaattgttctggttaggcaaacgataggcacccaccatagtgaacgggcccgccggattgtcggaaacagccacgcccgcaagtgcacgtgcatagttggaaccgcccggcgtggtgcttccatcggaatgccaccacagcacgtattgcttgttcttcttgttgtagatgatcttcggacgctcgaaaatgccctgtacggaatcaaccgcgccatcaccatcctgatcggggttggtgttgaggtacgggaagattgcgtcggccttggcagcgtccacactgccgtcggacttggtcaggttgtaggccttgtcgaagtaggcgtaatcggcattgctcttatccgtcaactgagatttgctggtcaccgcacgcagcgccacaccaagatcggtccagttgtatagatctgtcgacatataagcatgaataccggggctgttgtcgtaaccgttagaacggtcttcgccataccagtagtaggcgtcgccaaccttgaccacttggccaccgtgcgcttggatgtgtgtgccgccattatcattggcgttcttggcataccaatatggctggaagtaatcgctagcgttcttgcccggatcggctgtgggctggaacttggtgtatgtcggcacttggccgatggtaggcaggtaatccacacctgccgcactggcacttgcagcggccagcccgcatgacaatagcgttgccgcggcggtaattgccgcgataagagcgcccttgcccttattgtttatcttcattgatttggttccttgattgatgataacggttttttgaacaaacagttatatcgctatccgcgaagccagaaaaggttcgacaaatcaatataccgatactgaaaactcagtattcaacttgtcggaccaattatggtcaaagagcggaggaaccggccggcaatagtcaatattgccggcttgttccttcacccattactgcgcgagggtgctatgcacgcttgcgcagcatgaacagtgcacccgcggcagcggccagcagagcgacagcgccagcgatggcggcaacactggaaccggtgttggccaccgtgttcttgttgccgttgccggtggcaccgggcttgttggtgttgccgggcttctgttcttcagggccaggggcgactgcgttggccttgaccgtgacgttgaaggtcgcggtcacaccacggtaggagacggtaatcgccttcttgcctgcggtggtggagtcgaacgagccaatcgcaagctgcgggtcgtcaagagcgaccggcacttccttggtcttgtcgccactctggtagacggcagtcaccttcagaccggcggtatcgagcttgtcgccgatggcgtactcggtcttcgtgggtccgatcaccttgagcgaagccaaagtgaaggcgttgaaggtcaccgtgtaggtcttcgtctcagactcgtcggctgaggtcaccgtaatggcggccttgccgccaagcttgccgttctcaaccgcgtcgccagtcaccttgacggcggcggcattgtcggtggcgaaggcctgcagcaccgggtttgcctcggcgtcgaccggcagatcaaccgtgtagtcggtcttggccgggtcgaagccttcaacggtttcgccgtcaagacgcaggtcgcccagcgtggcatcggatgctggctgcggggtgagtaccgtgctgtcttgtgcgaacacctggatctcagccacgttgatgtacaccttggtgtcctgcaatgtgttagtcaggcggatggccttggcctttaccggggtgccgagcacgaagtcaacggtcggggtgtcggcggcggtgatgccgtcggagccagagccggcatcgccggcctgtatcttccagccatccttggtaccgactccatgccatccgccagcctcatcctggtattccagcgtctggctcttcggccaagacgcacgaccatcgtagtagaagaaggtcttcacttcggtgatggtctgagcttcgtcgaaggtgaacgtggcgaccgggtccaccgtcgaggcggtggaagcccaagtggaccaaccctttgacgtagtgtcaccatcgatggccttggaagcggaggcaccctcctggaagttcaccgagaagttcgtgccagaggccgcggcgatgttcttcgcagcaccctgaaccggcgtcacgaatgcctgaatttcggtggcattcatgtagtcgttgttcacggtgttcacaatgcgcaccttcgtggcattcactgtgcccttatcggccttgaacgtcaccgtctggcctgcggcaggcttaacatcgctaccgaattgcatccacgtctcgccatcagtggtgtactcggccttggcggaagccggagccttgtcaccatacgtaatggtcacgctgctaagctcacactcagagccgaagtcaatcgtggcggtcgggctggcggaatagtcaccagcagagttccacgtcacccaggcttcagctgacgtgtcaccatcggtgagcttcttccactgatcgcccttgctgtattccgtctgctggttggtcacggtcaggctggaagcagtgtcggccacattctcaggcgtggcggcggtgacatagatcgcgcccttcagcgcaatcgtggtcgcgtcgtccagctggtaagtaccggtcacggcaatgttgtcgccagccttggcatcggcgagcttggtatcaagcccatcgaagttccacgtaaccttagccgcatcgccctcgaatgcaggcgatgccttgacgtgcagatacaccggcgcagcctcaagcgcggccttcgcctcgctcgcactggtgccggccagcactgtagccgataccggatcggaaacggtgagcgcgccaacgtagaccgtagcggcgacattgaactcgttgccgtacacatcggtggcggtagcggtggcttcgtaggtgccttccttggccacatcgaccttggaagtatcccagttggcaaccgtggccttgccttcgccccaggtgtagtagagcgtgacttcggtcggcagcgcggccttctcgttaacggcggtctgcacgttcacggtcttctggctggtcggcgttacattgcgtagagtccatgtctggttggcggacggcgaagtgccgctcggtgactgccacaagccaaccttcgtgccgactgtggtaccagagttatccacatcgaggttcgtcttagtcgcggcattgagcagctggtaggtcgaaccatcggaagtgttgagaatccacttggcagccgggtcggacttagcggcctcaaccgtttcgttggaaagcgcgttcgtgccatccttggacaccagcaccttgccttcggcgttagtaatcacataagccttgagatcagggcgctcggagtcggcgggctgctcgatctgggtaaaggtccaagtctgcttcttggcgttctcggcatcggaagcgacgttggccagggacagcgcggaatcaccagaagtggtatcagccacggccttgccggactgcttaccaacgagctggtaagtgtcgccggtctcgacggcagcatccttagcgtagccggtcacgccagtgagctggatggaggcgatagaacgggcgggcacagtgaccgtagcggtcttggcagccttgtcaatcatcacagagccttcagcttgcttgacgttgctggtcttggcgaagacttccggagtggcggaatcgacacccgcgttcttgtcttcggcagaggtttcggtggtcaggtagagctcaccgtaagcgttgtcggcaatctcgccgtacttcgacaggtcgatgacgaaggtctggtcagaggtgccggagttgcggtggatgacggtctgtgtcttgccatcgtcggaggtggcagtcatgttgttgtcttcatcgttgttggcgatgaccttgtcgcccgcgtggatgaagtgggtgatggccttgacgccgttgtacttggcgtttgcaataaccgtgcacggttcaagtccatcggtggtaccgccgttgttgttcacgcggcgctcggagtagagcttgccgtccatgccagccacggtgcagtcgaagtcgatgagcacggtgccccagttggtgttctcaccggccggattcacattcgagcccatctgcatgttgtagaggtcctcgaccacctgccagaaggtgaagtccttggactgcaggcgggtgacattggagctgatcttgctcatcatgcccagcgcgttgtcgaaaccgtacgggttgtaggagccagactgccaggagccgtccacctcgctcatcgacagcttcttgccgtctgcctgagcgatatcgcgcgactgcatctggttgctgtcggagtaggcgtgaacgttgtactggccgataaggtccttgatcgcctgcgggtactggttgtacgacttgacgaagtcggcggagttcgtggcatcggtggctgcgatgatggtgtcatcattgtccttgagcgcctcagcgagtgcggtaatcgtctgctgctgctgggcgttgctgacatgcataccctcctgcggcttcttcagcgcgttggagtatggggtgacggacttatctttgtcggagtagtacttatcccagtagttgttaatgagcttggtgttgtcatcgctctcatcggtgtacttcgaagccatgtcgcccggagtgccccagtaactggtctcggactcattgaacggctcgaccgtgtcaacgtttgcgccaaggctttcgaggtgctcgacgttcttggccatgtactgagcgaatttctcagggtttgcaagattattgctaccggagttgcgtccaccagtggcgtaaccgctgttggtcaggaaccacggagcggagttggcgaaggcctctacgtcggtgatgtcagggttatcgccggtggcaccgcgctcaatccaccagtcttgggcggcggacttggagaagtcatactggttgtcgtcagtcgggtcgaatgccgcagccagcttgtctttgtcggcctgcttggtggttacgccattgccatacgtgccggagccggtggcgtcatctttccacgtgccaggcacggcagcgccttggcgcatgaatgggtagccgtaggcaacatcggaggcattgccgccgcccacgttgtagcgggccatgttcaggtccagtccttcatcaccgaagatggactggtagaactgttcgcgcagctgtttgccgtattccacagccttagccttggaagcgtcatcgccgagattggtggtgatggccgattcctcgccgaggctgccggtggcgttggcgaaccaagccagcgaggtgccccagccatcgaaactgttggcataccacggattcggggtcacggtaatggcatcgttatcagccgcatacgcagtgccggcaaccgcaaacgcccctcctcccactagtgttgccgccgcaaccattgcagcaagcgatttgctcagtaccttcattggtctccttagtgttcctgctatccgccttataccggaaaaatcggcctttgcttcactgcgccggcctctttgcctgatacatgacctacgtcgactccttctttcggcgcagccaaaatgtttacgcaaacattttgatatgagcgattttatcacaaaaccgtcacccagcaaacaacttcagagaccacaaacgacgcacaaagtcatgagccattcgaattgcgctggcccaatcgctacgaatcatatttgccgtagcccttaagtgaatcccactgcatcgagatatcgcgcccgctatcccttccgataacgccgaccacgcgtgttgccttcagcaatcagctttccttgcgcaactaaaccgtttaggaatttgcggactgttctgttatcgagctctgttatcttggcgagttcaggtacagtcacatagtcaacctctgtcaagcgtcgattcatcgccgacagcatcgctgcccgcgaatcaatttcacccgatgcggttgcatctgctttcttaccatccacacgttccccgccaatgagcctcgcaccctcttcggcatctttctcaactacagatctcacgctagcaaaaccagaaccatccacggtcttcagcgcaggaacaataggaatcgtcgcctcgaatatgtcaccatcgcggaactcaggctctcgctcagtatattgccgggacgctcttatcagattccgcagtccgctacccagctgctcggctatgccggtctgcacaaacacattagcgataatcggattctttggcattggcgtgaactcgcccagcttcattcgaccttcaaagaatgagcgcgaagcattaaccgtccggatggattcattatcaatggtgacacgcgccaccaccggactggaatactcccgatgcatgaggctgtttgccaccaattcacgggcgatcatcgtacgcgggctcactcgcttatcgccctttaacacaaagcggtcaggcagattccgctcagtaaattcacggagttgctcgtacgaatcgaacaagttggtccgcaccataagtcggtcatcgtatcggtcaatattgtctcgccgaaccacggcatcagtaatatacgctgggcaaaccgaggaaatgacttcatccttgcccaagagcagcactgcagcaagattaaagccctcttcgccggtcgtgtaatcacgatcgtatagcttggcgctgcggaacagttcttcgtcagacatagttccccaagggtgcccagctcgctgagcgaccgccagctgccgcattcgcgcaatcagctcaggacgcaaatcaaacggagtcacgtaacggaaaattcgccgttcggaatagtagttctgcttgcgaatatacatttgactaatctggatatcgctttcgatgtgtgtatccacatcagcaatgcgatcaaacactgcgcccttgaaccgcacaaccgaagaactcggagctacccaaatacgaacaataatccgttcgtcgtactcgatatgttccgtttccaccattggagccggttcgaacatcttacgattagacactacgttgacaacgttgcgctctatctcactaacgcgcttagaatcgacgccgagcacttgaccgtcatcgtcaacgccaagataaatgctgccaccagaacgattggcgaatgagcatacagtctcaaaagtatccgtatgaggcaattcgctgcagcgcttgaactcgaccatagatgattcaccggcctgcagcacttgcataagttcatcctgcgtcatcgcattccgcccttcatagcgataattcatacattaggacatggcacttatcgtattttagcatctaattagtacattaggacattgttttatgtcctaatgcactaattaggcggctaattgtactaataattgcacactgatgtactaatccgatgatcgaatgcactaattgtccgcgcaaatgcactaatcggatgaccgaatgtatcaatgagacctattggcagccgattggctgacgatcagcccagtcattggctatcggccgctagccagtcagccgccaacagccaacagccacccaactaatagccgccagccaatcagcccgtccaatcactccttgtgttccagtgcggccttcaaatcgcggctacggtagcgttcgcgcagcatagagaatccaccgaagcccacaagccacaccag

SEQ ID NO: 1042 - DNA, 5171 bp, Unknown
  R13_10m  MAG No. k141_701
cggatggcctcgtcggtggcggtggcggagaaacgcaggtaggcgggagcgccgtagaattcgccggggctggggatgatgccgatcttggcgagctcggccatatcggcccagcagtcgccggacttggccttgacccatacgtacagcgcgccggagggcatttgtgccgaataaccatatgccttcagtgcgtcaaccagcgcggataggcggcgacggtaacgcccccattgctcgtgcacagcggctgtgtccttcaggcctgcggccatggcggcctgcaccgggccggggataatctggccgatctgcttgcggtattcggccatttccttgaccagccggtaatcgccggcaatcagagccgtacggtagccggccatgttggactgcttggacagcgagtagagcaccaggatgccagctgccgaaccttcacacacatgtgaattcagggcacatggcgtggcggagagactgaatgcggtatcggaggcgggctcgttggattcggccaccggtgcggcaggcacagacgcagcagatgcagacgcggcaggcgcagaggacgcggctgtattgcggcgcaccgaacgccagtccatcaacgcatagcattcgtcggagagcaccacggcaccgatgcgacgggcagcagccacgatgtcggtcagccagtcagcggagatgacctcgccggagggattacacggcgagttgatccagatggccttgacgttcggaatattcacccaggaatcgacgtcggtcacatcatcgactttgaccacggtggcgccggcaagttgggtaccgatttcgtaagtcgggtaggagacagccggttggacgaccacatcgccttcgccaaggtgcagcaggctggccatcagcgccacggcctccttggaacccacggtgggtacggcggcagcgttgatggacttcagatccacaccgcgcagttcgcggaaccatgtatcgatagcggccttaaggtcggcgctgccggcggtgaccgggtatccatgggcgttgggggcgtctgcgccggcaaccagcgcctgctggacactgctcggcaccgggtccacgggcgagcctacggacaggtcgatcatgccacccggcacggttttggcggtggctttgaagccggcgatacgagaccagtcgtatggcgacgaatatgcgtggaagcccatgagaacccctttcttggacggtatgttcctaagatacgacgaaccctcggccgtgatagaccgagggttcaatccgaactatgcgctgtgtgcagcgcttatccgcaaatcagcttactggttctgcggcggcagcgcggcgacctgttccgggtctttgccgattgggccattggcggaagcgccgcccaaatcgccgacttcagcgaagaagttgacagcggcatccttgtaccaagcccactcgtccggcagatcatcctcatagaagatggcctcggtggggcacaccggttcgcatgcaccgcaatcgacgcactcgttggggttgatgtacagcgagcgggaaccctcgtaaatgcagtcgacggggcactcgtccacgcaagccttgtccttgacatccacgcaaggctgagcgatcacatatggcatggaatcctccttaacagatactgatacaagggtacgcgcccgttgggacgctcctcgctctcagccgttaacggccttatcggtttcggcggacagcgtttcggtcaggtcgcccttgccgaggcgcgcatgccagtagccgtagccgaagtagatggcgacgccgaccacgagccacaccacgaaacgaatccaggtgagcacggacaggttgagcatcaaccagaagttggccacggcgatgaggatcggaatccacgggtcgccgggcatcttgaaggcgcgcggcaggtcggggcgcttcttgcgcataatcgggatggagatggccaccagcgtgaaggcggacagggtgccgatgttgaccatgtcggagagcacgccgatgtcgaagaaggcggccacgagcgccaccaccgcgccgacgacgatctgcagagcggccggggtgccatgcttgccggtcttggacaggccgcgcggcagcagaccatcgcggctcatggcgaagacgatacgggtcaggccgagcaacagcaccatgaccacggtggccaggcccagcacgatgccgaagctgatgatcttggcggcccagtcggcacccaccagttcgaaggcggtggccagcgaggggctgtcttgcttggcgagatcggcataggagaccatgccggtggtcaccacggccacgagcatgtacatgacgatgatgagcagcatgcccacgccgatgccgagcggcacgttcttgtgcgggttcttggtctcctcggaggcggtggccaccacgtcgaagccgatgaacgcgaagaacacgagcgccgcgcccgaaaggatgccgggaacgccgtacacggatggggtcatgccggtggcgaactgccacagcggctgggtcatcacgccggtgacggcggaggaaccttccacggtggaggccggctggctcggtggaatgaacggggtgaagttggaggccttgacgtagaagaagccgacgatcaccacaaagaacacgatggcgatcttgagcacggtcatagcaccgtccacgcgggcgccgatcttggtgccgaatacgagcagcgtggtaaagaacgccacgatgatgatcggggcgatatcgatatggaaggagccgaacgccaggttggtgttggcgttccagcccatcaggcgcatgaaatcgttgaggtatacgccccaatatttggaaatcacggagccggccatcagcatttccagaatcagatcccagccgatgatccaggccatgatctcgccgaccgtggtgtaggtgaaggtgtaggcggagccggccaccggaatcatcgaagcgaattcggcgtagcacatcacggctgcgccgcacacgatgccggcgatcaggaagctgatgatcacggccgggccggcgtggaaggcggcggcctgcgcgcccaccgagaagatgccggcgcccacggctacggccacgcccatgattgacagatcccaccaagtcaggttgcgcttgagcttgcggccctcttcacccgtttcggcaatggtctgttcgacggatttcgtacggaacagttgcatagtgctcttctttttctctgttgtttgcgcaccgaatgcgcacaataccgacaatcgagtatagaagagcccgcgtgtcttgtctattaataagacttagagcccgcaatatatgggattaataccccactccatcgatcaatagcgcgattacagcacgccgacgcagaccggttcgggcaccaagtccactccgaacgcgctcttgaccgcctgctgaaccgcgcgcgccaaagctgcgatatcggctgcgctcgctcccccacgattggtcaaggccagcgtgtgctgcgtggatagactggccggcgcgtacgcatcgaccttatatcccttatggcagccggcatggtcgatgagccaggcggcggacgtcttggtgccgggagtgccgtcaggcagagtcgcgtcgaacttcggcgcatcttcgggcagggccgccgcttggccggcggtcagaatcggattcataaagaacgagccgcagctgtggcgattgtagtcgggagcaggcaggccgtcatcgccaacgggaacgccggcggcctcattgagggaggccagacgctccagatcggtcaggatattggcctcgcgcttggcggtggccatgtcgggcaaggcgtagcgagtgggatcctcaagcatgcccttggcggcacgtactgcgagcacggctttgcggatgtcggcggtggccatacggtcgcccacttcgacgccaagcgctttggcaagctgtccgtaacctaccgtgccttcggccgagtgggtcagggcaaaggtgacggagagcaccacgtaacgtggcgtcgggaagaatcggtcggccggctggccgggaccggcgtacatgctggccttcagtgcggagtatcgatagccgaatcgaagatcggcgggtgtgaggtcgcgcgttgttttggtgtctcgatcccagacttccaccgattcgaccgaagtggcgacttcctgtccgtaggcaccgatgttctgcaccacggaggcgccgactgtgccgggaatgccggacagtccctcgacgccctcgagcccgagctctacggtgaaggccacgaaatcatcccaattggcaccggcctcggcattgacatgcacggtgcgatcctcgccctctaccggtgcagcctcgtccggcacagtgatgaggcgtcgggcgtctcgaaccaccacgccgtcaaaaggcttatcggaaacaagcaggttggagccgccaccgataacgaccaagggcaggcctttggaatcggcatcctccacggcttcgatgagccccacgcgcgtggtcggctcgatgaaatgggcgatggggccgcccacgcccatggtggtgatgtctgcaaagcttgtcatgacttcctatcttagtggcgcaggtgcgatatcggggcaatcatcggctgaaacggcagaacgcccgcgaggggttcgttcagacgcgggatttctgccgtttctcacgcgatgcggatactgattccgcaccctaccactcggctctggagtcaatacgcaaaaacccggccgaatgggccgggttctgtaaagctgtgatgcttgcgatcaacgagtctcgcggtgcacggtctgcttgccgcagcgcgggcagaacttcttgagctcaagacggtcgggcgtattacgacggttcttagtcgtaatgtagttacgctccttgcactcggtgcaggccagcgtgatgcccggacggatgtcggcgctcttagccattatcattcacctctgtgttcttaggtatagtgcgcgcccaccggttagcgggcgcgatttgtagcgaggaagaggctcgaactcttgaccttacgattatgagtcgtacgctctagccagctgagctaccccgccagagagccccgagtgagaattggactcacgacctcttccttaccaaggaagtgc

SEQ ID NO: 1043 - DNA, 39421 bp, Unknown
  R13_10m  MAG No. k141_774
cacagaccaagagtctgagcttaagcatcatcccccgtgcggttcgcgccgcatgggggatttttgtattggtgtttaaaaacgctggaaataggcgcgacacgccgagagttgcatccgcttcaaatctgagtatatttatcacctgttgcaaggaacacttcaacatctaaccaagcccctgtagctcagttggttagagcagctgactcttaatcagcgtgtccagggttcgaatccctgcgggggcacagacaaccggaatcgaaagattccggttttttgttttttccagcatcagtccgtagctggtgcggaaaggccgtcttcgcgcgtgacggccggacgtgtaaggagcggcgtcatgtctcagatattcgcgttcaccgtatccgaccccgaaggcatgcacgcccgcccagctggccggttggttgccaaagcgcgggaatatgagtcgaacatcaccgttgcctacggcggcaaatccgtggatgccaagcgtatcttcggtgttatgggacttgatgttcaacaaggtgacgaggttacggttcgggtgcagggcaacgatgaagctgtcgctgccgcagagttcgagcgattcctcaaggagcacctgtaatgagaacgatacagggcgtcggcgtatccgctggcattgctatcggcacggtccgcgtgctcgccgccgccgatcatgctgtagaacgccgcgtaatcgacgatccgcaggctgagatggatcgattccgcgcggcccgtgacatggccgtcgctcagctcaagcaactgcgtgacaacgtcgccgctgagttcggcgaaaacaaggccgagctgttcgacgcccatcggcttatgctccaggacccggactatgcgggatgcgtcgaaggtttgattgcgcaagacaaggtgaacgccgaatttgcggtgaagagcgtcgccgaacagttcgccgccatgttcgctgcgatggatagctcgaccatgcaggctcgagccgctgatgtcgaggatgtttctcgccgcgtgatgaacgtgctgcaaggcaaacgcgatagcacggcgcaggatggcagtatacaaggcgatgctgtgcagaacggtactgtgcagaacgggattgcgcagaacggcgaaagccacatcatcttcgcccaagatcttgctcccagcgagaccgcgcagctcgaccgcgctaaggttttgggcctcgtgaccgccaagggctcagcgaactcgcacaccgcgattctggcgcgcacgatgggcctgcccgccatcaccggtatcggcgacgccttcgacccgactgatgacggtcacgttgccgtaatcgacggcgccagcggtgcggtgttcgtcgacccggacgaggccacgctgaccgagtgccagcgcaggaaggccgaagctgaggaacacctgagcctactaccgaagctcaaaggcaagcccaccgaaaccaagtccggtcagcgggtccacctgtacgccaacatcagccgtccctctgacgtagccgccgtgctggccaacgatgctgagggcatcggcttgttccgcagtgagttcctgtatctggaacgcgaggactggccgaccgaggaatttcagttcgatgcatacagacaagtcgcacaggagatgggcgaccgtccggtcatcatccgcacactcgacatcggcgcggacaaacaggtcgactacttcaatctggaccacgaggataaccccgcgcttggttaccgggcaatccgcatctgcctgacccgcccggagattttcaaagtccagttacgcgcattgttgcgcgcctcagcatacggcaatatcgccattatgctgcccatgatcacctcggtgcaggaggtgcgcgacgccaagcggattcttgaagaagccaaaagcgagctgcgcggcgagcacaccgacttcaacgagagtatccagatcggcgtcatgatcgagacgcctgcgtcggtcatcatggccgacgagctggccgccgaagtcgatttcttctccatcggcaccaacgacctgacccagtacacgctggcctgtgaccgtcagaccccgagcctcgaacgctttgccgacccgcattcaccagctgtgctgcgcatgatccagatgactatcgaggctgcccatcgtcatggcatctggtgcggcatctgcggcgagcttggcgcagacctgagcctgaccgatacgttcctgtgcctgggaatcgacgaactgtccgtctcgcccaccagcgtcctacccctgcgcaacgtcattcgcaaccactgagagtcaaggtcgcttcggctgattccggtggctttctgggcattgcattcggctggacattcgacatcgcatcctgccggcatttcgtcgtggggcaaagtgtacaatcgccacgtttgctttcgcgcccagcgtaaatcgcgtcgccggctccgcgaacggatttccaatcacacagaatgccgtgaacagtcagccatgcctgttgcgcggcgaagagaaaagaagaagcagtggaatactctctctttaccaagctggccgccgagttcttcggcaccgccattctgatgatcttcggcaacggctccgtggccaacgtcgagctcaagaacaccaagggtcaccacgccggctggttgaacatcgccatgggctacggcttcggcgtcatgttcccggtgcttatgttcggtagcgtctccggcgcgcacatcaacccggccatgaccatcgcccaggccgtcaacggcctgttcccgtggagcgacgtgctgccgtacatcgtcgcccagctgctcggcgccctgctcggccagttcatcgtctacctgacctactacccgcactacaaggagaccgaggacgccgaagccattctcggcaccttctgcaccaccgacgcggacaaccagaaggtcaactacttcctcaacgagatgttcggcaccctggtgctcgtcttcggcgccctgtgctgcctgtccctggcttggggcaagcaggattacgccgccgcctccatcgtcgtcggcttcattgtgtggggcctcgtgacctccatgggtggcccgaccggccctggcctgaacccggctcgcgacctcatgccgcgtctgctgcacgccattctgccgatcccgcacaagggctcctcccgctggggcgaggcctggatcccggtcgtggccccgatcgtcggcgccatcatcggcgcttggctgttcgtgttcttcttcgccagctgattcgttgattgattcatatatgcaaatggcctccgctcgttttgggcggaggccattgtcgttgaatcaggtaaacgcagagactactgctccaggaacacctgcggggccttcatgaagttcgtggcacagtgttcgccgcagaagtaataggacttgccctcatactcgcgcgtgatcgcgtcggcgttcaccgccacggtcatgccgcacaccgggtcgatggcggtttcgccgtccgcgggggcggtgtggtgcatgtgcattcccatatccatagtgttctccttgttggttggattattggattggtcagatgcgtgattggtgtgattcagcgtggtgcgatcgtcgatgatgacggttggctcgtgaggcgcgttggatgtggcggagccggtgatgttggcggcgttggctgattcggccgatccggttgattcgacatccgccgtgctgctgcccgagccagcggtgccatcgacaacgcccgcgttgatgttcgacccatgcagcctgttcgcgttcagcaccaggcacactgagctcaacgccatcgccagacccgcgatcatcgggctcaacagccagccggtgaacgggtagagcacgccggcggccaccggaatgccgatgacgttgtaaccgaacgcccagcccagattctcccgaatgttgcgcatcgtggcgttggacaggttgatggtcttgatgacgccgcgcaaatcgccgctcatcaaggtcacgtccgccgactgcatcgccacgtccgtgccggtgccgatggcgatgccgagatccgcctgggccagtgcgggggcgtcgttgatgccgtcgcccaccatcgcaatcagagtgcgggattgcgcggccgtgcgggaggtgccgtccgcggacttggcggcggcctcgtcgcgttcgcgctgcagtttggcgatccagtaggccttgccgtccggcttgacctcgcagatcaccgtgtcgatgccgacttcgcgggcgatgcgcccggctacctcggccttgtcgcccgatagcatcaccgtgcggatgccgcgtgcgcgcaacgccgcgatggcctcgcgcgagccttccttgactgtgtcctgctcgtagctcggcttgtcccagtcggcggccgcgtccaccacgccgcgcgtgatggtgccggtcttgtcgaacaccacggtgccgatgcgacgcgcctgttccagcgccttggcgctggtgaccagcacgccgttggtggcgcccaagcccagtgagaccgtcaccgacagcggcgtggccagtcccagcgcgcacgggcaggcgatgatcagcacgctgaccgcggtgaccagcgcatgcgccagttgcggcaccgggcccagtgacacccagatggcgaacgtccagatggcgatgatcatcaccgccggcacgaaataccgggcgatcttatcggccagctgctgcaccggcgccttggtcgcctgggcgcgggccaccatcgccgcgatctgcgagagtaccgtgtccgcgccgacttgggtggcgcgcatcacgcagtcgcccttgagcagcacggtggccccggttaccggatcgccgacggttttggaaaccggcttggattcgccggtgatcatcgattcgtcgatatgcgcctcgccggccacgatgatgccgtctgtgggcacgcgctcgccgttcttgacgaccagcaggtcgccggtggcgatggcgtcgatgtcggtgtccgtgaaatacgccggattgcgccatccgatgccgtccacattgtctgtggaagtggcgttgagtttgtgcgcggtgcgcgggcgcagtttgatgagcgactgcaccgccttgccggtgccttcgcgggccttggtttccagcaggcggccgaccagcaccaaggtgatgaccacgccaaccgattcgaaatacggttcgcgcgaaccttccgggaacacccacggggcgatgcaggtcaccagcgaatacaggtaggcggccgaagtgcccagtgagaccagcgagttcatgtcgggggagcgatgcgccaacgcggggaagccgaccgtgtggatcggacgcccgcagtagaacatcaccggcgtgatcaggatggcctgcaaccacgggttcaccatccaatgcggcaccagcgtgggattggccatatgcagcatggtgacggcgaataccggcaacgtcagtaccgcgcccacaatcaccagcttcgtcagcgccttgatctcattggcgcgttcagccgcctctcgccgatcggcctccgccgcatccacggcggtaggtgccgtatacgaagcatcaggatgaggaaggggcgtgttctcatccgagccgtcctctccctcaaccttcaacatcccatgcaccatattcatgccgcacgcaaacggatactcgcccggcggcaacgccggcagttccacgtcggtggtggcgttgcccggcagcatggcgtcaagtcccagatcagcaaacaccacatgcgaggtgcattcgccggtctcctgccggtcgaaggctagtgtgatcggcgtacccgcacgcatgctcaccacggcgggggagtacccgcccttgacagtgattgttgcggattggcgttcgccggaagcgtccatggccccggccgttgccttctgcgttccgaagaagaatcgcaggaccagccatgtcaatgcggccgccactatcagcgccgtggcggtcgagaagatgctgaactccataactgttccttcccattcctaatgcactgaacaacagtgtataccctatacccctagagggtatatgatggggtgtgttcagctgacggataagtatcagggggttgcgatgcatggttatgacgaagacaaggccaaggtcatcgcacgattacgccgtatcgaagggcaggtgcgcgccatcacacagatggtggaggatgacaaatactgcatcgatattctgacacagatttcggcgtcgaactcggcgctgaaatccgtggcgttattgctgctggacgatcatctcaaccattgcgtgcggcaggcgtcggtccagggcggcgaggtggctgatgaaaaacttgcggaggcttccgcggccatcgcacgtctcgtcaaatcgtgacgagttctgccgcatgatgacgcgcgctggcaaatcatggaaggacatccggcgttcgggtgtgacacagcgcaataacggttgatgctcgactgcgatgagtccaaatgtccaatgtgggctgctgagcatccgtttaacggcttgaaaccgtcgaattcggtaaaaatttaccgtcattcaccatcgatgacatactaggtaccatgtttgagcaaataggaaccgtggttatcgtcatcgtcgtgctagtggttggtgcagggcttggcctcttcgccggcttcgtgctggggcgccataagggtcaggagatggctcgaggcgtcaaaagcgaggagctggaggagaccaagacctcgctggagaatgcgcgattcgagaatgctgagcttagcgcgcgcaatgctgccgcacaggctcagattgaaggcgtgaaccagcaattggctttcgccaagtcacaacttgcccaggcgcagcaggctgagcagattcgcattcagcaggaacgtgagcgtgcggctgcggaggcggaacggaagcgtcaggcggatgctcgggacgccgaggccaagcgtgctgaacaggaagcacgtttgaaagaacagagcaaggtgctcgaggcgcttgcgccagtggccaaaaatcttgataccttgcagaacaaggtcacgcagatcgaagagggccgcaagagggaaatgggcgcattgggagcccaactcaaggggctcaacgaccagcaggcccgtttggacaaggaaaccagttccctgtccgccgcattgcgcaacaacaaggtccgtggcgcgtggggcgaggcccagctcaagaacattgtcgagtccgccggattgctggaacatgtcgatttcgacattcaggtggtggtcacggatgccgatggacgtacgttgcgcccggatatgatcgtgcatctgccgggaggcaagaccattccgattgatgccaaagtgccttatgccgattaccagcgtgcctgcgagatcccggacaccgccagccccgaggatattgcccgccgcgatgatttgctgcgagcccatgccaaggcgttgcgcgagcatgtacgtgctctcggcgaaaaggcctattggaatgcctttgatgtggcacccgattttgtggtggccttcatccccaatgaggcgctgttgcaggccgcgctcgaagccgaccccacactgatggatgatgcgttctctcgcaaagtggcgctcacctcgccggtcacgctgtgggccgtgctgaaatccgtggcctatgcctggcagcagcagtcgctcaccgatgacgccaagcagctgttcgatttgtcccgagaactttacgaacggttctccacgttgggtgattatgccatcaaattgggcacccagatcaccaagacggtcagcgcctacaacaagttcgcgtccagcttggaacgccgtgtgttgcccaccgctcgcaagctgcaaaaaatcgaaccgaccaagatcatcgaggaagtaccgatcatcgaatcagacaaaggcaatgtgagcgaactgtccgcccctgaagtggtgccggccgatgagggtgatactcatctgactgcctcaggcgatagtctggagtcatgactgaatctggattccgccccactggtaccccggacctcgccgtcgcgaagagccataatgactttgccatgctggagccgcgtgaacagctagccaccttgctgagggagcatgtggtgggccgtccgttctccgaacttgccgcggtgacttttgaccaccgtgccgccaccgtcatgggccatgtactgattgacgctttggaagatgcgggctattcggttgatgacttcgatgctgttggtgccttgaccgcagcatctgtgcccatggtgtccgccatgatccaggccgccgcctctcgtggcgaggacctagacggattcgtgatggacttcgtctacccgtccatcaagggcccctccatcgaaggccgccgtgtggtgctgttggatgcttggctgtccgaaaagtcgtacgtgcagaccagctcgctggtcaccctgcgcaacggcaatgagctgagcctcgactttggcatagtggagcagctgggtgccaaggtcgtggccatcgcctcgctggtcggtggcggtgccaaagacatcaatgtggtcaacccctccaccggcgacgagcaaacgctccccttcatccaggtcttcgacgaatccgaactgcggtaaatccacctttgactttcctcgcataaagtcagccgggctgagccgcgaagttgactaagaggaaccggtgaatagcgttatcgaggagaaagattgcacgcacccaaccagatttctttggctgccaaagcttcaggtgaaccggaattccgtgaaatcggccttgggccgtggtctgagacccatcccggcgagcctcgtcctgacgatccgacttctccgaattatgacggtcgtttcgactcggtgctgttgaacgacggcgaccgccgcaacgtattggatcgttaccgctactggaccgtcgctgccattaaggccgatcttgacgctcgagggcgtcatgacttcgaagttgcggtggaaaactggacccacgatttcaacatcggttccatggtccgcaccgccaacgccttccaggccaagcgcgtacacattgtcggtccacataagtggaatcgcaagggcgcgttgatgaccgaactgtaccagcacgtcgaacaccacccctccatcgccgaactggtggaaagctggcatcatcgcatcgccggtgaaatcgcctatgaacgagccaaggccggtgtcgccgccatccatgcgcatgatgtggctgtggatggagacaacaagcaccttcatgagctgctggccgaaatcgatgcttgtgatgcgcgcatcaaggagcttcaagccgcccgcgtcatcgccctcgatatcattcccggcgcagtgccgatggaaacctataccttccccaagcggtgcctgctgctcttcggtgcggaaggccccggattgagcgagaaggccctcgaattggccgacgatgtggtctacatctctcaattcggttccgtgcgctccattaatgcaggcgctgcggcggccgtggccatgcacgcatggattgcccaacacgccgtatcaggcgtgtagccatgcatcgacaatcccgccgcatctgcccaatatgggccacattagaggcatgatctacgccaccaaatccatcgccgcggcattaattcgcatttgccgccggcatcgtcggcatcctgctcgccgcaggcatcagcagctccgcgcagtccacactggccgaagccgttaaaccggactactggattcccgaatggtggcagtccggcctgattctcatcgcctgggctgccgccgcatggatcggcggtctcatcatcaccggaaaagcggatatcagatatcaaataacgcgggttactgctttggcagttctgccggttcggccatggtcctggcagtttgtcatggctatggctttggcggttctgcagtgaccatggttctggtgactctgaccccatggatttgaccaccgtggttcactgcgcttaaccagctcccatcactgttccagcatgaggtatgccggctgcccgcagcttattgagtaaaggatgttgttgcatcacctcctcataggtgaatcggacaatggtgtcgactttggcccggtacagtgccgtctcccgttctttctccgcttgaactgcaccacgaacacccttgcggtcattcatatccgggttcacatatttttcatagccatcgaattcgcccacgataagccgattctcaggtagccgccagaggaaatccacgcgatacagagcaccggtttgcgggtcggtgatgttttgttgcagttctggggctaataggccgcctgcgatgatggtgcctcgtccaagtgactcgccaccattctcactcgccggattggcataatgcagtaggcggaatatcggcgtgcaatcacgtcgcatagtgctgcacacattcagaatgtccgtgatggcgacgccgttgcgcagcgccgaatcgataatgggcagtgcaaatcggaagtcgacggacagcccgcaatccaccaccgttctggctttgctggtcaccgggagtccattggcatattctggcgtgctgcttgacgtgaagatgcgtttgacctttgcactgctggcgttggggcctcgtgatgttgtggcgagagtgatggtgccagcatgaagatgccattggtgttcaaaatcgtggatggccgctgccgtgaccccggcgaacacccaatccggatgtctgttatgaagagttcgtgcaatatgtctgatacgttcgtcgggttgcagcgaatcccagtattccgaagcggcgtacatgttggggaatacacgtttgagttcgcgcgcctgcacgcgccgagccagcgccgagcggtgtgccttggttgttccataagcgcactgttgcgttgcttcagccttcgtgatgagtatgtccactgctttgtgatgtttcatgattcgacggtatgccaatggtgaacacggtgtctatctgtctggggttatgtggttctagcttcggtgcctagatgtgtgtttttgcctgattatcaggcatctgaccgtattggactgattatgtggattcttttgggtgggtatgcaaaatgtggataactggcgaggtgcgcagggcgattgtcgttcatatgttcgatgtaggtgtgtttgggctcattgtgagcttattagggtggccatgcagatacttcagtggggcacatttgcggttgggccgtggcgttgcctcgctgcggggcgtctcagcggggcgttttattggttggaccgcggttttgttttgctgggatggctgagcggggcgtttcatcggtcagctcgcggttttgctctgctgcgagtcgtctcagtaaggtgaacttgcggtccggcaacggttttgccccgccgaagaagccagcagcggggcaaatgctcgaccggcttgagcttctgattcgctgaagggttccagtaggcgggaaaatgaggcttcccgacaactgcgtgtcacatacggctcatatagttatggccatgccaacattttcacgtgaagaaatcgtgcatttgggcgatctggcccgaatcgcgctcaccgatgaggagatcacccgtctgcagggcgaactgaacgtcatcgcagactccatcaacaaggtccaggaagtcgcctccgacgatgtgccgccgaccgccaacccggttcctctggaagcctacctgcgcccggacgtcgccgaaaccccgctcgcgcaggaagaggcgctcgccggtggcccgaagaccgaggccggcatgttcgtggcaccgcgaatcctgggaagcgaggagtaatcgatgagcaacgaaaccgcaactctcgtcaaactgtctgctgccgagcaggccgctgccatcaagaagggcgacgtcacctctcgtgagctcgtcgaagcccacctcaaggtgatcgaagccgccgagccgtccatcaaggccttcctgaaggtttccggcgatgtggctctcgagcaggccgacgccttcgacgccaagtccgccgaagacaaggccgccctgcctgagctggctggtgtgccgatcgccatcaaggacatgatcgtcaccaagggcattgagaccaccgccgcctccaagatcctcgaaggctgggtgccgccgtacgacgccaccgtcatcgaaaagctcaaggccgccggcatgccgattctcggcaagaccaacctcgacgaattcgcccagggctcctccaccgagcactccgcctaccagaccacccacaacccgtgggataccgagcgcgtgcccggcggttccggtggcggctccgcctccgcagtcgccgcattcgaggcaccgatcgccctcggcaccgacaccggtggctcgatccgtcagcccggcgccctgaccggcaccgtgggcgtcaaacccacctacggcggcgtctcccgtttcggagccatcgccatggcctcctcgctcgaccagatcggcccggtctcccgcaccgtgctcgactccgcactgctgcaggagatcatcggtggccacgacaagcgtgactccacctccatccccgaaggcccgcgcccgatggtcgccgccgcccgcgaaggcgccaagcgcgatctgaagggcatgaaggtcggcctcatcaaggaactcggcggcgacggcttccagcccggcgtcgaggcccgcttcaacgaggccgtcgacaagctcaaggagatgggcgccgaagtcgttgaggtctcggttccgcacatcggctactcgctgggcgcctactacatcatcatgccgtccgaggtcagctccaacctggcccgttacgatggcatgcgctacggcctgcgcgtgatgccgccgaccggcgtgcctcagaccgccgccaacatgatggcctacacccgtgaggccggcttcggcgacgaggtcaagcgccgcatcatcctcggtacctacgccctgtccgccggctactacgacgcctggtacggctcggcccagaaggtccgcacgctgatcatccgggacttccacaacgccttcgagaaggccgacgtactcgtggcccccaccagcccgtccaccgccttcaagttcggcgagaagatggacgacccgctggccatgtacatgaacgacatcgccaccattccggccaacctcgccggcgtgcccgccatgtccatcccggccggcctgtccgacgacggcctgcccgtcggcttccagttcatcgccccgcagcagcgcgacgaagtcatgtacaagccggctgcggccctcgaagccgcgctggaagacagctggaacggcccgatctggaacgacctcaagaccccgtggcttgacggcctgggcaagtgagcatcggaaggaaagaaacaacatcatggctgaaaaactgatgaagtacgccgatgccaccaagaagtacgatgtggtcttcggtctggaaacccatgtggagctgtccacgaacaccaagctgttctgcccggcccacatcgagttcggcggcgagccgaacaccgagctgaccccggtgagccttggcctgccgggctccctgccggtgatcaacaagaccgccgtcgattacgcgatcaagctgggcctggccctgcactgcgaaatcgccgagtggagccagttcgcccgcaagaactacttctacccggacatgccgcgtgactaccagatctcgcagtacgacaagcccaccaacggcaatggctacctggacgtcgaactggaggacggcaccgtgttccgtgtgccgatcgagcgcgcccacatcgaagacgacgccggcaagaacacccacgtgggtggtgccgacggccgtatcgaaggcgccgatcattcgctggtcgactacaaccgcgccggcgtgccgctgatcgagatcgtcaccaagccgatcgagggcgcgggcgatcgcgctcccgaaatcgccggtgcctacatgcgcgccatccgcgacatcgtgcgcgcgctgaacatctcccatgcccgcatggagcagggcaacatgcgcgccgacgtgaacgtctcgctgcgtccgagcccggacgccccctacggcacccgttccgaaaccaagaacgtgaactcgttccgcggcatcgagaagaccatccagtacgagatccgccgccaggccgcccgtctggacgacggcaaggagattctgcaggagacccgccactgggatgaggcttcgcagaccaccgccggcggccgtctgaagtccgatgccgacgactaccgctacttcccggaccccgacctcgtcatgctccacatcaccaaggagcacatcgaggagatgaaggcccagatgccggaaatgccgcgtgagcgccgcaaccgcctcaagtctgagtggggcctgagtgatctgcagatgcgcgacatcctcaacgccgacgccctcgacctgattgaggaaaccgtcaaggccggtgccaaggccgccggtgcccgcaagtggtggctgggcgagctttcccgcgaagccaacgccaagggtatgtccctcgaagagctgccgatcaccccggccgatgtggccgaggtcgagaagctcatcgcctccggcaagctcaacgacaagctcgccaagcagaccgtcgaaggagtgcttaagggcgaaggcactccggatgaagtcgtcaagaagcacgactacaagatcgtcgaagacaacggtgccatcgaggcggccgtcgacgcggcgttcgaatccaacccggatgtcgtcgagaagctcaagagcggcaacatgaagccgatgggcgtgatcatcggtgccgtgatgaaggccacgcgcggtcaggccgacgccaaggccgtcaccaaggtcgtcatgggcaagatcaagggctgattagattcactggctcccgctggcgggagctgtcgaacggagtgagactgagggtggtcgccatgtacggatgaccaccctcagtccgcttcgcggacagctcccgccagcgggagcacttatttgtagggaaatcctccagttcaaattcgttggacagctcccgccagcgggagcctttattgattctgtaagaaagtcgtctcagagcatttccagcgttcacccagtcgagtaagatatgttcggcactggaccgtgagccgaaacaagccgaaccgggggatgtataccgatgaccgcaaccaacgagacgctgagcatggctaccgaagcgcaactgaagcgcgatctgccacagagcatcgtcattccgccaatccgtggcgaaatggtgcacctgcgccccgccaccatcgaggacctggctcgtttggatgaactagatgccttctatggcgcatccaagatcaccggcaaggatgcggtcaccgaacgcgccatcgtacacacatgggtccgccgctcccaagcctgggaagccggtcaggcacccgccgaatccggcgtgggcgacccggaatcccgccgcaccatcgcatgggccgtattgactgacgccgaccatgacgatgacggtcagctcgatgcggccagcaccgataatgtcatcggcatgattttccttatcgacatcgacggctggtccaagtccgcccgcatccagatcatcttgggccgtgagtaccgtggccgcggctactcccgtgacgccatgccgcgtgtgatgacttacggctttgcgcccgaaccggccggcctgggcatgcaccgcatctgggtgagcgtgccggaaaagaacagccgttcgatttcggtctaccagtcgctcggcttcgtgccgtccggcacctcgcgcgacgcgttgtgggatgtcgaaaacaacaaataccaggaccttatcgtcatggacacgttggtcgacgagtacgatccgattcgttcgcttgacgcttttggcatgcacttgattgaggacaacccgggtgtcaaggaagcgctgtccgcgcgtgagcattccatcgccatccagcagaacaagccggaacccgagccggcacagcgtggtgaagcagccgccgtcacgacgagtgacgtgcagtcccaggcccagacgccggcggccgcacagccagtcgagccacaggccgggcaccacgatgatacgcagaagaacacgcgccacagtctcgaagaggaaagcaactggccgtacggccaggcggaacgcaagccctcaaaggaagcatggtggcgtacgctgggccgcggccgcaaacgcgatacggaaagtgagtgagtaaacaagcatgagtgccgaggatctcgacaattacgaaaccgacgccgaactcgcgctgtatagggaatatcgtgacgtcatcaagctgttcacctatgtggtggagactgagcgtcgcttctacttggcgaataaggtcgatttcaacgtgcgttccgctggtcaggacgtgtatttcgatgtgcagctgactgacgcatgggtatgggatgtctaccgttccagccgtttcgtcaagtccgtgcgcatcgtgaccttcaaggacgtgaacgtcgaagaagtccagaaaaccgatatcgacattcccgacgatattcactgacaggcaatcgtctgatacagcctgtattgacaatgcgcggcattccgtcatcttacggcggggcgtcgcgcattgttcatacaacgcatagcaaaagttcagattcgtaaccttgccatcgtgtgtcttgtttgcttgcggctgatagaaaatgctgctgcttgcacttgcaggaatctcgctgaatctatggaaggttcgtcgctgacgaattagcccaagaccaaaccgattcgccgcgctgtgcgtgacgcagcgttgccgaatacccctacctcacgattggatgcgtcgcctttctgctgatggaagacggcgcatcggtcgtatatcgggagaattctgtaagcattcgctcatctttcggtgtgcgattccggggcttctagtaaactgtctctgattttgcgtttataaggagcataatgaccgacaagcaatccgtagtgattatcggcggcggtccggctggacttaccgccgcatgggaactcgtcaaggatggcggcgcggaaaactatgacgtgaccgtgctggaggggacccgcgaattcggcggtatctcgcgcaccgtgaagcacaacggcaaccgcatggatatcggcggccaccgtttcttctccaaagacgaacgcatcatggattggtggaagaccgttctgccgttgcagggcgcaccctcctatgatgacaagaagctcggccgcgaccacgacatggagccgggcggccccgatccggagacggaggacaaggtgatgctcaagcgccaccgcgtgtcccgtatcttctggaaccgccacttcttcgattacccgatttcgctgagccccaacacgttgaaggccatgggcttcaagctcaccatggtggccggcttcagctacctgaagtctatgttccacaagctgccggaagacaacctggagaacttctacatcaatcgtttcggccgcaagctgtattcgatgttcttcgagggctacacggagaagctgtggggccgccacccctcccagatctccgccgactggggcgcccagcgcgtcaagggcctgtccatcatgggcgtgctcaagaacgccttccagaagcttagccccaggaagcgctccaacgcggaggtcgagacctcgctgatcgaggagttctggtatccgaagtacggtcccggccagctgtgggagaccgtcgagtccaattgcgaggccgccggcgtcaaggtgctgaccgacgccagggtggtcgaggtccgccagaccgatggcgccgtgtcttccgtggtgtacgaggattccgagggcaaccgcaccgagctttccggcgaccagttcatctcctcgatgccggtcaaggacctggtcaacgccatcgacgcggccggcgacgatcccgaggccgctgattccaagcccgccccggccgatatgaccgaggtggccaacggcctgccgtaccgcgacttcgtgaccgtgggcctgctggtcaagcacctgaagctcaagaacaccaccaacatccccaccctcggcaatccgccgatcgtgccggactgctggatctacgtgcaggacccgggctacaaggtcggccgtctgcagatcttcaacaactggagcccgtacctggtcaagaacgtggacgacaccgtgtgggtcggcctcgagtacttctgcgaggagggcgactcgttctggaacatgagcgaggaggacgtcaccaagttcgcgatctccgagctcacccgcatgcgtgtgatcaacggcccggacgaggtcatcgactcccatcgtgagcgcgtcaagaaggcgtaccccgcctacttcgacacctacgagcacatggacgagctcatcgagtacctcgacggcttcggcaacctctactgcgtgggccgcaacggccagcaccgctacaacaacatggaccactccatggccaccgccatggaggccgtcggcaacatcaagaccggcaagacgtccaagaagaacgtgtggtccgtcaacaccgaaaagtcctaccacgaagagaagtgaataaaccttgttgagctccctcgtcacagagggagcttttttggttttcggcgggccgttttgcgttggtcgagttggcgttgtacagtaaacgaagttcgtgaaaactcagagacgcagcgaacattcatgagcggtgcaaccgcaataatcactcttaacgcctggataggcatgggtctgttcggtatggaaagggcaaccagtggcaaatagccagaatcttgaggatatgaagctgcctgagctcaaagagctcgctaaacagatgggcctgcgcggcacgtcgaccatgcgcaagcccgagctgctcgccaccctgcaggcggcgcgcaatggtggagagccgccggccggtgtgaccgtgcgcgctcccaaggccgccaaaaccgccaaggtcgtcaaggctccgcagtccgatgccgctgaggccaataccacagacaatgctgacgtggccacccagtcgccggctccggcctccacggaaccgcagctcgatttgccgcttcccgtggccgacgatgccaagaaggacgagaccgaaccgcgacgcacccgtcgtaaggccgccgatgatgccgcatccgaaccgcgtgcggcccgccatcgtcgcgatgacgaccagtccgatttcgctcgccgcaagccgcgcaagaaggccgatgaggccggcgatctgctggccacgctcgatttgggagatgcagcgcctaccgagcgtcgccgcgagcgccatgaggacgtggaagttccgctgattcgccgagtccgtgatgatgaggacgagcagcctcgccgccgtcgtcgcactgcggaaaacagcgaagaaaccgtgcgtgacctcgacgatatcctggccacgctgcccacgcagaagcacgaggaaacggccgaagacggcgagcagaacgacgatcacgagtttgtgcgtcgtaaccgccgcgaccgtagcgatcgcaacgatcgcgataaccgtaatgatcgcaacgatcgccgcagccgccgcatgcgtggccgtgatcgcgacaacgccgatgatgatcgtcgctatgatgatcgcgataatcgtagcgatcgcaatgaccgtgatagccgccgcgaagagccgcaggaggatctggtgccggtggccggcatcgtcgacgtgctcgactcctacgcttttgtgcgcacttccggctacctgcccggcccgaacgacgtgtacgtttccatgggccaggtcaagaagtacggcctgcgcaagggcgatgccgtccatggttcgattcgcgccccgcgtgaaggcgatcgtcgcaaccaacgccagaagttcgtgccactgcaggccatcgattccatcaacggccaaagcgttgaagaagcgctcaaccgtccgcagttctccaagctcacgccgctgtacccgcaggagcgtttgaagcaggaaaccgccccgaacaagctcaccggccgtatcatggacatcgtttccccgatcggcaagggccagcgtggtctgattgtctccccgccgaaggccggtaagaccatcaccctgcagaacatcgccaactccatcgccgccaacaaccccgaggtccaccttatggtggtgctcgtggacgagcgccccgaagaggtcaccgatatggagcgcacggtccagggcgaggtcatctcctccaccttcgaccgtccggcctccgatcacaccacggttgccgaactggccatcgaacgcgccaagcgtcttgtggagctcggccaggacgtggtcgtactgctcgattccatgacccgactggctcgcgcttacaacatcgccgcccccgcctccggccgcatcctgtccggtggtgtggacgcgcaggccctctacccgccgaagaagttcttcggcgcggcccgcaacatcgaaaacggcggctccctgaccatcatctcctctgcgctggtggaaaccggctccaagatggacgaggtgattttcgaggagttcaagggcaccggcaacatggaactgcgcctgtcccgcgagctggcggacaagcgactgttcccggccatcgacatcaacgcttccggcacccgccgcgaggagctcatcaccaacccgcaggaactgccgattatctaccgtctgcgtcgactgctgggcggcatggagcccgagcaggcctaccagacgttggtgccgcgcctcaagaagaccgccaccaaccgcgacttcctcgccgccatcgtgcagcaggccaacaccggcaacgcggtcaacggcaactgaccagaccgctgaacaatagtgtaagggctgcaccccgattgatacggggcgcagcccttgccgtatatgatgcaaatacatcaactatcacattgcagttgtagtattgccgtcaacgttcacatgcacgctgacgatatatgagatgaaagatgtatcaatgggttcgattgttttgggagtgggcaatggtgcggccatgttcggcgatgcggatgccagccatatccccaccggcgactatgacatctgagatatctgactttgcgcatcgtgcaaagccgcaatcgggagtatcctcgaatctatgagcgaaacgagcagcggctggcaaaggaccaccatcgactccgcccaggcggcggcccacccggaaaccgcacaagcggtggcgcgcatcaaagcgctgcgccaaaccatcgataacatcgattcggcggccatcgcattactggccgagcggttcaaggccacctcgcaggtcggcgtgctcaaagccaacgccggattcgcgcccgaagacaccaagcgtgaggactatcagatcgaacgcctccaccgcatcgccatcgatgccgggcttgatccggaaattgccgaaatgtaccgtgaattcgtggttaccgaagccaagaagcgccaccagcgcatcgccgatgccggtggcgacccgggcgtactcgacgtattcgcctgattcgcccgtagcgaatgggcacctttcggatattcgtctatagggcaagttgccggcagcgactacattaatacgggaatggaatgcccatagtggccgactgtatgaatgggatacgtagatgagatgtggtgccgcactggtcagttgcgcattgtgcgtggcttcgattctcggcggtgcttggatgtctcgtccgactccggttgattacggtccggtgctcgctacggcaagtgatatgtacgccgtcgccgatgccgaaggggagccggtccgttggtatgtggtagggaagggcggcgccggcaatggcgccagtgccgattccggcaatagcggttccactgataccgattccgccaatagtgattccggcacgttcaaggtttctcgtatccccgcttccgccgccaccctgccatggaaagtcagcgtcacctactcgcttgacggtccaaacgtcgaggcaaacgaggttgccggcgcatctggactgatcggcgtgtatatcgatattaagccgcaaaccaaggaggccaaccgtacgatcccggttgtcgcctttaccgtgcctacgcaggtagccgatgatgtttccgctgacaactccattacggtaaccacgcaaggttccaataccgtagtcgccgcagctggaaaagccgcaaccggcttggaattcagctgctatatgaacgccaaagacttctccatgagttccgtggcgctcgccgtattgccttccaattccagcagtccggtggttggtgctaatcccgatgccgcgaatgccgccgcacagcctgctgccgatacggatgtcgcccaactcgtcgcctctgccgccatactggtcgattcactgaccgacgccggttccggggagcatcaacagctcatcgagcagcttcaaaccctgcgcgataatgagcgtgcgctggacaagtccgtagtggccgaacgcgaaaccgcccataagcggacgtttgaagactatatggccgcgtatgtgggctcatataccacgcacctgtctggatcgattggtacctccacccagttgccggcgttgatgggcacggccggcgaactgtccggggatacgcctttggcacaagccgtactcgacttggccaacgcggtgaacaacgtcagtgccgcacatcagcatgccggtgcggtcgatgcgttggatgaggtgattcgccgcatccagcagcaaggcaccaccggactggtggatgatctgaccgccgaggcttcggaggaagccattcgaggctccaagcaatacgccgatggccagagccagctctccgccgcaatgattccgtattcgatgaaatacacggacgtctacacggccaatttgagcgccctgaccggcggcacgtcttcgggcgccactgcttacgagagccaagccatcgccgaaaccaacggtagcgatgaactcgccgacgctcaatccaaggtcgatgccgcgatgagcacgcttgccaccgcctccgagcatacgggcaaagccacggccttgcgccagattgtattgcgattctccgatcagttcgaaggagtcgcgtcctcggcttccggcagcgatggcgatggctcgtccggtgatgtctcttccggtccggtgaccgaggctcaggcactgactggcctggtcgattcgcaatcgcaatcgttctacggcaagacccgggcctcccaagccaagcgtaaggccgatgccgcccgtaagcaggccaaagccgcgcaacagcagcagtcgcagcattccaaggcctcactggtcgatgacaccatgtccatgtctgctggcgatgtgatgaactatgcgggtggtcttacttcggccatcggtggtggaggtaagttcgattcgtccaagagcgatggttcgggaacgaacgactcagccaagtcgagcgatactggcgattccggcaacaatcttgacaccgctccagtactgttcggctttggcactggcggcacgctgctcaagcatgacatgagcgcgctgatcaatgagaccgtggagatcagcgatgctggcacgctcttggcgcaggccgtcgcgcagctcgatagccccaatacgcaacaaaaaaccgccgaaacccgatacctcatcgtgattccgacggtgtgatggtgtatgcgggaaaatccgcatgcgacaggtgcccaatacgcgtaaagtgcgttatcggtgtgggacgccgcatcaaaaactggctttttcgatgcggcgtcccacacccttttgtgagtcagagctaactatagtttgaagaatggctaaattccaaggatttgttgattcggtctgtgggacgccgcgtatataaaacgtttgacacgcgtggtggcccacgctattgtgggccgccagcttacaatgcgggatatttgcgtgccgtcccacagtcgtgtcatccgaacgtcaaacaacaaaagaggggaacctcaataggaggttcccctcttttgttgttgtgcgcaacgctcagtgctttggcttcttggctggccgagccgttaagcgggaagcccggtgggcttcccgtaggctcggaacgagcggcattgccgtgagacctactgttgttgtgcgcaacgctcagtgctttggcttcttggctggcggctcaccgagctcgctggcttcgacggcgacctcggtttcgggcgcgtcttcggcggcggattcctcggcgtgcttggccaccaagtcgaacttgccgaccacgcgaccggcctgcgcgatatcgcccaaggcggcgtgaatcgcgttcacaccttccgaagcagcggacagtgccacagacaggattggggtcttcatggagaccttggcctcggacttgatcttacgcagctgctccacggccttgccggcccaagtcagcagctcgggggaagcaccggtggcggcctcgacatacgggtccacgaccggccaggcggcgcgatgcacggaaccggaaccggcgtgcatccagctccacacttcctcggtggcgtacggcaggtacggggccagcagacgtgcgaaggcgtccaagcccagacccagagcggtgcgggcggacttcacagccttctcggacggcacattgccgtgctcgtccggagtgccataggcgcggttcttgaccagctcgatgtagtcgtcgcagaactgccagaagtaggattcgatgacttccagcgccttggaatgctcgtaggattccagcgcctcggtggcctgactcaccaccaaagccagcttggccatagcggcgcgatccagcggttcggtcacatcggccgggttccacgaggtctcggcggcagcgcccacgtgatggttctcgtcctcacggccgatggccagcgcgaacttggtggcgttcagcagcttgatggccagtcgacggccaatcttcatctggccgatgtcgtacgtggcatcgaggcccaggcgagcggcggcggcccagtaacgcacggcgtccgcgccgaacttctcgatcggctcgttcggcaccacgacgttgcccttggacttcgacatcttcttgtggtcggggtccagaatccagccggacagcgtggcatgggcccacggcagacacttgttctccaagtgcgcgcggtccacagtcgagaacagccaggtgcggatgatgtcctgaccctgcgggcgaaggtccatcgggaaggtggaagcgaacagggccttggaggcctcgtccggctcagcccagtgggtcacgatctgcggggtcaccgaagaggtggcccaggtatccatgatgtccttttcggcggtgaagccgccgggcacatcacgctgggactcgtcgtagccttccggcacatcgatggtcgggtcgatcggcagacgatcctcgctcggggtgatcgggcgatcgtaatccggctcgccggaagcgttcaccgggtaccacagcgggaacggtacaccgaagaagcgctggcgggaaatcagccagtcgccgttcaggccgtgcacccagttctcgtagcgcacgcgcatgaagtcggggtggaagttcagttccttgccgcgctcgatgagctcggcgttcagtttctcgtcggtaccgccgttcttcaggtaccactggcgggaggtgacgatctcgagcggcttgtcgcccttctcgtagaagttcgtcatacgcttggtcggggtcggctcgccgtccagatcgccggactcgcgcagcttgtcgacgatgatcttgcgggcggagaacgtggtcttgccagcggtttcggcaaagacctcacggccggccgggtcggtgatccaatccggggtgtccatcacgatacggccgttgcgctgaatgatcgggcgggtgggcagcttcagatcgcgccaccactcaacgtcggtcacatcaccgaacgtacagcacatggcgatgccggcacccttgtccatttcggcggccgggtgagccagaatcggcaccttgaccttgaacagcggggagtagacttcctggccgaagtactgcttgtaacgttcgtcattcgggttggcgatcagcgaggtgcaagcggccagcagctcggggcgggtggtctcgatgtagattggggtgccgtcctcaaagcggaaagccaccttgtggtagaagcccgggtattcgcgggactcaagctcggcctgagccactgcggtctggaaggtcacgtcccacaggccgggggcgtcctgctggtaggcctcgccacgagcgaggttgcgcaggaaggccttctgagccacgcgccgcgggtgctggccgatggtgtggtaggtctgcgaccagtcgatggacaggcccagcttgcgccacagggcctcgaacagcttctcatcctgagcagtcagacgctcgcacagctcgatgaagttcttgcgggaaatcggcacctgatccttggcgtcgatcttcttgccatcggtgccctcgaacggcggcttgaagtccgggtcgtaaggcagagacacgtccacgcgcacgccgtagtagttctgcacgcggcgctcggtgggcaggccgttgtcatcccaacccatcgggtagaacacgtcgtagccgcgcatgcgcttgtaacgcgcaatcacatcggtgtgcgtgtaagagaacacgtgacccacgtgcagcgaaccggagacggtgggcggcggggtgtcgatggagtagacggccttgcggtcgcgggtattgcggaatttgtaggtgccgtcttcatcccagacggcgcgccacttgtcctcaagtccgtccacaccgaccttgtcgggcagcggggtgaggttggcgttgatgatggatttgccttcagtcataaagccaaagtttatgcacgttgcatgacaagccgaactgtacagtaaacagcccagtaggctgttcgcaggcgagatacgaacgatcgaacgatagtgagccaaggactatcgggcgtagcccgtccgtgactgaaggttgcctacttcaccgtcaacccggccagcggcatgcgacgattgatcatcgaggtcgggtagccggagaccttggtggacgccacagtgaagcatttgcgggtatacagccaatcactggccgcatcctcgctgatcagccgggcgtacgccttcattcgtgcctcataatcggcgtcattagtggcggcgcgagcatccgcataggcctgttgcgcttcggtatggtcgtaatggaacatggaatcggggtcggcgaatatgccggcatcatccgtgccgtccatgctcatcacggtcagttcccatttgccgtccttgattcgtttggcataatcctcatcggagagcacttcaaggttcaccgtggggcgcggctgccgctcgatctgctgcttgatggtttcggccaacgaccggtattcttcgggaaccaccagattcaccgtagtcagatattgcgcaccgaagtaggagaacatctgcccagcttggttttcgtcatgcggatacagtccggtcaaatcttcgtatccgggttccagcgggctgatggggccgcccaatgctccggctgcgtcgggttgggcggaggcgatgccggctgcgtcgatttgatagcggaaggctttacgcgcctgttcgtcggagagcagcgaatcgatgccgttgttgtaggccagcagcaccttatccgtagtggccccctccttgacggtcaggccatccttgccgttcaaaccggtggccgtcgaagccgaaaccggtgccgccatatcgagactgccgtcggtcagggccttgctgagcgcatcggcgtcggagtattgcataaattcaacgatattgctggccgctttggtgccatggtaggtatcgctgcgcgccagcttcagggaatggccaggctggaaatcggccacggtgaatggtccggaacctatggccttgcgttgataatcggcactggacgactcggaatcgtagacaatgccgagtttgccggacagcgctcgcagcagcgtcggattgggcttggcaagcgtaatgaccaccgtggtggcgttcggattggcgaccgacgtcagatcgcccaattcgtcgacgtccgccaccttgttggtcacgttctgttgcaacgaccacacggcgtccgaggcgtccaacgtatgaccgttcgagaaggtgacgcccgattgcagtgtcagggtgacggtcagtccgtcatcggaagtcttccagcttgtcgccagtcccggctgaatcttgttgtcttgatcgacggtcactaatgtctcatacacattgtcgacgagcaggcgctcggctgccgcagaggaatcggaccgaatatccaaggattgcggcatatcgtcgatgccaatggtcacatcggcatcgagggatgatcccggctggaaccggttttgcatgaacgtccatcccgcaaccacgagtgcgccgagtgccacggcgactccgagaaaaatcccccacttggaccatgtattgttccgcttgctgtgctgcatggttttcagtctagcggtggattcagcctagaatccgcaattcaccatgatgaggtatgagttagcgcttggacgtgctcttgccggcgggcggcgcatagctagggcaggtgtcggacagcgggcagttggcgcagtcgggggtacgtgcgtggcaggtggcccggccgaacagaatcagtcggtggctgagattcgtccactcttcgggcggaaaacaggcggtgatttccttctcgattttcacgggatcagggtgtgcggaccgccaatccgaccgccaacgcagtcgtccggttacgcgcatcacatgcgtatcgaccgggaatccggggatatcgaacgcgttgccgagcacgacgttcgcggttttgcggccgacccccggcaagctggtcagttcatccatcgtgcgcggcaccacgccgccgaaccattcgtccagtgccgtggccagtccgatgagatgctgggttttcgaacggtagaatcccagcggatgaatgatgtcttcgacttgggccgggttcgcggccgccaagtcacgggcggtggggtaggtggcgaacagttccggggtgaccgtgttgacacgcttgtcggtggtctgggcgctgagcacggtggcgatcagcaattcgagcggattcgagaaatgcagtgcgcaagcgggtgccggaatcacctggcgcagaatgtcgtattcgtcatgcatgcgcgtgagacgcgcggatttggtttctctcatcgtatggacctaagcggcgtaatgtcgatgattgatggtttgtggcgctgctggtctgtcaggcggcggtgttgagatcgggggtatcgtcatcggtgccgatggcggcagaggatgctttggcggcctgctgtgcggcggcagtttccttatccgtctccggcgggtcgaatcggtagcccacgttgcgcacggtgccgatgaggtgttcgtattcgccgccaagcttggcgcgcagacgacggatatgcacgtcgaccgtacgagtgccaccgtagtagtcgtagccccatacttcctgcagcaactgggcgcgcgtgaacacgcggccggggtgctggaccaagtacttgaggagttcgaactccttgtatgccagatcgatggggcgtccatgcagggaggcggtatagccgttggtgtccacaatgaggtcgccggagcgaatctggccatcttccaccgtggtggtggattcggcgggagaaccggctgctgcggctgcgggagcgttgccgcgctcggagaccaatcgcaatcggccctcgacttcagccggggaagcggtggcgaccaccacatccgcaatgccccactgggagttgaccacggtgaagccgccttcggtcagcaccagcacgattggcgtggacaggccggaagcgtggatgagacggcacaaggttttggcggtcgccagatcatcgcgtgcatccagaaacagaatggtgttctccggcatcttcaccaagctggctgcatccatcggcagcacgcggacgcgatgagaaagcagggcgagtgatggcaaaacggtggcggggtcgctggcgaaagtcatcaacgtaagatccgtcacgctaatccccctttatcctgcaatgtgttacgcaattgcttggtgtggctgtacgagtcgtcagcggcgttatgccgctttcgcgcggtttttcattattctacgcgcttgtagtggacacatgggttacaagtttgcggaatatggaacggcagacgtccatcaaccgatgacacggccgagcaccagtgcggttgcggcgatggtcacgcccatcagcattaccggcatcaggccggtaccgatccacggatagcggatatccgggtccggatcggcgtcacgcacccacaacgtggaggccacggccaaggccagtcccaaaacgatgaggatgatcagggcaacggttcccgcaacggtgcccttggcgagcatcgcgcccaaatcaggcaggaagcaccagccggccacggcgagagccgccacacctgaagtcacggcgtgagagagtgcgcggataagatgttcgcgcttctcacgagccatctggcgcccgaaggagaagaccaccagcaccaccagcagcaggcccatggccagtgcccatgaataccaaggaagtaccgagccatccgcagcggtctgatccggcggaaccttgccggtcgggaaaggtacgatgacgaaaatcagagaaatcgcgccaaacaccaaagtgacgatacgatccagcatgctgccgcggaacggccagaacacgacaaatgcggccaacgtcagagcggcgataatcaaagggatgatggggacggtgccaggggagggaatgaccgtggctgcgatgagcagtacataggacgtcagttgggccaacaacatgctcagggctttgttcttccaaccctcctgggtgatctcggtcatgatacgcctctcagataatcgaatttccatcccaatcctacgtcgggcattggaacggtgaaatcaaacaaaatagccctttctggtgaaggggcttatgacactaaatcagaacgcgataacgcccaaatgctccaacagcactttgacgccaagtagaatcagcaccacgccgccggcgatctgcgccggctcctgccagcgggagccgaacgcgcggccaatgtacaggcccgcagcggagaacagtccggtgaccacaccgatgctgaggatggcgaatgccatatgggctttggtgaacatgaaggtcaggctcacgcccacggcgaacgcatcgatgctgcaggccacggccaggggaagcatatgcttccaatcgaactgggcggtctccttggagttttcctcatcttcttcgaaggcttcgtgaaccatgttgccgccgatgaacaccaacagggcgaagatgatccaatgatcgaattgggttacgtatttgctgaatgtagatgccgcgaaatagccgagaatggggaacagcatctggaatccgccgagccagagggcgcttttcgcggcgtcttgcactcgtacgcgggatacggccagacctttgccaatggatacggcgaatgcatccatagctacggaaacagaaataagcaggatttgaatgattatcggaatcatggtgcgacagaaggttcatcgccggattaccgtgcgatgggcctcgaccagcgttcctacacgccgcctacgcctagctgaaaaatacaccagcactatatcacgcgatgcacgtcgaatcaaaaaggcgggaggcctccggagaggtctcccgccgacgattcggaatcgaatcacttgccttcgttggcgaggcgttcgcgtgccgcgatgatttccttctcggcggcgtcagcaccggtccagtagtcgcccggcaggacttccttgcccggctccagagccttgtactgctcgaagaagtgcttgatttcggccttgtggtactcgttgacgtcgtcgatgtccttgatgtcatcgaaacgaacgtcggcgggcacgcacagcaccttgtcgtcgccgccggcctcgtcgaccatgtggtacaggcccacggcgcggcactcgaccacgcagcccgggaacacggagttcggaatcatcacgagagcgtccagcggatcgccgtcctcgcccagggtgccgtcgatgtagccgtagtcatccgggtaacccattgcggtgaacagggtacggtccaggaagacgcgaccggtctcgtgatcgacttcgtacttgttcttggagccgcgcggaatttccacaacgacgttgaaggtttctgccatgtcatttctccttgaaaatcgacagttacgttatcgtctcaccacaataccctgtttgcgcctgcaaaacaggtgcggaactcaagaaaccgtgctgagattatgccgacactatgtctaaacagacgaaatcctcccctcaaggggaggatttctagcggtttacgcacacgataaacccatgcacgtcaacggcatcactgttgcattaccgttgcactaccgcatcactgcacggacaggatgtgggccacatccgcccaaggcgccagagacacgtagttgtcccaaccccactggaattcgcggccggtcagctcgtcgcgcacgttgagcgggcggtcggtgggcagacccagctcgccgagttccaggtgaatcatcgactggtgtgcgttgtgtccatcgaggttcacgaccacaatcagcgtgtccgcttggccggtaccagtcagttcggccggcgtgtggcgtgcgaaagccagaatattcgggtcggacgtaggcagcacggtgaggttgtggtagctcaacgcggccgggtgggcgcgacgaatcttgttgagcgcggtgagcatctcggccacgccgtactgcttggccttgctccaatcgcgaaccttgacctcgtacttctcgttgtcgatctgctcttcgaagccggggcgctgcttgttctcgatgagttcgtaaccgttgtagataccccaggacggcgagcccatggctgccagcaccgcacgcacgcagtggccggctacgccgttgtctcgcacgtaagcggtgagaatatccggcgtggtgggccagaaggtgttgtgctggtagtagccgtcgtcgccattggtgatcggcagatactcttccagttcgtccttggtgttgcgccacgggaagtagcagtgggactgggtgaagcccacgtagctcagggcacgcatcatgcccgggcgggtgaatgcctcagccaggaacaggatctccgggtgcttcttggtcacggcggcaatcacgtcctgccagaaacgcaccggcttggtgtgcgggttatcgatgcggaagatggtgacgcccgcctcgatccacagattcatgatgcgttcgacttctttttcgatgccgggcatgtcggcgttgaagtcgatcgggtagatgtcctgatacttcttcggcgggttctcggcgaaggcgatggagccgtctggcttgtgacggaaccagttcgggtgggccttgacccacgggtgatcgggcgagcactgcagtgcgaaatcaagcgcgatttccagacccagttcatgtgcacgctggcacagggccttgaaatcgtccatggtgccgagcagcggatccacggtgtcgtggccgcccagctcggagccgatgccgaacggcgagcccgggtcatcggggccggcgaccagcgtgttgttgcggcccttgcggttggtcacgccaatcgggaagaccggcggcagatagacgatgtcgaagccttcggcagcggcgcgttcgaggccggccatcgaggtcttcagcgtaccctgaatgatcttgccggtgttcggatcgatggtggcgccttcggaacgtgggaagaactggtaccaagccgcgaagctggacttcgggcgttccaccttgaaacgctggggctggctgggggagatgccatcgcgcagcgggtgagtctcgtgcagggcggcgatggtagggttgtcgccggcggcgaggcgatcctcggcgctcagcgtctgatcggccatggtctcagcggccttctccaaggtcttgcgatcgcgtgcggtcaggccggcgtccggggttgcggcccaacgggccagcagctcggcaccggaattgagcgcgttgtccacgtcgtccatcacacgcaccttgatacgggcgtcatgcagccaggagacgtacgtgtcttcccaaccttcgatggtcacggtccattcgccgagctgacgcttgacggccgcgtagccatcctcccaaggcttcagatcgctgtgttcgccgcacttgaccatcacggtccaacgatcgaggccgggatttacgcaggtcatggcccggcgcatggtttccttgccgcgcgggttgcgcacgatggcggtggcacccaccttggtacggccttcgatgaacacttgggcggtcatctcaaacggttcgccgagttccacacgggcggggaagatgccacgctcctcggtgggagtgatgtccatgacattgatgcggccgaactggccgggctcgtttgcttcgatggacggtgcgggggcttcgacagccaggcctttcagcgctgctgcggcgcgtgccgtttcggcgctgactctcttgcgcttggttgcggggctctttcgggcagaagtcgtctttgacttcgtcttcgtggtgttgttatcggtattactagtgcgcgtggtcgcgcgatgttgtactgctgccataaggccctattctagaggcttttgaacatatgttgcacattgtggataactttcaggtaaacgttcggtcaaccgcatgaggtggataactcggcggaagagttatccacaactcgccggcaaacggcaagctcggaccacataggtcgaaagaccggctgtagcgaatgaaaatctgccatgatcgtggcctacccgcacacagtgcagtatgcggggaacgtaccaggaaaggacgaatgatgataacgacatggcggcaacggggcatggccatcgtagcgatgctgaccggtctgataataatggtgggagtggtgttcggctcggcgaatacggcgtatgccgcgacgttgacgcccgccgacgaaagatatcacgtgacgtttccatacaacgatatggaatattacgtcggtgtcgcggggctggacgcttcgggcaacaaatactactgcatcgaagcggggaaactgagcgactatgtgataggccccaccacggtgcttgcctccgatgagaacgcccggcgtatggcatggatccttgaccggtaccgcgacacggatgccgccacccatgcggcgatcggcatcatcgtgcaggatcacttcgggcgcgatcgggacgagtgggcgagacagatggcggtcattcaaggccggtatcccgagatcgtggcgaaggcggcccggatatgggatcaatcggccggcaagacgcctgcgggcacgacggtggaacgcaccgatgccgaggctttgcgcagcggttccatctcggtgaaagtggtgaaccgcgacggtgacgcgatcgcgggagtgccgttcactgtcaccttgcaggggccggcgcggttcatccaaggcggcaacacgttctcgggggtgtcgacgagcgccggatcctcgatcgcgtgggaggcgaccggcgccggcgaggtgacggtgaacaccgcatacgagtatgggcggatgcacgtcatggacagcactcaggacatgctggccttcgattcgatggcttccgccggcggttcgtcgtcgacgttccaggtgcgcaaggatttcgttccgtcggtgtccacgcaggtgtccgataaggtgcttgatgcggcttcgccggtgttcgatgatgtgaccagcggcgtgggggacgagggcagtcattgggtgcccggtctgaagctgcaggcgcgtggatactatttcgacgggctcggcaaggacgatctgggcaaggtcatcgcgccgaacgcacgggagagcgcggacgcttttctcgcccggctggcgtcctcgggttatgagccgagtgcttatggcaaggcgtccttcaccggtgtggggcagcgggttcgtgtgcgggccatggccaagccggacggtgacgccgcctatctgactccgaagaccggcggctttggcacctgggtgtgggtgttccggcggagcgagcaaagcaaacgggcgcaggaataccttaccggcgactgggtgagcccgttcatggaggcttcggaaagcaacgtggggcgcgggaaggtcgaagtcatgtcgacggttaccgaacattcggcggatatcggcgccgaactcagcgacaccatcaccgtatcggggttcccggcggaccacggccagttcatgggtgatgaaacctatggtttcgcggcggatcagccgtatgcgacggtgagcgtatggtggtccggcgatcccgacaacccctccaacgatgaggcgtacaagccatccgggggagaggtccccacggaagacgacaaccaccggttgctggccacctgggagattcccgcgatgaatggcacgttcaaaatcggcgccggggcgttggacgcgcatggcgctcccatgcatctgaccgccgaacggcatgggtggtacgtgttcgtttggcggttcgagggggatgaccgtgtttccccggcgtccagccggtatgacgatgcctgggagcgtgtgcgggtgttgcccccatgcgagtcggagaaaccgtgcgaaccggagaaacccgagacgccaccggcgccggcggaggcaaccacgcccaaccctcgcccgtcactgcccgtcacgggtggcgatgtgtcgcttgcctcggttctggccgtgtcagctctggcgataggcgccatactgtccatcgtcgttcggtggcgtcgttgctatgaccgatccaagcactggacgatgcgctggccgatacgttgacccgctgcggcatgatgccgatgatgtcggctggatggtgaaccgcactccgcttctgagcagaaggacgggagctgggcacgaagtcgattgtgacatacgacttgtgcccggcttccgcttcgttgagaaacttcacgcctgtcgcctcccgtggattagacaactgaaggtccgcgatgaaaacgacgagacgtttatgatcgccgacttccctgggcaccgtagctgcctgatcgcctttcatccatatcgccccggtcaggtcgtcacctacaacggcggcggcagcgtcgccaccggcagcaacgccccaccgtcccgtaccgtgaccgtccgtgcagaccctcggccccgtatggggctggacgtgggccgatccggccgcgacgaccatcagcgccgtcgccctgaccatcggcgtcgtcatcggcgccagcgccctcaaggccaaggcatccaaggccgaataacaagaagcccccgaacctgaaccgtatcacgcggcaggttcgggggcttttcgccgtatatgggtcaggccatcgcgggctgtgcctgattggcggtcaggtatgcggccagtgccttgcggatcagagcgctcttgccgatgtgctctcgttcggcctgtgcccgcacctgtgcgtccatgtcgggcgtgaggtatgccttgtagagcacgtcggccttccggcggggctggtcggcgagggggcggccggcgaagatgtcgtcgatgtcatccatcgtgatcgccctttgcgggcggatggtctcgccgatgatggcgggggtgtgctcggtgtattcgtccgagagctcgtcccagtctgtttcgttgctcatgatgtcctccttggtgttttttagtcgtcgaacttgtagagccattcgcggcggcagtccatcgcgtggaacaccttgcgggtgcgctgggataccagcagctccacggggcgttccctgaactcgtccgggtgtccgaggatcgccatgaccctgtcgccggcgtgtctcgactgcacctcgaacacggccaccggatgccggaatatgtagtcgatctgtggctgtgtgagccagtgcttgaaggctgacggctcgcattcgatcatgcttattgtggtaccataatttagtaccacaatcaatttagtaccacaatcaagtcggggaaacggaacatcgtgatcctcctaggcggcgaggcgcgtggcttccacggcggcgcgcagctggtcgtcgggcatggcgatgtaccgttgcgtggtctcgaccgaggcgtggccgctccaccggccggggaacagatagccgttggcggatcggatcagcagggcgaggtcgtcgccctccacgtccctagatcgcccttaagcgccctcgacaatgcggacatctggcatcggcgcgtgccgatcgtgttgggggagtagcccgccgccttgagggagtcgagccatagattgattgattctgcccagagcggacttggatgttgttttttcacaggacatcatcgccccgatcggatatgcggccccgtagggcacgacggcggataaacgaaaagccgtcacgaataatcgtgacggcctcgcccgcagtagcggggcatggatttgaaccatggacctctgggttatgagcccagcgagctaccgagctgctccaccccgcgtcggcttgtctctcagacagctctatctacaataggtgcagattccagaaagtcaacatcggcgtgtcgtgtcattttcccacggctttaaaacgtgaatcggctcacgcagcgaggggtttggggcggagccggagtcggggtgataacgcgccataaatggccgttataggaatgccctgaaccgttatcccgaatattgacataataggaacatgcctatcaagatccccagtggcctgccggccagagatatcctcgattcggagcgcatcttcgctctggagaagcccgaggcggagcgtcagcgcgtccgcccgctcaaactggtggtcctgaacttgatgcctaagaaaatcgagactgaaacgcagctgctgcgtctgatttccaagtcgccgctgcaggtcgaaatcgacttcatgaagacctccacgcatgaggccacgcacgtttccgccgatcatctcgtcaagttctacgaaaacctcgatgcgctcaa

SEQ ID NO: 1044 - DNA, 17752 bp, Unknown
  R13_10m  MAG No. k141_888
cagttgcatggctttgcgcacacgttcgcgcatgtcatcagacacgtacccgttgccgttcaccaccagcgagacggtgctcagagacaccccggccttcttcgccacatcgcgcatgccgaccatgatcgcaccttccccgtcatcactgttctatcgccgtattctcacgtgcttaccgctaatattacattcatttacattctctcgaacccgttcgacagtccggcaacgaaatacagcttcttagtgtcgactcccacggaggcgaaggccttcagcagcggcttggtctggtcgaatgcaatcaccagcgttgcatccggactggcggccttgatggcggttgcgctcagatttctttcacgttactcagcgaccgtccgtgtaacgtgaaaattacgccggattggcaagcagcgcaatgccgaaaccggtggccacgcagatgagaggcaccgcgacggttgctattccatagcccagagccagcgtaaaacgacgctggcgaatcaatgaaaccacttcgttgagcgccgtggagaatgttgagaaaccaccgagaaatccgacaacgaacatcatgaccgtgtccatatccaccgattgcgaatagtaggacatcatggcgatgcccgcgcatagcgaggcgacgccgttgatgacgagcgtggatagcgggaagttgcggttcgttcttcgattctcgcggttccagccttgttgaattgacacgtcgagcacgtaacgggccatggctcccagaccgccgaacagacagatcatccacatcatcagcgcacctccccggtagtcgggtcggcgacaagcgaaatctccgcagtgatcggtttgggctcgaagctgggtggaagcgggttggccggctgctggattggctgcgactgctgaatctcgggcagctgccccaagtctggagtatccggctcgcgcagcaacggatgcgccggctgcgtcagctgaggaacggccagcggaggaatctgcggaacgcggactgtctgcataggctggctggcggtcggcggcacggttggtgtttcgactcgcggaacctgtcccgtctgtgcaatctgctgggccgtctgcgcggcttccattgcggcctgcgcggcagaacgcgccacgtcggccactttcacatggcgtacgccctgcgtgtccgattcggcagaatcggacacggaaacagctgaaaacgcaccccgaacccgctttcgagtactccgtgacagcagtgcctgcatcagaaccacgccggcggcggcagtgagcaaaccgcctgcaaaatttcccgcaagatagccaagcgcactggcgatatgccgctcgtgcagaccttccaccgtttccagcatcacgccggacatcgtcgaaagcccgccgagcaagccgagcccaacgccacggctgacaacctgccgcacccggcgacgcagccacgaagcggtcgccatgaattcggtcagcatcgcgaacaggaagcaggcgaccatattcgacacaaacgtgcccacaacgaatggcgtcccgctgaccgacggcaggagcatatccaacgcatgccgacagccgactccaacaaatccaccgacgaacaccacaacatacatcagtccgtcggcgagcggattgaaccgcgcctgcatacgtttcatcggtgccaggggaatcgtaggcggatccatggtgttagcggcgggcgcggttgcaccagcatgcgtcacctcaacagcgtcgattgcctgcgtgatgggatgtgagtcctcacccgcagtcaccacgtctcccggcgattgttcttgcgattccattgcgctccccctgtactggccttccgcggacagcgttgttccgcccataggccgtgcaacaacgagctgggccgcggttgccgacttcctaacgcatatgagtttacacggagcgccaacgtatgcaccctggatgtccgattccgcagattcggacatccagagtccagccgaattcagccaggctcagtcaagccgggcatcacacagccgccgcatcgcaggtcgcacctcgcgctcctcctcgccactgaacagcaccaccagatagtcgccggcacgcagccgtgtatcaccgcgcggcacgatctcgctttcgccgcgacgcaggccgatgatcagacacccagacggccaacgcacgtcacgcacccgcttgccgtccgcaatcgctcccatttccaatggcagttccataatgccgctgcccacatggcttacgatcgccatctgcatgccttgcgcgcgcacgtaccgctccagcaactccccatagattggtttggtgcgcagcaaatcggacaccaacagcgcaacgaaagcgacggccgcgaccggcagcatgtgcgtcaacgttccagacatctccacagccaacagaatcgacgtgatcggcgttttcacggacgcggcgagcgtgcccgtcatcacgcacaccgcaaacaccgccactgcgtcggatggcagattaccgaatcgatgcaacacttcaccgcagatgccgccggccaacgaaccgaccgcaagaatcggcatgaaaataccgccaggcgcgcctgagccgaaactcgtggatgtgaacagcatcttcgccacgaacagcagacacagcattcccaagccgacgcgcgcatgttcggcggtatcaatcagattcgagccgccgccgagcacatcgggcaaccagatgccgacaggcaacgcgatcgcaatcgcaatcatcgggcggctccatgccggcagtttgccgtacagcgtctggaagccaagcaacgagcggttcatcagcgaaccaaccaaaccggccaccaatcccaacggaatcagccacacatactcttccaacgacagctgaccgatatcaccgaaatccaaaaccggacgcagaccgaaacagtattttgagacgaaatcggcggtcagcgatgcggcggtggcgcccatcagaatcgcaggggaaaaactccgatgcaccccttccaaagcgaacatcatgccggacagcggcgcgctgaacgcggcggacaagccggccgcggcaccggcggtgaccagataatgctcctgcatgtcctcacggcggcggccgcgcaaacggtgggatacacactgcgcgcccgacgcaccaatctgaatggacggcccctcacggccgagcgacagaccaaacaacgcgcccaacagtccaccgacgaaacggactggcagaatcgtctgccaacgcatcttcaagccgcatatcaccacgccgttggtctgcgggatgccgctgccaccagccatcggctccttgccgaccatccacgcgattgctagcgcggccgccaccgcggcaaccgcccacggcgcaatcagccacggggtctcgcgaatccgcgcatatatccaacgggacgcatccgtgccgtattcgatgccgagacggtatacgacaaccagcaatcctgaaaccagaccaatgactatgccggccgccgccatcttccacttcaagtggtcgaatcgcggaatcagccggcggatatcatgtgccgcgtcgttaccagtcaagccgggaaattcgttgcagacggtcagtcgaccagcgaattgatctggatgacatggtcgcgctgcggaccggtgccgatcgcggagatacggcagccgctcagctcttccaaacgcttgacgtaggcctggcaggtggcgggcagctcgtcgaaggagtggcagtcggagatgtcttcgtcccagccgggcatggtctcgtaaatcggcttggcggcggcgaaagcggcctgatcggtcggcatatcgtcgtgacgttcgccgtccacgtcgtaggccacgcagatcggaatctccttcaggccggtgagcacgtcgagcttggtgagcacgatgtcggtcaggccgttgacctgggaggcgtaacggttgacgaccgcatcgaaccaaccacagcgacgcgggcggccggtggtcacgccgaactcgtggccctgctgacgcagccattcgccggactcgtccagcagttcggtggggaatgggccttcgcccacgcgggtgacgtaggccttggagacgccgattacgcgggtgatcttggtggggcccacgccggtgccggtgcaggcgccgccggcggtcgggttggaagaggtgacgaacgggtaggtgccgtgatccacgtcaagcatggtggcctgagcgccttcgaacagcacggtcttgccttcgtcaagcgccttgttgagaatcaggccggtgttggccacgtacggcttgaggcgttcgccgagcttcagcagctcctcggtggtctggtccacgtcgatcggacgacggttgtagagcttgaccagcatctggttcttctggtgcaggctggcctccaccttgtcgtgcagatggtcggcgttgaacaggtcatgcacgcggatgccgacacggttgatcttgtccgcgtaggctgggccgatgccacggccggtggtgccgatcttgtgcttgccaaggaagcgttcagtcaccttgtcgagtgtgcggtggtagggcgcgatgatgtgtgcggcctcgctcaccttgaggtgggagcaatcgatgccgcgggattccaagccgtcgatctcctcgaagagcacttccgggtccacgaccacgccgttgccgatcaccggggtcaggttcgggttgatgatgccggagggcagcaggtgcagggcgtacgactcatcgccgaccaccacgctatggcccgcgttgttgccgccgttgaagcgcgcgacgtaatcgaccttggtgccgatcagatcggtagccttgcctttaccctcgtcgccccactgagcaccgataagaacaattccaggcataacacacctccgcattcgcacgattccgccggaaacagactaccttacaccctctactcggggcgcggccatctcacgcaatcgggcttctggtgtctttgccgcgcgttgcgcgaggcgggccgacaccaaggcgccgccacggcgaatgacagtttatttgggtgttatctgagtgctttgccggccgagccgagttgcttgcatgcctcagccacgcgggcggacatggattcctcggccttgcggccccaggaacgcggatcgtagaacttcttttcgcccacttcaccgtcgatcttgaggaccttgtcatagttctcgaacacatggtcggcaatcgggcgcgtgaacgagtattgcgtgtcggtgtcgatgttcatcttgatcacgccatggctcacggcttctgcaatctcttccggacgggagcccgaaccgccgtggaacaccaattcgaacggcttgccgttgggaaagtcgactatgccggcggcgctgggcagctcaccctcgaccaccgcgcgcgccacacgggactgaatatcaccgagcagggcgggacgcagcttgaccacgccgggcttgtaggagccgtgcacattaccgaacgtgaaggcggccatgtatcggccacgctcgcccaaaccaaggcgacgggccacttcaaggccatcggccggcgtggaatagaggcgttcgtcgattttggcggaatagccgtcttcctcgccgccgaccgcgccgatctcgatctccagcaccgtgtgcgcggcctgcgacttatcgagcagctcctcggcgatgtccagattttccttgagcgacacggtggagccgtcccacatatgcgactggaatgtgggctcctgaccatgcgccacctgatcggcctcatgtgcgagcagcggttgcacccattcgtccagatactgcttggcgcagtgatcggtgtgcagggcgatggtgatgttcgggtacttcgcggcgacctcgtgtgcaaaagcggccaaggccagcgatccggtgacacggtcgttgacgccgatgccggaaaggtatgcggctgcgccgacggacacctggatgatgccgtcggattcggcatccgcgaaccccttcagcgcggcgttcagcgtctgcgagctggtcacgttgatggcagggtaagcgtagccgccgcgtcgtgcggcgtctagcatttcggcataacgttccggtgttgcgattgtcatggcttcattatcgctcggggtgtgcccgccagactaggttctggagccaggcgagctgtgaactatctcacgaggaacaccatgatgataatcatggcgaagccgaccaaatcggtcggggtaaagaccgcgccggcgaataggacaccggtgatagtggcggttacgggttcactggtgccgagcatggtggcgcgcattgcaccgcagcgctgggtgccgccgaggaatagccaataggcaccgaatgtgccgaacaccacggtgaataccatcagaccaatgccgaaccagtccaacgcgggggcggtggtccacggacgcacgagcggcagcagcattagaccggaaacgatgaacatgacgccgctggccatgaagttgccccatttggccattaatgcgatgggcagaatcgcaagcagtgacgtgcatacggcatcggtcaggccccacagcagaccgggcagcggcagactgagctggctgagatcgccgcctgtggcgatgagcaccgtgcccacaaaagcgagtaccacaccgatgctttcgcgtttgccgggcagccgtttgcccataatacatacgaatacgagtacaaccagcagattgagcgtctgcagcactgtggccgtgccggaattggtccagtcaatggccttcaagtaggagacctgcaccatgagcacgcagaagaacgcgcacagcaggagtctcgggtaggaacggtagtccttaagcgagttgatgaacttgtcaggcgtgaagattcctgcgcaaaccagaaagatgacaccggccaatagctcgcgcacgcaggcgatccacagcggatcggcgtgatagtcgttcatcaggagtttggagacggtggcgttgacgccccagaagacgcctccggcgagcgccagtccggcaccgacgaagatgtcgtgcggggtgtgttcgagggttggcgttggttggccattggttgcagcggtcttgggttcacacatcgcccatcacgatacgcggacgacgtgaattgttctcatatagcggtcatacggcaggaaaataagctctcaaaagagggaaaaccgttgaaatttcaaggaaaatcgatggagcggacgacgggagtcgaacccgcctctaaagcttgggaagctttcattctaccgatgaactacgtccgcatgtgcgcttccacgcacgagaggcaagtgtatcacctatgcggcaccttgcgccatgtgccggtttgagttctgtgctggactagtgaattgcgcgcgtggaatacgtggatgcggccaccggagtgccgttcatttcattggccatttgcatcaggcgtgcgatgcgctgatcagtcggcggatgcgtggagaacagtttggagaaaccgaccgcggagaacggattggcaatcatcatcgcggagacggactgggtgccggccgttttgcgcatgggcgtggtctgggcaccataggagatcttgttgagcgcggaggccagggcctcggggtcgccggtcagcagactgccgtcttcgtcggcgtcgtattcgcgagtacgggagatggccatctgaatcagtgatgcggcaatcggcgcgagaatcacgctgaggagcacgccgatcaagccgagaccgcctgaattatcgcggtcgtcgcgcgagttgccgccgccgaaatacatcagagaataaccgaggtacgtgatgacggtggccatggcagaggcgatggcggaagtcaggatgtcgtggttgtacacgtgcataagttcgtggcccagcacaccacgcagttcacgggcgttgagaatctgcaggatgccttgggtgcagcagacagccgcgtgccgttcgttgcgtccggtggcgaaggcgttcgggctcatggtgggggcgatgtagatgcgcggcatcggcttgccggccttggcgctcagttcgcgcacgatctggtagatttccggggcttcctgttcgctgacctccctggctcccatggatgcgatggcgagtttgtcggagaaccagtatgagccgaacgtggtggccaacccgataatgacgtagatgcccagcgtctgctgcctgccgcccgtggcccaccatatcagcatgatgatggcccacatcaaggcgaacagcagcgtagtcttcaggccgttgaaatggccgtgcacccgtactttggcatccatgaggctcacactaaaatcactgcctgaatattggctggatgtgcgccgaggggtgaatcggatgggggttggcggtgcttacggtgcggttggcggggatcggaatagcctgtttacatgagattgacgatgcttgacagtgcggttgcttggcctgttttaccgctttaccgctttaccaattggtctgatcgggacgctttgcttgtttggcctgctttggctgcttggatcgtttggcccatcggcctgctcgactggcatgacactggcttttatataaataagaacgctggcgtataaccggcgttcttatttatcgatgtatcaatcgcgccgattgctgctggtgcagttgccggtgcgatgagctgatagtcaatcaggccagagcgagctcacgcatctggtcgggctcgatgaccttcttgtgctcgcggccctccttggcgccttcggcgcgctcgaaggcgtcgaccttcttccagccagcgaagtcaatcggcttgacgccgcggctttccagcagtcggtcgatggattcggggtcgcgatcctcggccacgcgaccaccttcggcggccttggccagatcctcaagcatgttggtcacgatggcgagcgcatcggacttggtggagccgatcaggcccaccgggccgcgcttggcccagccagtggcgtacagacggtcgcgcacttcgccgccgtcggcctcggtggtgatgcggccgtcgccgttggcgttggccaggtgagcgccgtgctcgtcgtaagtaatgccgggagcctcggccggcttgtagccgatggcgtggtagacggcctcaaccgggtagtcggtgaactcgccggtgcggctcatcttgccgtcggcactggtttcggtgcgttccacgcggatggccttgaccttgccgtcctcgccgaggatctcggtaggggcggagttgaagtgcacgtagtacttgcggtcggccgggttgccttcgaagtcgacgtcgccgtcatcttccatgtcctcggccatctcgcggatggcgaacagttcctcgaccatctggcgggtgagcttgtccttgccggccacctcgatggtctcgtcgtccaaatcgaagtcgtcctcattgatgatgagctgcacgccgggcagcttctccatctcgcgcagttcctgcacgctgaacttggcctgggccacgccacgacggatgaacaggtgcagcaccttggccttgttgcggccgatgccctcgtacacgttgtcgggtatgtcggttctggccttgaggtcgtcggcgtcgcgcatgagctcgcgggccacatccatggccacgttgccgccgccgatcacggcgacgttctcggccgtcagcggccattcgcgggcaccggtgggatacccgtcgtaccattcgacgaacttggcggcaccgtacacaccttcaaggtcggcaccgggcaggttcagcggcttgtcctagaccgcgccggtggcgaacagcacggcgtcgtagcgggcgagcaaatcatcgagggttacgtccttgccgaattccacgtcgcagtagaggtggatgtccggattgtcgagcgtcttctcgagtgcggatgcgatgaacttgatggacgggtggtcgggggccacgccgtaacgcaccagaccgaacggtaccggcagcttctcgaacaggtcgatgcgggccttggtgccgaggccgagttcttcgcccagtttcttgagctggcgcaggaagatgtcggaggaatagacgccggccgggccagcgccgattacagcaatacgaagttcagtgttcacagattcagtcacgcgttacaggttatcgcaaagccttccgttgcaacaggggtgagtggtgggaatcctgtgcctaataccctctgccagcctcacgccagcggggcaaaaccacgagtcgatcaagaaattgccccactcacagaccgccagcggagcaaaatcgcgagtaacccgaaaaattgctccgcttacagcccatcagcggagcgaaactgcgactaacccgccaaggcaccccgctgaacacccaccagcgcagcaaaaccactattagaccgtaaaatcaccccactcgcagaccacgagtggagcaaaacccctattagcccacagaatcgccccgcttacagaccgtcagcggggcaaaaccgcgactcagtcgaggagataccccgcctagtcgcggtcgatgagggcagtgagggcccagaggatgctgaccacgtcgatggcctcttggaggaaagcgccgacgatcactggaatgaggttgaaggcggcggcaatcatgccgatggtggcgagtacgagaccagcgatcacggcctgcagcatcacgcgcttggtacggcgtgcaatggcgatagcgcgcggcacagcggcaatatcgtcattcataatgaccacttgggcgctttcggaagcagcagtggaagtgccgtcggtcatggccacgccgatatcggcgacggcaagtaccggggcatcgttcacgccgtcgccgaccatcatcgtgaccggcttgcggattgcggcggcgcggctgcatcgagaacgcgacggttgagaaccatcggaccggatgccatctacggcatcggacacagggctggcggcgtgattcgcgcgcccggccggcgcggcgcttgcctccgtggcagccttgacggcggcaaccttgtcttcggggaacagctcggcgtggacctcgtcgatgccgacttcgtccgcgatgatttcggccgaggcgtgcttatcgccggtaagcatggcgagcttggtaacacccagttcgtgcagattggcgagcgcggttttggtgttggcgcgaggtacatctcgcagcacgatgcgggcgatcagttgcccgtcaacggacacgtaggaggccatttcgtccggctgcagcataccgaatcgcgtacgcagcgtttccttttccttagtgttcccggcaatcgtacggccagatcctgcctcagtatccccgcccagaggggactgtccgtgaagcgggctgaggaggtcggccgcctcctgccgtgggccatccgcccggcttacacccgctacctcggcagtcaagaacccatcctccccggctgcagcgaacgacagtcgcccgacgcggacggcatggccgttcacctcgccggacacgcccttgccggagtcctcattaatattcttgacgaccggatattcgcggccgtggccgggccagctggcctctggttcggggcagagacgctggccgtccgcgaaacgctgacgcaagcgggccatcgcgtcggcaccggctttggcgatgcccttcgacaggatgtgtacggaatagctctctacaacgccggccatcatcagcacatggtcctcattaagacgggtctcagctccaggcagcatctcaacgcgcaccacttgcggctgcttgacggtgagcgtaccggttttgtcgaagaacacctgggtgacgcggccaaggttttcgagcacatcctgcgccttgatgagcacaccggcggcggcgagacggccagtaccggcgatgtatgccacgggcgcggcgataagcagtggacagggcgtagccagcactaacacctgggcgaaccgcgtcggtatgccggacaccgcccaggcgacgcccgctattaccagcgacagcacagtgaacggaacggccaatcggtcggcggttttcaccacggccggacgggactcctgtgcggaagcgacgagttcgaggatgcgctggtactgggaatcggcggccacctgggtggcgcgcatggtcaaggcagtggaaccgttcactgcgccagacatcactcgggcaccggcgaacacctcgcgcggcaccggctcgccattgatgttgctcagatcgagcgtggccgagccggaaagcagttcgccgtcgaccggcacggtttcgcccggcaacaccatgagcacatcgccgagcttcacctgctcgaccggcaccgtgtcgaagcggtgcgtggcggcctcagccggccagctcccctcagtctcgctccgcgagtcagctcccctcgacggcggtacttggttcccctctccaaggggagctgtcggcgaagtcgactgaggggaggacgtcgccggaaccgagcctacacgccggaagccatcggacgaatcgtccttatcagcggcagccccacaccccacgccaggcaagttgacgacgtgcgcagtttgcggtgctgcctgcatcaatgcggtcaaactgtgctcggccttggcctgcgcgtattcctcaatggcctcgccggacgtaatcatcagcatgaccgcccagcttgcccagtactcgcggacggcaacggtggaaagaatcgccactacggccagcaaatcgacgccgacttgtccgtggcgcaaatcgtcaatcatgccacgcactgtgtcaatcacaatgattgccaccagcgcgattatcagccattggcctacaccaggattacccagcaccggcatcgcaattgcgttgccccatgggcgccaatcgcccagcaatgccagcgggattgcggcgataacaacaacgggaagcatcggcacaagtcggcagatgtcgaggattttggtgaagaatctgatgagtccgctcatcattgctccttacgctcgtatacggagtcgattgcggcaagcgtggcccgcgcaatcggcgctgcggtcacgccttgttaacccaccggcggctttgcttagggcctttcggctccgcgcgaccatccgatacacggcgtaaagaaatcgtttttagttatgtgttgaattattgtgcgcatcgttcgagacattgcccgaatcagcgcttggcctaccctatcagcggcctgaacgcgacatgccgggcggcgaaactacgttggcagctcagtcggaaggcatcaatcgcccccctcctacgattccgccaagaattcccgtgcatatgaggggctcgcagcccttatgcgcctgcagctgacgtcctgccagaacgattcccgtgcatacaaaagcccacggaacaagatatctgccgccgctccggccgacccagccaaacgcttcccgcgtatacgaaaggcccgcagcaggagttgctcactgctgcggacctttgcctatctgacacggcgttcaacggttaccgctcaacgccgtgtgacgcgctgaaccagctttaccacaggccgaacgggtcggagaagccgccgccatcaccggtgccgccatcgttgttgccgttgccattgccgtaaccattccggccgttgccgttctggttgttctgcttattctggctgttaccgttggaatcggagctggacgaaccgttcaccgacgactcctcctgatcgagcgtcacgtccacatccatggtcttaccgtcgcgcacgatggtcagcgtcgctttatcgccgagagctgcggcgcgcacgaagcccagcagcgagtagttgttgttcaccgcgttgccgttgaaggccacgatggtgtcgccctccttgaggccggccttgtcggccgggccgccggagacgaccgcgctgccggtggcgctggacttggtgatggtcgcgccgccgcgagtcacgccgtcggcttcaaccgtgtcggacttgatgaccacgccgagggcaacgtgcttgaccttgccgtccttgatgatttcgtcggccacacgcttgacgaggttggacgggatggcgaagccgatgccgatcgaacccgcggagtcggatgaggtggcggtcgaggcgatggacgagttgatgccgatcacctggccggccgcgttgaaggtcgggccgccggagttgccggggttgatggccgcgtcgatctggacggcgttggtgacgatctcgttgttgttatcgtcggtcacggtcaccgggcggttcagggcggagacgataccggtggtggcggtgtcgtcgtagccaagcgggttgccgatggccatcacgttctcgccgacggcgagcttgtcggaatcggcgaattccacggccttgaggtcgctcggcgggttgtcgagcttgatgaccgcaagatcggtggtggtgtcggtgccgacgagcgtggcggaatacatgttgccgttggcaagcgtcacctgaatctgctgggcaccggagatcacgtggttgttggtgatgatgtggccttcggtgtcgatgatggcgccggagcccttggcggtgccgttgctcaacgcggtctggatggagaccacggagccggagacatcgctggcgacggtctgccagtcgggggcttcgccgctcttggcggtggcggacccggagccggacttattcgagctgacgttagacagcgaattgctggtcggcagggtgatcaggccgctggtgagggcgccgtaaccgaggcccaggcagagggccgcagccagaacggcggcgaccacggcgatgaggatgttgctcgccgtcttggacatgccctgcttggcggggccgggctgaccgggctgtcccggctgggccgggccttgaccgttcggcgtaccggtaccgggagtgccgaaaccgaacagaccgccctgctggggctgctggccattccggccattctgaccggactggctggcaaacgggttgccgttgttctgctgcggctgcgtgggcggattgaacggattgccgttgccctgcggctgcgggttattggtgtagtagggattgcggttgccctgctggccctgtggggtttgctgtgcaggctgaccgaacgggaattgctgcgtgggctgggcattgctgccggcctggccgccctgctggccctgtgcctgagtcggggtcggaccataagcgccatattccggggccggacgatacagcggagttgtggccgaggtctggcctgcggccggtgctgccggagaagccggcgaggaggagaccaccgtgctctcgcccttggcggaggcgtagtccgggatgggctcggtggcggcagtgtcggtagcggcttgcgtaggctgctgatcggcagcgagggcggccgaggaaaccggggcttgctgctcgctggaatcgctggcgttgccggcatcaaccgagtcgccacccacaaacgggttcttcggctcggcgttgccggtatcggcagtactattggggttttcgttattccgcggggtctggtcgacgccctgcgggttaaattcgtcagccattgctgctccttttcctaaattcctatcacgtctgttcggcggctattcgggcacttgcccattgccacttctcgtgtgctacctcagtagtaaaggcagtcaatctggaggttttctgaacgttgattgaaagtctatgcgtaatcatcgcagagtcttatgggcatctcggcttcgaggggctgatttcctgtttcgggaacatctacttgcacttcaaggggctgttcgcgcggtcaattccgagtatcaagggccctcatttaacgccattccgccatttttgcagccggcctacttgaccgggagccccttgaagcggaagtagacgttcgggagcggcgaaatccgcccctcgaaaccgagttcttcacaatttccggcccttttctggcccttctgcctaaagtgaacatatgacgatcagccttcttgaacatccgttgggcgcacagcccggacagcccggcgaccgcagcgccttccatttcgaaacgatcacccgcctgccatccacggccagcgggcttgggcgagacggtgcccgatacggccgcaccggcatcattcacacgccccacggcgatattcgcacgcctgccttcgtgccggtgggcacgcaagccgcgatgaaggccgtgttgcccgagcagatgaaggatctaggcgcacagtgcctgctggccaacgccttccacctgttcgagcgcccgggcgaggacgtgctggacgcggccggcggcttggcgcgtttcatgaactgggatgggcccacgttcaccgattccggcggtttccaagtgatgtcgctgggcgtcggcttcaagaagacgctggcaatggacgtgaccggcatgaagtcggacgacatcatcgccaagggcaaggagcgcatggcctgggtggatgaggacggcgtgacgttcaagtcgcctttgaatggtgacgcacatcgtttctccgccgagatttcgatgggcatccagcacaaaatcggcgcagacatcatgttcgcgttcgacgaactcaccacgctgatgaacacccgctcctaccaggaggactcggtggaacgcaccttccgctgggcccgccgatgcgtggacgagcaccagcggctgacggctgagcggctgggcaagccctatcaggcgctgtatggcgtggtgcagggcgcgaattacgaggatctacgccggcgcgcggcctcgcagatcgcctcgctggacttcgacggcgtgggaatcggcggcgcaatcgagaagcgcatcattggagacacctgcgcgtggatctgcgacgcgatgccggagaaccgcccgcgccatgtgctgggcatcgcctccgtggacgatatcttcgcgtgcgtggagaacggcggcgacaccttcgactgcgtggcccccgcgcgctgcgcccgcaacggcgcgatctacacgcgcgccggccggtacaacatcaagcgcgcccagcataagttcgatttcgggccgctggaggagggatgcgactgctacacatgccagcattattcgcgcgcgtacgtcgaccacctgctgcgcgcccgcgagttcaacgggtttacgttggccacgatccataacgagcatttcttcgtgaagctgctagacgacatccgcgcctcgatcgacggcggatactttgatgagttccgcgacgaagcgttggcccacttctacggcaacggcgagcgccggccagggttgtgagtttttctccttcgttgcggcttgtgccgaacttctctctgctcccctcgctgaggctgagacgttaagcaaacagcccagtgggctgtttgtagtcgaaggtgagacgatagtcgaaccagcaggttgcaggcaaggcccgtccttaattgcggacgagctgtcacgaagtgactgaggggagtgccgccaccctcaaagatcacggcgcccgcaggagacccacaagcgatatatccctgcctcccatgcgacacgccgaagattgcatgattacccagccgggtgtaagttagtcgattgtctgcgagtgtggcggaatggtagacgcgctgtcttcaggtggcagtgagtgtatgctcgtgggggttcaactccccccactcgcac

SEQ ID NO: 1045 - DNA, 23738 bp, Unknown
  R13_10m  MAG No. k141_895
ggctcgtcggcgaagaccacggcaggtttgacggcgagcgcacgggcgatggcgatgcgctgcatctgtccgccgctcatctcccccggccggtgcgtggcgagcgcgcgcaatcccatgcgttccagccacaggatcgccgtgtccgtggcggtgcggtagggcatgccgtcgagcattatcggcagggcgatgttttcgacggccggaagttcgggcagcagctggccggattggaagacgaatccgaagacattacgacgcagtttggtgcggtcggcgtcgctcatatggctcaggtcagtgccacggaagacgaccgtgccggcagtcggcttgataatgccggccaacgcgtgaagcaaagtggatttgccggagccggacgggcccatcacggctactgtctcaccctcccggagcgtgaagttcacgtggttcagggcgagcgtgtgcatggtcggcatggcgaagccgggctgggctggctgggatggctggccggcctgaatggcacccggtccggccgcagcgggattcgccgacgcataaccggctcccgtgccggctggcatcacgccggtgacgccgtgccctgcctgtgcgcgggccatgctggcggtgtagtccatgaccaggtcgtgcgcctcgatgaccggggcccactgctgggtgtgcgatgccggctgctggaactgttggggttgctgagactgctgaggctgagccgccggtcccgacgccggctgaggctgctgcaattgcgatgctgctgtgttcatactcccgagcgtacggagcgaacgcccagccgaccatcgggctgcggtatgaacctttctggatcaccggcccgctcctcatccgcaaggattagagatacgcagtcgacgcgacaatccatatatcagatgttcattgctcgagaagacgaggaacagtggaagaccggttcggaagctggaaccacaacagaccaagcaaaggagcccacatggccatcgcaatcgacatcccgcacacaccaatcgtgtccgtacaaaagtcgtacaacaggagtatgactacagagaataacaagaacagtcgttttgaaatgagactcacctaagagcaacgttccagaatcgaccaagcggccgagtccaaaggcatgacttcgttgcaatgggcattatcgaatctgctcgccgccgcagatcgggacatccatgaagctcatatcattcggcccaacagtaaagcgtggaatgatttcaccgcagcattaaacgaacctatgggcctacgtctgaatgaattgttggagcgtgatcccatatggacgtgaccaacttcactgagcctcggcacctgactgcgagcgaggatatttctggtttcgactgcggcctgccattggtcaatgattggctggtttccacacactaagtgcatacagcattgagcattcggaagctcccggttggctgaggcgaaatagttcgaaccccattcccgtaattttgctaggcatgatgggcgtggatatcagatttcagaccatgcacgtcgacagtcagttactccgagatgcggtacttcattctctgaacgatatgattttcggcatatccctgaatcatctagaatgtttactccgctcaatgtccacaatcaccaatgattaatggctggagaccgctatttgacgccgaccattgtctgaatcgcattcagacacaacactcctcattgcgcgcagaccagcgagttccgccgagtcggcgatgtgtctcttcggcggttgatttaggattttccgcatgcgacagctgaccacaccgctaaaaatgccattttcgcactgacttggggcggaggtcgtggcgaaacgcacgagggaacgtgtgtcatccgatatggtcatgcccgccagacattgaagcgtcctgtctatgcgcggttgatgtcccggtggcggggtcaatcgatcgacatacgaaccgggacagattcggctgtcccggttcgggatttcggcctcttttggcgaaccgggacaggcccttccatgaacacccgatatatgcaaatccaaaacaccggaattccgccattccccgacggcgaccatcgcacgatagggcgtcaggtgaatgagattctgtcccggttgcccaaaaagaggcaaaatgacgaaccgggacagcgaaatctgtcccggttgtcccaaaagagacgaaatgacgaaccgggacagcagaatccgtcccggtccacacgcggtccacacggcattacccaagtaaactcatcggcaaaacattggcccagccaacaccactaccgatgtccagcacaggccagctcgtccaggcgggcggcgaagcggggccagtcggtcttcatagcggtgaggagcttgcggttgggcacgtcgtcaatcgggacccagcagatttccatgctttcgtcgtcgtttgccttgggctcgacggtgtggccgggcttttcaaaggcaaacacggtggtgtaggcccacgggccatggtcctcgcggtaggagccgaccacctcgatgtcttcgggggtgatgttggcttcctcgtagctttcgcgcagcgcgccttcgatggacgattcgccgtccgcagtggcaccgccggggataccccacgtgccaccttcggcgctccacgcggcacggtgctgcatgaccacgtgagtcaccttgccgctcgccgggtcgcggcgagccagcagaatgccggacgcaccgttggtgccccaatgcttgcggccgcaggcgcagtccacccagccatcgccgggctgatgcacgttttcgaccggcggcagaatgccagcgtgctggttgcccgaggccttgctttccggctccagttcgccacggccgacattccacaggtcggtccacgtgatgcccagttcgccggccagatgccgggccaacggcaggctgaggccgatgatgccgtgcggatcgccctcaatgctgtcgatgaacgcgccgccgaagccttccagtgtgaacgatccggcgacttccagcggctcgccggtggcaatgtaccgttcgatgtcgtcatcggtgaattcgccgaaatggactttggcatggcttgcgccgcgcacggtacgtccggtcgcgaaatcgatcaggcagtggccggtccacagttcgccggtcgcgccgctcatgcgcttcagtcgttcgcgggccacggcttcgctgtgcggcttgccgtagcattcgccgtccaggaggaacatcgaatcacagccgagaatcagcgggccgaccgtcgcctcggtcagtcccgactgtccggcaatagcggtggcgatgggttcggtgatggtcggcatgtcgatgccggagaagtcgcgcgtggtggcgacttccgccttggaatagtcgatgggctggccagcggcggctttgcgcaggtcttcgacgacggcttcgcgttccgaatccttgatttccttggccttgagcgggtaggcaatcacgcgatcgccggttgcggcggcggcagtattggccacatcgcgatacgcacggtgaacggcctcggccttggctgcggcaagaatcatcacacgctgcttgatgctcaaatcgtcgacggtgacaccttcctcacgggcggccgcttccagcgcagcaggctcatccacgtgcgagacgcgaattgtggggcagatacccgccgaatacagcacgtcacggcgaggcttggacttggaagcaagaattagcggaatggacatgacttaagtccttatgctcccgctggcgggagctgtcgaacgaagtgagactgagggtggtctctgccggtatggcggaccactctcagaccgcctgcggcggccagctcccgccagcgggagccttctcctcgacttagcgacgctcgatttcgacgccggcggtgttgatgggcaggtgaagcacacgccagtggccggaagcaagctgctccgatgcgatctggtcgatggcttcgcgggcgttgccgtagtgcagcacgagcacgcaggggccggcaccggagacggcggcggcatagcccttggagcggaagagcgcaatgagctcggtggacggcggcatcagggtaccgcgatacggctggtgcaacttgtcctgcgtggcggtgaacagtagcgcgttggactgggcctgagcggccgcaagctcgtcagcgaacggcgattcacgggtcccgccagcgcaagcgcacgtatcggcatcctgagccggggcagcggcgacgccggacttgccctgctgggcggcctgggccagcaccatgggattcatcgcagcgggcagcagacccacgcgagacacgttgtagacggcgtccttgtatggcagttccctaggcagcgcctgacgggccttctcagtggacagctcatagtcgggcacgaacacggcggcggtgatggacgggtccaccgggtagttgacggcgtggaatccgccgtgcagcggttcaccaccaggaacggcgaccgagccgacgccttccgcggtttcgaagtcccaagagacggtcaggccaccgaacacagccggggccacattgtccgggtggccttcgatctgggcggccatatcgaagatggccggacggttgaggtcaccggtctgggcgaaggccgcggcggcggcgatgccggccacgatggcctcggcggaagagcccatgccacgagcctgagggatgttgttggtcgcttccagcgtgaagccgagtcggccgaggccgaacgtggcacaggcacggcggaaggtggagaccacgaggtgggtttcgtcgcgtgggagggtgtcggcaccctcgccgtggatgatcacgtgggcaatgccgtcgttcgggtcgtcgttgagcgtgaaagtgagctcgtcatggtagtcgagcgccagacccacggtatcgaagccggagccgaggttggcggacgtggcgggcacgcgcacgtgaacgctattgcagattgggttcatggttgttccttaaaaaggagctccccttgtcaggggagcttgggtattcagctttcaactcacgggcagccgttcgaccgcctcatcagagggagcctagacggtgtcagtccagcacgcgcaggatggacgggtcaccggtgacgaagtcgagcgcctgcacggccttgacggtgttgcgcagggtttcctcgtcggtcaggtgggtcacgatgcgcaactgctgaatctcgccgtcgtagccggggtcggtcatggtgggcttcagatcctggttcacaccgttgatggagacaccgttcttggcgaactcggcggcgatggcggccagcacgcccggcttgtcgtggatcaggaagcgcacggcgaatgcagccttggaggcggtaatcggagccttcggcagattcttgtacagcgggatggacgggccggtgcagccagcagcaatgtggcgggcttcggtcaccacgtcgcccacgacggcggaggcggtcggagcgccgccggcgccacggccgtagaacatgaggtcgtcggcggcctcggccttgacgaacacggcgttgaaggagccgtgcacggaggccagcgggtggttctcgtcgatcagggccgggtagacgcgggcggagacgccggcctcgccgttctcgaccacggcgagcagcttgatgaccttgtgctcggcggcggcggcggcgatgtcgtcggcggtgatcttggtgatgccttcgacggacacgtcgtcgatggtcacggaggtgtggaagccgagggtggccatgatggcggccttgttggcagcatcgtagccttcgatgtcgccggtcgggtcggcttcagcgtagcccttggcctgggcgtccttgagcacgtcgtcgaactggagacccttggtggtcatctcgtcgagaatgtagttggtggtgccgttgacgatgccgagcatgctggtcaccttgtcgccgaccaaggactcgcgcagcgggcgcaggaacggaatcgcaccacctacagcggcctcgaagtagatgtcgacgcccctggcctcggcggcggagtagatctccgggccgtacttggccagcagcgccttgttggcggtgaccacggaagcaccggattcgatggcggcaagcacgaacttgcgggccacggtggtgccgccgatgagctcgatgacgatgtccgagttggtggccacgctcaaagtatcggtggtgacgatggactggtcgatccacgggaacttctcggtttccttcgggtcgaggcaggcgacgccggtcagttcgatcgggcggccgatacgagcggacagttcgtccttctgctcgacaatcaggcgggcggtctgggagccgacggtgccggcaccaagcaggcctacgcgaatcggggtttcgctgttgtgagccaattcagggtccttccaaaaagttttctatgtcccacgcctattttacggattatttccgacagcagaccgaaagtactcatcaagctgacggcccttttcgtattatgacggttttggccgcacattacagactgtcaggcgctcacctctgcacgctgattactcgctgacgtcgaggttgagtaggtcgtctacggtctggcggcggagcatgacgtgcgcgccggactcgctgacagcaaccaccgccggaatcagcgcctggttgtagttgctggccatggtgcggccgtatgcgccggtagccggcacggcgagaatgtcaccgcgcttcaaatcggcgggcaactgcacctcgtgaaccacaatgtcgccggattcgcagtgcatgccacacacacgggcaagcatcgtttcagcggaaccggtgcgattcgccagacgcgcggtgtagtcggcaccgtagagtgccgggcgaatgttgtcggacatgccgccatccacggacacgtacacgcgctcggcaatcgggttgccggcactgtctttggcatcggacaagtgcacgtgcttgatggtgcccacgcggtacagggttacgccggcgggtgccacgatgtaacggcccggctcgaagctgatggccggggcgggcatgccgagcgcacggttggtgctgttgaccgcatccgccaagcgagtgagttccacgtcaatgtccattgaatcttcgccatcggtgtaggccacggagtagccgccgccgaggtcgatttcgggcaggatgtaggcgtcggtggcccacagggtcttgcgcagcagcatcatgcgcttggccgcgtgaatgaaggcgtccgcatcgtggatgttggagccgatgtgcgagtgggctccgaccagttcgagtacgtcctggtcggcgaggatggtcttgagcacggcgatggacggaccgtccgcaatggcttccatcgcggcggccagcgccttgtcggtgtcggagacttcctcgtggctcaggtcgtacgggtacttgacgtcgtagtgcagctcgcgctctgatttctcggtcttttccgcgccattttccagggaatgcgtcgcagagatacgcgcgttggtagcggcaggcgtcacgtctttgaggtcgttcagcacatcgagcacagcggcgtcggccccggcggccagcagcggcacgccgaacttctggtcctcgtgagcagtggagatgtactcgtggccgccggcgtggacaccgacggtgacgcgcagcatcacacgggcgcgtttgccgagcttgcgggcgatggcggcgacgcgctccggctcgtcgggctcgtcaatcacgattttggcgaagccctgttcgatggccagcgcgatttcctcatcggacttgttgttgccgtgcagtaccagacgacgtccgggaacgccagcggcgagggcgattttcatctcgcccatcgtgcaggtgtccacgaacatgccggcctcggtgaccaatcgcacgacttctttggacaggaacgccttgccggcaaagctcacgtgcgtagtggatgtgttgaatgcttcggcggcagcgcgcacgaagtgcctggcacgtgcgactacttcatcagtgtcgatgagatagagcggcgagccgaactcgtcaagcagcgattcggcggtacgaccgtggaatgtaatggcaccgtcggcattcacagccgtagcggccggccaaattggagaaatgggcataatcacatcttttcgggggcggtgacgccgaggaggtcgaggccgttggcgatgacctgctggacggcgtcattgagcttcaggcgggcggcggcacgggccggctccggattcttggcgatctccaaggccttgcgagcctcatcgtcgccacgggtttccggatcggtcagggccatcggcaccacgcgctctacgttgtaccacttgtgataggtggcggccagctcttcgagataacgggccaccttgtgcggctggcggtcgtcggccgcagtggcgagcacgctcgggaactgggcgagggcggcaagtacctcgccgtcggcctcggtgtcgagcagggccaggtcggcaccctcgtagctgatgccggcggcggctgcattgcggtccacgttcttggagcgggcgtgcgcgtactgcacgtagtacaccgggttgtcgttggtgtgcgaggcgagcagggccaggtcgatgtcgaagttctggttgtagtcggagcgggccagcgagtagcgggcggcgtccacgccgaccacggagaccagatcgtcgatggtcacgacgttgccggcgcgcttggacatgcgcacgggcttgccgtccttcatcacgttgaccagctggccgatgagaatctgcatgttcttgccgggctcgtcgccgaaggccgcgcacatggccatcatgcggccgatgtagccgtggtggtcggcgccaagcatgtagatggccacgtcagccgggttttcggcgcgatggcgcttgtcccagtagtaggcgatgtcggcggcgaagtaggcgaactcaccattggacttgatgatcacacgatccttgtcgtcgccgtgcttggtggattcaaaccaagtggcgccgtccttgtcgaagatgtcgccgcgggacttgagctcttcgatggcggcgtcgaccttgccgtcggcgtacaggctgttctcatggaaccagacgtcgaagttcacgcggaagtccttcatggacttctgaatctcgtcgaacatcatcggtacagcgcgcttgcggaattcctcgcgcacttcggtgtcggcctcgccgagcggttcgccgtcgtcgttcaggccttgatcctggtgggccagtgcggtcaggtccacgccgtcggactcggcttcggcctgaacacgggcggcgatctcgttgatgtaggcacccttgtagccgtcgcacggggtttcggtctggtagccggcctcaccgaggttgttggcctcagcccaagcggcgaccagcgacttggcgaagcggttgatctgctcgccgtggtcgttgaagtagtattcgcgcaccaccttggcgccgttggcctcaagcacgcgggccatggcgtcgcccaccgcggcccaacgggtgccgccgatgtgaatcggaccagtggggttggcggaaacgaactcgaggttcagggtctggccgcccagatgggcattacggccgtattcgttgaccttgttgaggtgcttgtcggtgtcggtcacggcaccggcggcgagtacggtgtccaccacggcggcggccgaggcggagtcgagcgtgatgttgatgaagccggggcctgccacctcgaccttggcgatgccgtcggcttcggcgagcgcggcggcgaacggctcggccagatcgcgcggcttcatgccggccttcttggccagctgcatggcgatgttggaggcccagtcgccatgcgcgcggtccttcgggcgcatcacggcgagcttgccgacgggcgggatcagctcgtcggtcaacgcgccggcctggccggcggcgacgaggttgtgggcaatgctggaaatcagttcacttaaggcttcagggctcattcttctaaggataccggcgacggcgacaccatgccgcgtccggtcattgtcggcggccataatggaacgacgcgcgaaagaggtgcatatggccgggctcaacccccaatcattggtcacgttgtggcagatcgaacagtacggttcgttctccgccacggccaaggccacgggttggtcgcagccggccatcagccagcagatcaaaaagctggaggcacagtgcggttcgactctggtgcaacgcacctcgcatggtgtggaactcaccgccaccggttcgatgctcgcccgccacggcgaggccatcgccgatcggctggagcgggcggcccgtgaggtcgaggattatcggcatcatcggtttgctcacctgcatttggtggccccaccgtcaatctgctctactatcgcggcccgtaccgtggtcaagctcagtatgttcacggacatcgagctgagcctgattcagatggagccgccggaggcgatcggtctgatttcccaaggcaaggccgatgccgccgccgtgttccggtacagcagcatcccgaacttcctgcacatcggcgacgatctgaccttccagtcgctgggttacgatccgatgcgattgttggtccgccgctccagcgacatcgccaaacgattcgaggagaccggcgaacccgtgccgctgtccgccgccaaagacgagcattggatcgccggctgccccacctgccgcgcaaatttggtgaaactggccacccgtgccggattcaagccggatatccgccactgcacggatgattactgggccacgcagaacctggtcgaggttggcatgggcgtctcgctggtgccggcgctcgatacgcatatcaacttgcagggcgatctggtggcctgtcccatcgccgacgattttgcggcgcgcgaggtcggcatcgtgactcgtgccggcgaccatcgtcccgcgctcggttcattgctcgaagagctcgagcgcacgtcactcaaatatttgagtgccaagtagtcggacagcgataagcaagcttgcgaacgccatcacgatttcggggagccagaccgttgagcggcccttctgcaccgggaacaatggcatgttatgagcatgaacaacattccccagtcaacgactgtgagcaacgtaaccgccggcgcctcttgctttgatgccaatcacatcgacgtgacgaccatcgaggatctggagcaggtcggttcggataaatggacccgttaccccggctgcatcggcgcattcatcgccgagatggattacggtctggcaccatgcgtggccgaagccatcgaagaggccaccgaacgtggcgcgctcggctacattcccgacccgtggaagaaggaggtcgcccgctcgtgcgccgcatggcagcgtcgatacggctgggatgtggatccgacgtgcatccgtccggtgccggacgtgctggaggcgttcgaagtgttcctgcgcgagatcgtgcgcaccggtaactccatcgtggtaccgactccggcctatatgccgttcctaagtgtgccgcgcctgtatggcgtggaggtccttgagattccgatgctgtgcgagggcgccggcgagagcagcgggcgcaatgatgaatggctgttcgatttcgacgccattgagcaggcgttcgcgaacggctgccatgccttcgtgctgtgcaacccgcacaacccgatcggcaaggtattgacgcgcgaggaaatgctgcgattgtccgacctggccgccaagtacgacgtgcgtatattctccgatgagattcacgcgccgttcgtctaccaaggccacacgcatgtgccattcgcctcaatcaaccggcagacggccatgcaggctttcacctccacttcagcctcgaagtcgttcaatattcccggcaccaagtgcgcgcaggtgattctcaccaatccggacgatctggaactgtggatgaggaacgcggaatggtccgagcaccagacggccaccatcggtgccatagccaccactgcggcctatgacggcggcgcggcatggttcgagggcgtgatggcatatatcgagcgcaatatcgcgctggtcaacgagcagatgcgcacgagattcgccaaggtgcgctatgtggagccgcagggcacgtatatcgcgtggctggatttctcgccactgggcattgacgacccggccgactatttcttcaagaaagccaatgtggcgttgacggacggccgcgaatgcggcgaggtcgggcatggatgcgtacgcatgaacttcgccatgccctacccgctactggaggaatgcttcgaccgcatggccgccgcgctcgaggcggacgggctgttgtaaaaaattgtggctcccctcagagaggggagccaaggaacggccgaattaatcgaagtcggcacccaacgcttcgagtttgccgcggaagtcggcgtagcctcggtcgatcaggctgatgccgtgcacgtccgaggggcctgacgcggccaaggccgcgatcagatggctgaacccaccacgcaggtccggcacgtcgatgtcgcgtccggtcagcggggtcggtccgaagatcacggcggaatgcttgtagttgcgctgccggaaacggcacggcagcgagcccaggcactcgcggtacaactggatggtggcacccatctcgaccagcggcttggtgaagccgaaacggttctcgtacacggtctcgtgcacgatcgacaggccgttggcctgggtcagggccaccacgagcggctgctgccagtcggtcatgaacccgggatgcacgtccgtctcgatcgccacgggcttcaagtccccgcccggatgccagaaacgaatgcccttgtccgtcacctcgaatttgccgcccaccttgcggaacacgttgaggaacgtgatcatctccggctgggtggcacccttgacgaaaatgtcaccgtgcgtggcgagcgcggcggacgcccaggacgccgcctcgatgcgatccgtcagcgacgtgtgcgtgtagccttgcagctccttgacgccttcaatgcggaaggtgcggtccacgtccacggaaataatcgcgcccatcttctgcagcacgcataccaaatccatgatctccggctcggtggccgcgcccgacagttcggtcttgccctcggccagcacggccgccagcagcgtctgctcggtggctcccaccgacgggtagggcaggtggatcttcgcgccatgcaggccgttgggcgcggtgatgtggatgccgtccttgtgctccttgtccaccgtggcgcccagcttgcgcagcgtctccaaatggaagtcgatcgggcgcccgccgatcgcgcagccgcccaatgcaggaatgaacgcctcgcccagacggtgcacgagcgggccggagaacaggatcgggatgcgcgaggagccagacagcgtatccacgtcagccacatcggccagctgaacatgagaggcatcgatagtcacaatgcccttttcgccgtccacatccacgtccacgccatgcaggcgcagcaaatcggacaccacatgcacgtcacgaatctccggcacgttcttcagcaccgacttgcccggtgccagcaacgcggcgaccatcgccttgctcacgaagttcttcgcgccacgcaccttgatcgtgccattcaaaggcttgccgccctcgacatgcaacacgtcatccggattctcagccacgccactctcctcaatcaatcaagattcaaaaaatgctaccgtccagtttgccataagccatgtgccgactccgtgaaatgcaccccagccgaactttgatcaccgtgcacaacggatcccataccccccgtcgaatcaaaccgataacgtgatcttcctcacatttgccgccacggtgttctccatacttctacgctacgattcagggcaatggcatcagacgccatggccacaagcaaaggagcattcatgaccacagtcgccgtcatcggctgcacgcacgccggcacgttcgccaccacctcgattctcgccgagcaccccgattggaccgtccatgttttcgagcgcaacggtacgctgtccttcctctcctgcggcatcgccctgtgggtgggcgaccacgtatccgacccgaagaaaatgttctactcctcccctgccgctctggccgaagccggcgcgaccatgcatatgcgcaccgacgtgacgtccgtggacctcgacgccagaaccctcacctaccgcgcgctggacgaggccggagaccccgccgaacagaccctcgctttcgacaaactggtcgtgaccaccggctcgcgcccggtcatcccgccgatccccggcatcgacagcccgcatgtgctgctgtgcaagaactgggatcacgccatcgccatcaaggaaaaggcgaaaaccgccaagtcggcagtggtgatcgggtcgggctatatcggcgcggaaatcgccgagcagttcagcgtcaccggcgtcaagaccacgctggtcgacggccttgatcgcccgctggccaataatttcgataagaccatcaccgatcaggtggcggccgcgttcgaggagcacggcgtcacgctcgcgctcggccagaaggtggtcgagttccgcgacaatgacgacgacaccgtcactgtggtcaccgaaaagggcgagtacacggccgaaatggcgattctggccgtcggcttcctgccgaacaccgacctgctcaagggcaaggtggacatgctgccgaacggcgcgatcgtggtcgacgactacatgcaggcgtccgcgccgggcgtgtacgccgccggcgactccgccaccgtgttctacaaccccaccggccagcacgattacattccgctggccaccaacgcggtgcgccagggcctgctggtgggccgcaacatcgagacgccgaccgtgaagtacatgggcacgcaggccacgtccgccgtgcagctgtacgatctctcgctcgccgcctccggcctgacccgcgccggtgccgaacgccgcgggctcacggtccgcgagacctcgctcaccgaggattatcgcccggacttcatgctcaccaccacaccggtcacgtcgatcctgacctgggatcctgagactcgtaaggtcaagggtggccagttctgttccaaggccgacatttccggcgcggcaaacgtgatttccatggcgattcaggccggcttcaccatcgaccagctcgccaacgtggacttcctgttccagccgaacttcgacaagccggtctactacgtcggagccgtggccatgaaggcggcggccgagtaagacggctgtacccaccgcaaaaaagaaaccccggcgtgatgggcgccggggagagaaaggagagaagaagaaagaggttaagttatgcagcttgttcggccgtgattacatataacagcaacagtttcaatgcaacatgggcactgtctgggaatcgtctgggaatcacggcccgtacaggctgttgcttgtttttggagccgatttaccggctggccttgatcttgtgggccagttcggcgtcccacatcgcgccggtggcggacatcaccgagtccgcgccggcgtcacggtacgcctggtagtcggcgggcgagaccacgccgccgacgccgttgatcgcgaaatcgagcccgagcttttcacgaatcgcggccagacgggcgaccatgtcgaggccggcgccacgaatcgcattgccgcacacgcctgagtgatcgcggcccgcgccgggcagggcctgattgccattggcatcgaccagtttggcggaaatcgtattgatggtgctgaagccctgcacggtgccgtggcccacggtggaacgcaccataagctccagagcgtcgtcgctggggatgtaggcgagcttgaccatcagcgggatgtcgccgatctcctgcttcacggcctcggtgatgcggcccacgagcagcggattgtggcatagcaggcggttgtggccctcgttggggcagctggtgttcatcaccatgagcttggcaccggtctccttgaccaggcgggcggtagtggcatggtcggcgatgtattcctcctcgctcatgccctccacacgcgagccttggaagctcgggaccagcacttgaccgggaccggcggcctcgatggcggcgcgcatgtccggctgccagacgtcagggctctgcgagggcacaccgaagctgttggagatggaaatcggctgttcatagttggtgtcggccagcacgccttcgtccagttcggcgctgcccggcgtcagtgaaccgtccgccgacttggggtgtacggcgagcacgttcgggaacgggttgcagccccaggcgcgcgaacgcacggttttgtaggtcgccagatcgaaacccatgtggaaagcggccgtggtgaaacggctgttgagcagcgggcctgcgggaatgccgaaaggcaggttgaccggctggcccaaaaaggtggccaaggcaccctcggaggcaccctcgctggtggttccggcggcatcggcaccgttgccatccttcagcgcctcggcgaacgcgccgaacggcccttgctcatagttgtcttcgtaactgcggctgacatcgtaaaacggctcaaaatcactcatgcttcaacgataagccaacctgcatgcgcacacgcacactcaacccatcatcgcgccgacaaacgaaataatggcgaaagcggcattggctaccacaaagatgatgaacgtcggagctgcccagccaaagtacgtgtctggaatactacgattcgtacggtgatattggcgcatctctttgccgtatatcacgaatatgataatcgatccgatcacgccgatcacagatagcgacaatgagaatatcaaatatgcgttgtcatcaagatagttgccggcaagggtatcgatggcgccggaaagaatcgcattgttgaagatgtgcagtgcaatcgaccaaaccaacgagtattccatggccacgaatcccagaatcaggccaaagaggaacgcgaatgtgccttgcactacgtcgtcatggaacaggccgaacaccattgccgaggtgacgatggcgaagttcttgcccaacggcttgagctccttcatcagtacgccgcggaacagtacttcctcgcaaatcggagcgaccagcccaacgtacagccacatgcttacggtgacgctggattcggcgatgctgtctgacgtgggagaggcaagatcggtgcccagcatggaaaaagcgacctgcaccaacataacgatgccttgcacgcccatgcccagcacgatgaacatcaacgcccagagaggctgcatgcgcccgccgccatattggctgatgtggccaagctgattgggctccccgtacgagtcgcgatgctggccaccaagccagaattcgcaggtgaagatgtcacggtggcgcatgagcagcagaaatccgaacgcgacgaacaccgatatcaggctgatgatgccatcccactgcacgccggacaaatcgctcgcggttattacgccgacgataatggtggcgaccattgcgcccaagagcatcatgccttcataggcgagagtcagtcccattacacgattgaccaccttgcgacgccacgtgcgccatacacggcgaggatcgatcggcatgaccacgggcattgctgcgggcatcgtggcaggcattgcgttgggcattgtgactggcattgccggagccgtttgcacgaatggttgcggcgcagcggaatagggttgtggcgcgtagcccactggttgagcgtagtacggatgagcgaggggctgtggagccgactgttgcgccgggtatggggaataggcggattgcgccggatacgtcggctgcgtgggatacatcggctgggcaggatacgtaggttggacgggatatgtcgggtatacgagctgcgcggcgtattgtgcaggctgcacagcaggtattgcggcttgcggcacaggttgtgaaacaccttgtgaaacaatccgtgaaacaccccgtgaaacatcttgtggaggtagcggttgtgcccatgcctccggctgacccgcatattgcggctgcatgctcggcccaggctgaacatactgtggcgtctgtggcatcggcgtctgtgactgtgccgcagactgcggtgccggtcgaggtggcaacggttgcgctgacagcgattgcgccggagccgtatcggaatcgttcgacggattcatgtcattcatggtcatgatgctcaacctaaccgtcattactggatgaatcgtgattatgtccacaaatgtgtacgaattcaggcacagtatttcgaacgctaggacggagttcatgagtgttgaggaaagcgccgccacgccggtgttggtggctgcggtggataacgaccgtatggcgttgttggcactgaagggaatattgccgcaactcctgcccgccgcgcaatggatgtggggcgcgggcaccagtgagacctttgtttgatgcgatgcgagcgacccaataatctcaatcagacacagagccaacggccccgggcctgcaattatggactcgcctttcggcgaggctcaatgctggcctcgctgctgtcgcagctcggcacagggcctgctgaaagcccaccgggctttcagcaggccgatcgcggctaaataatgccgcgatcggccaacggccctgtccagtctgcgtcctcaggctcgcgggcggactcgattctttcttcggcccagtgtttggcggggatggtcttgggcttgaaggggaacttttcggcgcgcatcttttcgtaggcggcgatgtcgtcctcgtgctgcagcgtcagatcgatatcgtcgtagccgttcatcagacgccaacgcacgtaatcgttgacctcgaacggcagggtcacgtcgctgcaagtgacagtgcgggtctccagcgagacagtcatctcacgaccaggctcttcctccagtagcttccacaggagttcgacggactcctgcggcataatcgcggccagcacgccgttcttggcggtgttgccgtagaagatgtcggcgaagctcggcgcgatgaccacgcggaaaccgtaatcgtgcagcgcccacacggcgtgctcgcgggaggagccgatgccgaattcggggccggcgaccagaatctggcccttaccggcgtattccggcttgttgagcacgaagttcgggtctcggcgccatgcgtagaacagggcgtcatcgaagccggacttggtcacgcgcttcaagaacacagcgggaatgatctggtcggtatcgacgttggagcggcgcagcggcacgcccacgccggtcagtgtggtgagtttttccataacaattttcctttcggggatctctcccccagtcagtcttcgactgacagcccctcgtcagagggggctcacgtgtattgactcagagatcggcgggagacgagattgtgccgcggatggcggtggcggcggctacggccggcgacgccagatgcgtgcgcgagcccttgccttggcggccctcgaagttacggttcgaagtggaaatcgagcgctcgttcggcaccagcttgtccgggttcatgcccaggcacatcgagcagccggcgttacgccattcggcgccaaagtccttgaacaccttatcgaggccttccttctccgcctgcaaacgcacgcgggaggaggccggcaccaccagcacgcggtggatgttctcggccttgcggtggcccttcataatcgcggcggcctggcgcaaatcgtcgatacgaccgttggtgcacgaaccaatgaacacggtgtccacggcgatgtccttgatcggcatgcctggcttcaaacccatgtatgtaatcgcacgttcggcggcggcgcgcttggtggcgtcggcgatcttgcccggctccggcacggaggcggtgatcggcagaccttggccggggttggtgccccacgtcacatatggaccgagcttggtggcgtcaatatccaccaccttgtcgaatacggcatcgtcatcggtcttcagcgtcttccagtacgccacggcctgatcccacagctcgccttccggcgcgtgcggacgacccttcaggtactcgaacgtggtctcgtccggcgcgatcatgccggcgcgcgcaccggcctcgatggacatgttgcacacggtcatacgttcgtccatggtgaggttgcgaatcgcctcaccacggtattcgatcacgtaaccctggccgccgccggtgccgatcttggcgatgatcgccagaatgatgtccttggccgtcgcgtccgcgggcagcttgccgttgacgttgacggccatggtcttgaacggcttcagagacagcgtctgtgtggccatcacgtgttcgacttcggaagtgccgatgccgaacgccagcgcgccgaacgcgccgtgcgtcgacgtatgcgaatcaccgcacacgatggtcatgcccggctgggtcaggcccagaatcggggcgaacgcgtggacgatgccctgatcggcgtcgcccagcgggtgcaggcgcacgccgaactccttgcagttcttctccaaagtcgtcaactgcaacgcgctcgtctcatccgggttcgggcgatcgatatcaacggtcggcgtgttgtgatcctcggtggcaatgagctgatccacgtgacgcggcttgcggccggccaagcgcaggccctcaaacgcctgcgggctggtgacctcatgcatgagcatcagatcgatgtacagcaaatcaggagctccgtcgctgcccttgcgcaccagatgatcggcccagaccttctcggccagtgtcgttcccatagtgattcctccaaaaaattccgcgcgaggtattgtgttcgcgccttgttcgtggtattagcctatgtgcttgcgatgggcccggccatgagcatgccggatattgagatacggtcaaatgatggcctcaatatgactcggacccgactcgaacatgacctagtcatgactcggttccgctccagacatgtctcttcggcatccacgaacgccctttcaacttcatggccaccctgtgagacacttccccaatttgccatttcactatgtgagatggcataatcgcccttattatgactgattcccgggaagaaccattgaacaacagcttgaccgagtccgagccggttgaagacaccaccgccaaggacgatggggaaatccattccggcgttggcgtccttgataaaaccgtaaagattcttgacgcactggaatccggcccgtccacgctgggccagcttgtggccgccaccggtctcgctcgaccgaccgcacatcgtttggctattgcactggaacgccaccgtttcgtactgcgcgaccagcatggccgattcgtactcggctcccgtttcgccgaacttgccgccgcagcaggcgaggatcgtctgctgaccgccgccggcccgatcctgcagaccctgctcgatcgcactggcgagtctgcgcagatttaccgccgccaaggcgatcagcgcgtgtgcatcgccgctgtggaacgcacctccggcctacgtgattccattccggtgggtgccatgctgtcgatggaagccggttccgccgcccagattcttctggcttgggaggattccgaccgtctgcaccagggattgcgccacgccaagttcaccgccaccaagctggccgccgtacgcaagcgcggctggtccgagtccgtgaacgaacgcgaagagggcgtgtgctcgatttccgccccaatccgcaacgcctccggccaggtcatcgccgccatctcgatttccggcccgaccggccgcatgggcgccgcccccggacgccgctatgcgccgctggtgatggccgccggcaagtacctcaccgaggcactggtcaaagccgttcgctgaaacataccagtcaatccaaccgatagcccaaccggcagaaatcccgcgtcacaacgaaagagacgcgggatttctgggctataggaacaagagtgtggtgttcgcgcaggatgggcaagatcgggtagccggcggtggcgatggtgacggacggtccgaacatcgtgtagtcgccgatccatatctccgcgtcgtcgaccatgctcatgaacgcgttgatgtagatgactttgccgaggtgtacgcgacggcatccgttgctcgcatgcaatggcgtttcgatgtgcacgccgtcgccgacttcggcgcacatgtctttgagcagttcggcgcgccgctcccgttcggcgggtttggtctggttgtattcccatagtttgttctgccatgcgagctgtccgtccatgatggccgggtcgtcgtagtggtatggcaatcccgcatccctgcgcgccgtattgtccatgtcgtagtcccttccgtatcggttcatcggtctcggcccatcccatcgtcctttgttcgggccggaacgcacacggcctttctcaccagcatgaggccgcccgcgctgaccgattcccatcgcaacgtcgccgcacgcccccacggttccgtttcatcgaggtcaaggccgaagacgggttggacatgcttgaagaacttggaggcttgtcggaggaagccgagagccgcttgacgaagctgaatgagaccatatcctcccccgatatcggtttgggttcggattaccatgtcggccctgcgtatttcctgaatctttccaaatccgaatccacggcgaaagcgttcgatgacctttggcgtgatttcctgcaaccgctattgcacgattacgtgcgcggcatgtataacgaaacagaaatcatggagaagctgaaagcggcatatgaagatgcttcggattcgccgccgcgagtgctcgcgcatgggcgacgccgtcgtctccctgctcgactcccccatgttcgcaggccgccgcaagatcctcgtcgggttctcccagggcggctatatgtcgtatcgcatggtgctcgagcatccgcacgtgttcgacgcggcgatcctgatgagcccgtcgttcaagggcgaggagtcgacggacctcaccggtttcgactcccccacccgtttcctgctcttgtacggctcgcgggaccgcacgattccacctgcggaccagcagaccgcgcgtcgcgtgctcgaggccaccggccggctcgaataccgcgagtatcctggcatgggtcagccatcgtcgacgaggagatcggcgacatccgcgccttcctcggtctctagccggttccggacggaccgcccggttccgctcggtccgtccaccccgccatccgaccatccgtcacacacgtcacgcacccgtcaccgcccgcaatcggtgtcggcggcacgcgtcgccgccgtcacccgccgaggctgcgtccgatgacgccgaggaacgtttcggcaccggcacgcatgttctacggttgcacaggtttcccgaattgcgggtactccaggccgtgcaggtgatttcgacgtgaacggttcccgccgcgtagactgttttctccggaccaggcgaacctcctgcgtcgcaccccgaatccgtccgcaacggctggcatcgccatgccggaccttgatccaatcacacccgca

SEQ ID NO: 1046 - DNA, 22465 bp, Unknown
  R13_10m  MAG No. k141_1444
atattcctgcgtagctcagttggcagagcatccgactgttaatcggacggtcactggttcaagcccagtcgcaggagctcacctgaacgggtaactccggacgggatgaaaattgaatattcctgcgtagctcagttggcagagcatccgactgttaatcggacggtcactggttcaagcccagtcgcaggagccatcgaaagcctcggttctccgaggcttttttattttcatcgcattggtgaccagacacgacaccccatcatcaaccgggaaatccatggcgaagacctcaccactactcacatcaggcagacaggtcactgtcaattcaccgatgagaggcacggtattcccagtatcagtctgggaataccgtgcaaatcttacatcgagaccttggtcaggggcatggcggagtcgatcgggaagtcgggggcgctgggggccacgccggcttcgaccaagttcacgccgagcatggcgaccatggcaccgttgtcggtgcagagcttgatttgcgggatacggacgtcgacgccgtagttctcaccgaattcgagcagtttggcgcgcagctgcgagttggcggagaagccgccgcccacgatcagcgtgttggaatcgtactgccggcagccgcgcatggacttacgggctagcacggtggccacggagtcggccagggatgcgcacacgtcgtccaccggaatctcatggccggcggcctgctcgctttccacccaacgggccacggcggtcttgacaccggagaaactgaaatcatacgggtgcgcggcaccggccttgccttgggtcagacccatcggcaccttgatggcgtgcgggtcgccgttttgtccgtggcggtcgatgtgcgggccgcccggatacgggaagccgagcagacgggcgactttgtcgaagcactcccccgccgcgtcatccagcgtggtgcccaccacatcgatcttgcgcggcatgtcctccacatgcagcagcgaggtgtggccgccggagacaatcagagccagcgtgtccttggggaacgggccgaactgcagctgagtgacggcgatgtgcccgatcacatggttgatgccgtaaatcggcttgttcgcagcccaggccagcgccttggcgccggacacgcccacggccaggcaaccggccagtccaggaccggcggacacggcgatggcgtccacatccgccaacgtcatgttcgcgtcggcgagcgccttggacacgcatggcacgaaggcctcagcgtgcgcacgggaggcgatttcggggatcacgccgccgtatcgcgcgtgttcctccatggatgaggccacgacgttggagagcagttcgcggccgcgtacgatggcagccgcggtttcgtcgcaggtggattcaatgcccagtacaaccggttcgctcatcgtgcttctccgttcttctccgtttgcttgccagtgatgtcttcagtgtccgccgatgccgtctgcggggcggcaaagcccacgaccctaggtttcaggtccaggctcatggtgtatgcgtcgatgccttcaggctggtagtagcgtttgcgcaatcccatgcgttcgaatccgaaccggtgatacagggccagcgcagggtcgttatccacacgcacttcgagcagcatgcgcgcggcgccctgacgcttcgcctcgtcgaccagtgcctgaagcaacgcagcggcgatgccttgccgctggtatgccttgcccacgccgatggtcatgagctcggcgtcctcgccgtcgtaccagaagccggcgtagccgcgaacaacagtctgttccgtctcgccaaacacgtcgagcagatatgtgcgggtgggtgcatccagttcctcgcgcaccatgttctcgttccacgcgccacgaccgaacagttcgccttccaactgtgcgatggagtgaaccgcaagatcacgacttacggcagtgatgtcaacaatcatcgaatcaacccgtctcacgccttatcggcgccggcatggccgagcacgtgcttcagcgggttcggcacttcggcgtccggccggcgcaggtacaacggttcgaccggcgtatcgggattacggttggcaaccagttccgcatcagtggcaaagatagcgagaccttgctccccttggtccaatacggattcatcggtgatgtcgccaagctgctcgattgcacccagcgcatccgcatatttgcgggccccatgacccacaacatccacgaccacatccacattgctgtcttctggcataagtccgtcgcggtacgtatgaacggcatcattcacgcgctgcgcgatggatgcagggtaatcgatatccatgtcaatcagagccgtcgccacggtttcgccatcgggatcgccaacgagcgggtccgagtacaacgcaaaatagagttgcttgcggcgtgcgtcgtttacggcaagagtgagcacatggcatttatgagtatcgccgagagtgccggctttgccacggcgaatgagattccattgcacctgaggctcaagaacattatggccgataagcgtcgctcccgttgcgaaagccagtgccttggccgtaacgataccggcacgcagaccagtaaagggggctggaccggtacccacaatgactgttgcaatgtcagatgctgggaacccggcctcctcgaccgcgcgcgcgatattgacctgcagtttctccacatgggtgcgcgaatcggtctctacaatgggatcgcgccccacaatgccgaccgtcgagccgaatgaggtgtcaatcaccaacgtgcaacccatgaatcctcctagtcgtaaagcctctagagagtgtacatcgaggagtctataggcgcatggcttactgcagatcgaacgcggcccatcgcttgccgactgggacgaatgcgacggtacgagtgccgttgctggtgagttcgccgtctgatccagcggatgcggcatcggaggaatcgagaggtcgatcgatatggatttcaagtcgttctggcgccaaggcggtggccatttgttcgccccactccataagcaccaccgtgttctcgccggggtcttcaagttcttcgtccaatcccagcgattccagctcgtccaacaaacgcccgatggcgtcctgccccggcgcataggctgagccgcccagacggtaggcatccacatgcaccagatgagacggagtgccgtcggcgaaatgcccgtcgagttcgcgggcaatggtgaatgtaggagacacgatgggttcggtaatgcccagccccgccccgaagccctgggcgaatgtggttttaccggcaccaagagggcctgagagcagcaatacatcgccgccgtgtaccattccggccacacgacggccgagctcctgcatggcctcgctggtgggagccgcaatagtgtgttcgctcataaatacccctttatcgacttttaccgacctttatgactgatgtcttcaatgcagcgttccagcgcatataccgggtcgccaccgtttgttttgctttgctcatccgcccaggcgagcatacggatgcaatgcgcgagtcctgccgaagtccagccgccaagttggcgcatcgcattcttcagcacccaaggattggttttcgcttcggcctgggaaatcgtgccggcccgtaccgccgaggctttggcaatggtacggagcttcatggccaacgcgccgatcagcgcgatgggatcggtcccttgttccacagctgcacgcatcatgacgatggcttctgcggttttgccttccacggccttgtctgccacggcaaaaccggtgacctgcggattggcggtcaaatactggttgacacggtcgaggcccatcggattatcgtcaaagtcgaaacacagttgctcgcacatggcggcgagttcgccggttttgccgccgagtacggataccagctgctgtgcggccatcggttcgactctacgaccacgtttctcgaattctccgagcacgaaattgagctgtgcatccggtttcttcaaatccggcacgtcctctttgcgagcgccggctttcaccagttggtcgatgattttgcgccctttgacgccgccctcgtgctggcagatcaccacgctggagccgttcggatccttggcggcctgcttggtgtacgccaccagagcttcagcgagcttgtcgtcggcattctgcaggttgacgagtttgaccacggcaacgtcggaaagcaacgatgggctgacggcttcatcgaaggcatactggtcggccgatgcggcgtcgagttcgatgaggtcggcgtcgggccgcgccttcaacgcctgcgcgcacagtgccttggtgcgtgcgtcgttcaaatacgagtcgcctccgggcaccacggttaccggtgcattcgctgctgttttcgtcatgcccccatctcgccacacaggttggacaatgacctgccggcatcacgattttgccggtgccgtcaagatagtggtattcggctgggattgcgatggttgctgcaccgaataccgcattggctattcggcttgccgccgcgtaaagaggcgtctcgtctcctcacaccagagactgaggcggacgcgccaagcggaaccgaagcgcacgccagacattccggcctcataacgacggacatgctggaggcaacggctgacgaacaccagtagcatgccgataccgatttccgccgccacaatcagcacggcgcccgtaacgccgtctttccatgggatgacggccatcgtgctgccgcccagccacaacgccacccgttccatcaccagcgtgccccatgacgatatccacgcgaatacgccggccagccatggcgtgcaccatgcgcacgtcagtgccatcaatcccgccatcgtggccaatcccacgaacggtgacaccagcaggttcgccggcacggacagcaacggcaattccggttccatcaacacctgaatcggcagggtgaacaattgcgcggccacggtcatcgccatcatctcggcgatgctgtgcggcatcgctcgctcaaagacaccggccagccgccccgcaaacagcacgatacccagtacggcggccgaagacaaggcgaatccgtagctggccgacatatccgggttcaccgccaatacaccgattatcgtccagcatagggcgctcaacgcttgcgtacgccgtcccatcgcatacgccaacgcacctatcaatcccatgatgaacgcgcgggtgaccgaatcactggggaacatcgccaatgccagcagcgcatatactccagagaccagcaacgccgtcagccgccgatcaagcagcatccacatgcataaccgacgcaccagtcccgccaccagtacgaagtggccgccggatacggccatgaggtgcatgatgccggaccggcggaactgattttccaacgtttgcgcatacgtgctgttgaccggcatcggaccggcatcgccgccgatataatcctggccaagcacacccatcgtcaatcccggcaccaacacacgcccctgatcggacaattgttcggtcacggtgaaaaacgactcctgcatatgtgcgatcgcggcgagatgccacggcggagcccgcacctgcgctaccggctgttttccttccaagagcagccatagcggtatgcgtccatatcgcgcttgctgcaatacgcccgtcaacagatagaccgcgcctcgacgcaactgcccacaatacgattcatcggcgtatacgcgcacggcgaccgtggaacgtacgtccgcgccatccacagtgatgccgctcagccgtatgtccgtctgacaatcgtatgtgcgttggtccgaagcgatcacgggcgtcgtcaccgtggccatgacttcgtggtatgaactggattggcgagcttgtgcggaggcaggatcatgccaggcaatggtgtccgacgcgattgccgccatactgccgatgcacgccaccgcaacgcatacggtcaatgttcccgtccacctgatccgcaggcggaaagacaccacgatcatcgccgccacggcagcacatgacgccactgttataggtaatattcgtgtgacaggccattccatgccgattatggtggcgtcaatgccagctccggcatcggcctttgcctgaccggtgccgagtccatcagacatcctccatgcgaataatgcgtgcgctcccagactcgccgcccacatcactatggcgatcggcagcatcctccaatcgcggctcccctgctcgcgcagtatccgatccctgctcatccgaccgtcacctgccctcgcatggtctccaacgtcttggagccgatgcctttgacatccagcagctgatcgactgatgcatacccgccaatcgccgtgcgatgatcaatgatccgctgagcggtaaccggcccaatacctttgatggattgcaattcctcagcggtggccgtgttgaggttgatgagaccatgcgtggaagcgccggcatcgctgccgtccgtctgcatgtgcggagattgcgtggtatccgattcggggttcgctgtggcatcggaatgctccgactgctgcggatccgtgcgtttctcgtccgtggtgttctgcgatggcatcgtctgatctccagcggagccgcccgtggtctgcatggcggtcggttgagacagcatggccatattcatcgactgctggaccagcaatgccaagctgatgccaagggcgacgatcagcagcaatatcacggccaaggcatgcccaatggtgaacgacaatcgcggctgatcccgggtgagtctggctgattctccgacggcatcggcggaacgtacgccaatcagatccgataacgcacgtttgtcacgggtcgcctgccgcaggccgctctgcgccctttgggacgggtggccggccggacgaatccgtgcatggccgggaggcggcggaggcgtcgtgggccgttccactcgcggttggggcatggcttcgctctgcctgctgaatgcgcgcaaacggttggcggcatggtctgcgcgatggttatgagaaacgcccatgcatccacgctgatggattcatgggcgtttgtccagctgaaacggggtatgtggttctagcttatgaagttatccacaattgaggtggggcgatatcgcacattggctacccctcagtcagctacgctgacagctcccctgacaaggggagcttagatggaatcactccgcggggacgatggagacgatcttgggggccttgacgatcaccttgcgcggctccttgccgccgagacggtcggcgacggcggccagcgcctgccgttcgaggtcggccgggtcgatgtcgaccggcacttcgagcttggcgcgcaccttgcccttgatctgcaccacggcggtcacggtgtcgtggcccacgtaacgctcgtcggccaccggccacggctcggcggacagggactcggggtggcccagcttgctccacatctcctcgcagatgtgcggggcgatcggggcgagcatcaggatcagcggctccacggcggcacgcggcacggccttcagaccggtcaggtggttgttgagcacgatgagcttggcgatggcggtgttcggacgcatgccttccatttccgcggtcacttcggcgatcgtgttgttgagcagtttcagtgtcttctcatcgggcgcgtcctcggtcacgtgggcctggccggtggtctcgtccaccacgttgcgccacagacgctgcaggaagcgcatgccgccgaccacgttgcgggtgttccacgggcgggattcgtccagcgggcccatgctcatctcgtacaggcggaaggtgtcggcgccatagttctcgtacatgtagtccggagtcacgatgttcttgagggacttgcccatcttgccgaattcgcggttggcgtgttcgccgttccaggtgaacgtcggctcgccggaggcgtcggccggcccttccacgacctcgtcggccggcacgtactggccgcggtcgtcggtataggcgtaggcctggatcatgccctggttgaacagcttgtggaacggctcggccgaatccacatagcccagatcgaagagcaccttgtgccagaaacgggagtagagcaggtggagcacggcgtgttcgacgccgccgatgtacaggtccacaccgccttcatcacccgagtacttgttgtggttcgggcccatccagtagtcgaactcgtccttctccaccatgtgcttggtgtcggtcgggtcgatgtaacgcatgtagtaccagcaggagccggcccagttcggcatggtgttggtgtcgcggtagtaggtcttcttgccgtcgcccaagtcgagctcgaccttgacccagtcctcgttgcggctcaacggtgcctcgggattggactcggcgtccatcggatcgaaggtgcgcggctcgtagtcgggcacgtcgggcaggttgattggcaatgcggaatccggcagcaggtgcggggtgccgtcttcgccgtacacgatcgggaagggctcgccccagtagcgctggcgggagaacagccagtcgcgcagacggtagcttacggtgcccttgcccacgccggcggattcgagccaggcgttgaccttggcgatggcgtcgtccacgcgcaagccgtcgagcgacagcgcgtcgcccttagcgtacgtggattcgacgtgggagttgatcacgatgccgtcatgggagacgaacggcgccttgccctcgtagttggccaagtcatcgccggattccggcagcggttcaacggtgtagatgaccggcagaccgaacttcacggcaaagtcgtaatcgcgctggtcgccaccaggcacggccatgatggcgccggtgccgtagtccatcagcacgtagtcggcggtgaacagcgggagcttcgcgccggtgatcgggttggtggcgtacaggccggtgaacagacctgtcttctcaccgccttcgtccacgcggtccttggcggtcttggcttcggcggcgagcctgtaggccttcaccgcctcgaccgggttggcatagccgcccttccagtcttcgggtacatcggccggccattcggcgggcacgttctccagcaggtgatgttccggggaaacaacggcgaacgtggtgccgaacagcgtgtcgggacgggtggtgtagatttccatgtccttgtcaccgtcggcagtggccacggtgaagtgcacggaggcaccatgggattcaccgatccagttgcgctgcatgagcttgaccttctcaggccagttgatgccgtcaaggtcggcgatgaggcggtggccgtacttggtgatgcgcatggaccactggcgtagctcacgctggaagaccgggaagttgccacgctcggacttgccttcggcggtgacctcctcgttggccagcacggtgcccagacccgggcaccagttgaccggggacttggagatgtaggccaggcggaagtcgttcaagatatcctgctgctcggcgtcagtgaggtcggaccactgcttgccatcggactcgtggcccggaatggccttttcgccggattcgaacttggccacgagctcggcgatcgggcgtgcggagcccttggagccggacgggttggtggcgtcctcgtcgtaccaggaatcgtagatgcgcgagaagatccattgggtccaacgcacgtagctagggtcgatggtggcgaacgtgcggcgtttgtcgaagctcaggcccatgcggtgcagctggcggctcatgttggcgatgttcgcctcggtggtcacgcgaggatgctggccggtctggactgcgtactgttccgcgggcaggccgaaggcgtcatagcccatggcgtgcaggacgttctcgcccttcatgcggtggtagcggctcaccacgtcggaggccaggtagcccagcgggtggcccacatgcagacccttgccggaggggtacgggaacatgtccatggcgaagtaggcggtgcgcccctcggcgttgcggcccttgccgtccttcaaatcgccgttgacgttggccgcccagaaggtgccttgctcatcccagatcttctgccacttgttttcgatgtcctgcgccagtgcggcgttgtagcggaagttgggctcttcggtttgcgtgctcttctcgttgtcactcataaatcagcaaggtagcctcgcaactggacacgtcgtcaatcgttattcagcatccgagacgatggctttggggtcaccgttcagcgaaaccatgagctttgtttggcttgtgaacgtatccttggcggccgtccagctgccatcctcaaccatgtcttccaatgcttccgcgattttctgcgccaattggctggtgccttgactcacggcgatgccataactgacctcgcccttgtccgcaatcacgtccatatactggggcccgttggccgcttgaagaccggaaagcaccgccatatcggaggctatggcatccgccgaccctacttgcacggccgtgacgcactgcgcataactgctacgctcctgaatccgagcctgcgggtggttgccgcggaagatgccgactgtctcgtcacctttcactgcgcacaccgtgccgtcgcctacgtcgcccaccgaacctgcgtcattggtgaatcggccacgctcatccgacctgaccagcaaaccgacgctggtcgtgaggtatggtccggcaaaatcaacgatcgcgctggacccatcggtgataggccaagaggcgacgaccatgtcgacctgtccattgtccagcatggagcgccggttttcggggcgaacctgcttgaagacgatctgcttgttcgcatagccgagtttggcggccacgtatttggcgatggtgatgtcgaagccctggtatgtgccgtcatgccatgctcccaccgatggttcgtcggttgcgaccccaatggcgatggtgggtccctccggcgctccggagacggtggtgacttgaatttggccgcaaccggccagaccggacaatggcaatatcacgccaaaggccgcggcgaatcctgccatcagtcgggagcgaaatccgcgtcgcatcgggcggcgggcgcggagcatgctacggctgacgaacgatgaccaatggtgcataaccgtcaaacgccttacttgaacatgcgcgaacgtgtgaggaaccaggcaaccacaccggaaagcaccatggagatcacgatgatgagcaggaagccccaaggcttgtcggtgaacggcatgcccatcatgccgccgtcgaagttcatgccgtacatcgagaaaatcagcgtcgggatggacagggtgatggagatgatggtgaagatgcgcatcacgttgttcaggttgttggacacgatcgaggcgaaggcgtcggtcatgttcgcaagaacgccgctgtagatgttggccatctcgatggcctgcttgttttcggtgatgacgtcgtcgagcagatcctcatcgtccggatactgcttgatgcgctgcagggtggtgagcttctccatcacgatttcgttcgatttcagcgatgtggtgaagtacaccaaggtcttgctcagttccatgagcatcacgatctcgcggttttgcatggaatggcgcagtttcagttcgagcttgtcgctctcacggtcgatgatgcgcagataccgcaggtacatcgtggcgttgcggtacaggatctgcaggatgaaccgcgagcgcatgaaggtgttgaaacctcgtatcgtgccttccatgaatgggtggagcacgggcgtgtcctgcatgcagacggtgatgatgaggttttcggtgacgatgatcgacagcgggatggtctcgtaccagtcgcgtccgccacgctcctccacggtggggatgtcgacgatgatcatcgtgtaatcgtcttcgacgtccacacgtgaacgttcctcgtcatccaaaggggcgcgcaggtcggccaggtcgatgccggtctgtgatgcgacggtggcgagctccacatcagtgggttcgctcaaacataaccaggagccgttttccggtttctcgatctgctccacttggccattgattgagctgaagattctcagcatgtcgcctcacccgccttccgcgctttcttactgttctatcgctgtacggttccaaaccgagattagtctagacccaccgttcgaatttgcgagcggggtttcgcatagcgaccgtcaccagacgattggctgccaacttggcatgtgcggtccgcgcagatcggtcggcccgttctcccagtcggcgctgtcggcgatggcgggagccttgttgtattcctccaactcccacaggggctgttcggtgggggtgccgttgacgctgtggcgcactttgagccggcaccagcaggcgttgcgcatgccgccgagtgcgttcatgccgtccgggtcgagttcgagcaggttggagatggtggcggtaatccatgagccatgggtgacgagcatcagcgtggtgggcgtgctgtctgaataggcggagtcggtgaccagtgcgcgcacggcatcggcacctcgctggcccacggcggcacggctttccacaccatgcttggtttcgcccccggtgtgctgtttccaagaggcgtagtcgtcggctgccacggctttgatttcggcgcgggtcatgccttcccactcgccgaagctgcgttcacgcagtcgttggtcacaggtgaccggcaatcccaaaatatcggcgaaggcgtgtgcggtctgttgggcacggaacaggtcggaggtcatcaccaccatgcgccggccggcggcgggggcctcctcgaactgtcgcgtatcagtgcgttcggcggcgtcaggaccgggctgggcgatggcttcgggatgctcggcaagccggttcaccttggcccagtagtaccgtgaagcgagcgcgaatccggtctggtcgacctgccattggcctacgatgtcgagcggcacatcgatctggccttgcaagcgatgttcgagattgtattgcgtacggccatgacgcagcatcatcacttcatcgatcatcggttttcgccacctcgttctcttgcggtttgccatactcatctcagcacaacccctagaatggcggcatggagatttctgagtcgacctgggcgttcatcgccaaacaccgccgtgaagatgtgcgtgatgtggccttgcacgccaaacatgatggcgacgtggatgtgccgttcgcgctggagcagattgccggctggcagcgcgcttcactcaagctacctgactgggcgtcccatgatgggctgattttcccgccgcaagtcccaatggaacaatgttccagccagttcacggctcaatacaaagcccggttagcacagcgattgttggccaaggaagcagtcgacgacgattccccgacatccctagtcgatctgaccggcggtttcggcgtcgacttttcttacatgtcccgagtgtttgaccatgccatatatgtggaacaacaatccattttatgtggtatcgctcgccataatttcccgatactcggccttggccacgccgaaatcatcaatgatgattcaacagcagtgcttgatacgcttggccgagcctccatgatcttcctcgatccggcccgccgtgacgatcatggctcgcgtacctacgcgattgccgattgcacgccggatgtgctgaccctgaaggatacgctgctggccaaggcaccgacggtcatggtcaagctctcccccatgctcgactggcataagaccattacggatttcgccggcgcggtgcacgaggtgcatatcgtctccaccggtaatgaatgcaaggaattgttgctggtgttggggcgcagccgttgcgcctcaccgctcgtggtatgcgtcaatgacgggcaggtgctgtcgtacaaggccggcgataacagcgacaatcacacccctatcagcgattctgccttggttgcacgcaatacctgtaataccgaggatttcccggctgaggaaagcgcgaacggcttcgattcctcgcattggaagtacctttacgaacccaacgcctcaatcatgaaggccgggtgctttgatgttctcgaacagcgcttcgtcgtgcatcacatcagcccgaatagccacctgttcgtggcggccgaacctattgccgatttcccaggcagatcattcgtcatcgaatccatcgtcaccatgaacaagaaagaactgaagcagctattggccggtctcacgcacgccaacatcgccgtacgcaatttccccctatccgtggcccagctgcgcaaaaaactcaaactcaaggacggcggcaacacctacctcttcgccaccaccgacctcaaaggccatcacctagtactgcgcactgaaaagcgaaaaagtggctccctctgacgaggaagccaccaatacgtcagctaatcagtccttggcgatggtcttgccggcggtcggaccggaggcaaggttctggatctcggtgacttcgagaaccggaatcacggccggcttcttggtgcccttttcctcggcgatcttgacctgctcgttgtagatgtcgtcgtcaacgtgcagcaccacgttgccgcggaagcggtagccctgcttcttctcgaggttggcgaaggcgatgaccagcggagagccgttcttgaggttctcgtagtgctggccggcggtgcgctcgtggtaggcgatgtgcgtgtcgtccagcacgaacagggacatcttcgggccgaggtccagttcgccgtccttggagacggtggtgatccaaccgaggttgttcttgatgaattccttgatttccggagtaatgactgccatgtcgaatcctttcatgattgctatggacaacgtatttttactctttccagagtaccggtttcgagcgcgactagcccggatgttcgctgtgagtaacctcaccttcgcacagctttcatccggttcttacctgcttggcgatgccgcgccccggccgcgcaccagccacacacctgtcacacacccgacgcccatcgaccggtcgattttggccggtagttcccgtaatctgtgagccgagagagccacaagttttcctaactgtcctgaggtgcaccatgggtttggtcgaacgtttcagcaagctgcgcagccgctggtcccgcagctttcccccgaatctcgcccgactcatgttgctgggctgcgccgcattatggggtggcagttatctgctcgccaaattcgccatggaggcgattccgccccaatggctgatgggtctgcgcatgataggtgcctgcctgtgcatgctggccttgttccataagcacatcgtgccgtatctgacgccgaagatcattgtgccggcgctcgtggtgggtctgacctactggggcacgatggtcacccagaccgtcgggttgcagaccattgaaccgggccgcagcgcgttcctgacggccgcctactgcgtactcaccccgttcgccacgtggatcatttcgaaaacccgcccgaaggccatcaatctggtcgccggcgtgatctgtctgatcggcgtcggcttcgtctcgttgaagccgggcggttcgttgtcgctgggcgccggcgactggctgaccatcgcaaccgccgtcatcttctcgttcaatctgacctgccttggtgtctacaccaaacgcttcgaccctatcgccgtcacttttgtgcagttcggcgttgccggcgtattgttcatcatcggcgcgttgttcaccgaacccatgccgaacgccagctggctggcaccctcagtagtggccagcgtgctctatctgttcctcggcgccacgatgagtgcccagatcatgcagaacatcggtctggctcacgtgcctgcctcgcaggcgtcaatcatcatgtgtacggaaagtctgttcgccgtcacgttttccgctttgttctggggcgagaggatcatgtggagctcactggtgggtttcgctttgattttcgccgccgtactgatgtcggtgatcagaccgaccgggcagtcgctgcatcgtaattgacgatgtcccgcggcctgcggcgacgcgaaacgcacgtgtgtgcgctgcagggcgtgtcggacctgcacgaaggccgattttgaaggtctcgtgtaggcctcgccccgcttccatcgagtctcaggcaacctgtcagcccgacaccctacggtcgtgcattgtgaagaagttttttgaaggaatctccctctcatccatcgtggcgggcacccttgccgccgtcacctcgttcctgctcgcatcgaagatcggcatcggcggttcagtgatcggagcggcggccagttacgtcgtctccgccgtggccaccaagatctaccagaacgtgctcaccgcctccggcgaaaaactccaatcggcctcgtcctccggcaacgggatcacgaaggacgccgagaacggcgatgccgatggcggcaccccccgaacggccggcagccggaccgacgttcgggacgagcccgatacggcgacgggcgtgaccgccgatgatgcttcctccacacgcagaccgcgtgaaatcgtgttcagtcgggcgaacggcaggacgtactcggtcgatgagctgcgcaagtcccgcttccgcgcttcgaagcacaccgccatgatcgtcaccttggtgtccggcctgctcgccgtggcggtgacggccggcgtcgtgatgctggccacgcagggacgcggcacggacaatctcgtatcccccaccacgaccacgcccgcgcgcaacgacaccggcacgcgaacgggcacccccgatcagaacaacgctctgccccagacgggcaccggcgatgattcgaagggaaccggcaaggattcgaaaaccgacgccccctccaccgacctcgacgccaacggcacctcgggttcgaccggcgccggcgcctcggattcgaaaaccgacggcaccgccaacggttcgaacggcaccggcacctcaaagaatccgaccaccgaagacccgaccagccaaggcgtcggcggcagccagaccggttcgaacggcaccggcaccggctcgacgcaaaaagatccgtcggaatcgacttcaaccagcaccggcaccagcggcaccagcggatcgccggccaccggcccagacgcgggcctgtctcgttaagtgtgtaactggcgttttcattgttgtgttccctcgcttggccagcggtcggcgaaggtgatggcaaaggcgttgagcgcgggcttccggcgcgcgctccatcgtatccgtcccttgccggtggggtccagcgagcggacggtcaggtacatgcacttgagcgcggcctgctcgtcggggaagtggccgcgggcgcgaatggagcgcttgaatctcgcgttgagcgattcgatggcgttggtcgtgcagatcacgcgccggatctccacatcatagtccaggaacggtatgaaccgttcccacgcgtccacccacagcctgcggatcgcgggatatctcgcctcccacttgtccagcatcgcgtcgcgggccgccgccgcggcggcgggcgacgtccagatgcccagcacgtcgcggtcgccctccagatccacgccaacggccacgtagaacgcgcggttggcgacctgcccgtcgcgccaccttgacgacggtcgcgtcgatgaacacggccgcgtacacacgatccaggggacgcgagcaccattcgtccttctcggccacgacccgctcggtgatgcgactgacggtctccctggacacgtccgccccgtagatctcctggaagtgggcgctgatctcgccggtggtcaggcccctggcatacagggacagcaccacctcgcccaccccgggcagccgccgctgccgtttcctgacgacgaccggctcgaacgagccatcgcggtctcgcggcacctcgatcccgaccggacctaccgaatcggtgaccacggtcttggcggtggtgccgttgcgcgtgttcgcggccctgccgtccttggatttcttgtgcttggcgcggcccaggtgctcggtcatctcctcgtccagggccgtctccagcacgcttttggtgaactgtttgagcagtccgtcgggccctgtcaggtccagtcctttttccttggccatgcgcacgaatgtgagcgccgcctcccgctcggcgttgcgtttttccgcgtccggcttcttcgtcggtgtcatgtttcccattgtcccagcacacatcgtccaccagcctttccgaccggccacacgaccggccagttaaggccagttacacacttcgagagacagtcccacgtataccggttctttgtttatgtaagggaatgattgatggttcggtttgcctgtttgtataatgcgcttatttatcttggtgccggatgtttttcggtctactatatggtggcctatcatgatgtgggcctgtcggtgctgctgatctccatcgtcaatgtggtgttcgacgtcagcgaatcggccagcgagctgcccacgtccgtgctgttcgaccggtggtcccgggaacggacgctgatcatcggcgtgttgtgccgcgtcgcgggattcatattgatgctgttctggtccgcgaacttcgccgtgctgtgcctggccaacgtgctggccggcatcggggccgcggtcgaaagcggcgcggcgtcctcgctgtacatcgaatacgcccgcaagcacgatccctcgctgggtatgaagaccttggtgtcaagactgtcggcgatgatcgctgtgtgcacgatatgcggcggtgcggtcggtgccgtgctgttcctgcttgactcccagctgatctggctgggcgcgacggtgttctacgtattggcgatcatcccgcttctcggtctgatgagggccgggtcgcgcaccaaggccgcagcgacggatgggagcgggacgacggaacggcaggccgaggcgtccgtcgaatccgatggatccgccgagccgggcgagtccgggacctcgctgacggtgttggatcatgtcaggcagaccgtggcggccgcggccgtgctgctgcggaagccggagatatggaatatggtggtgttcaatctgggtacgttgtcggtgctgacgttctggcagctgctgctgatgggccaccagaccggggtctggtggcagttcgccggcctagtgttcactaatatcgcgcagatcgtcggcagtcgtctgggtatgctgcggctgcatccacgttccggcgacattgcgatcctcgtgctcatcgtgtcggcggtggtgcttgcggccacgccgatgccggcggtgaggatcctggcgttcttcgtgttctcctgcgcgcagatgtacgtggcgaacacgatctccagcagcttgcacgagagcattgacgattcgatccgcgcgaccgcgttctccgtgggatcgctcgtattgatggccttcaccgcggtcgtcaccccgctgtgcggctacatcgccgacacgttctcgatttcctggggtacactgacgacgatccccctgctggtggccctcctcatcgccggacttgcgcgaaagcctgaatccgacaaacgggtaaaagtcgatatttcgttggattgagacgtcaagggcttgcgggcacgatgcccgcaagcccttgacgtctatatgtcattcattcatggttggaatgcgctcctcctacgcgtgcggttgaatggttagtccatcgctatcgtcggagggtgtcagggccgaagatgaaaccgtctgttccgggtgcgtgatccaggtggaatggattggcaacggtgtacgacttgtcgccgggtttcacgtcgtccgtgtcgaattcgttggaatccttgtcgagcagtgggccgtccagcgaggcgggacagtacacggtgacgtgccagttgccgtcgtccatggggatgagcacggtgcagtgccttggagaccgtctgctgcggcatcccttatggatgattccttgataaaggagtttcggggggcgggtaacaaaaacccggaaccgaagttccgggtttttgtctggctcctgcggctgggcttgaaccagcgaccgtccgattaacagtcggatgctctgccaatagacaacgggcaattcgactgccatgtcaggtatggtaatctcgaaccagccagaagatcgataagccaaattacctgcgactgaagtgaggacggaatcatgcgtagcgagttctctggtctgttgtattgcgcgggtgcattaatcgcagtgacctcttgggctcttttcatgttctcgaaagaagtccatcggaaaggccgaacagtatccatcctgagattgcccgtcatttggatactgttcctcgtgagttcggcgccggctctcgcatcatatccggtttttgaaatatactcaggatctatggatccagatgtcctcgatttctacagtcagccgttcatacggctactgccggcggcgacctgcatagtgaatctgtgcgtatcggcatgctgctccatggctcttgtcagtaagcgcagaaaaaccgaacatcgaaaaatctgaaccacagcattcgagatgagatgccatggaaaaaccgctgtttccgctggccttggtgccgctggccgtcggattggtcctgatatacgtcgtgattggatccaaaaaactgggaagagaacgcaaaaggactcttctgcgtgtcttctcggcgctcatggtcgttgccggcgcgttggccatcgcgagacaactcgtatgacgcttcacgctgcggctcggcttcccggctatcggccgcggccagtccacggctctccgcgccattcccgcaatcgcaccatcgccggtctcaagcccatgagacacttggaaccatggctaccatcatcatgcgcacctcgcatgataatcctagccaactgtttttggctttgttccaaggctttcgatttttgggaaacctaccgattaccctcgtttctccacgaggcacccacaggcacccaagaataatctcaactgattcccaccccaccggtcggccaccatcagccggaacgctcgtatctcgcggcgttggcgatctcgttcgcctgaagcgtcgggcatcgcgttgacgatccgctcgaccttctcgcgcaccatggcgtcgagcttgctctcgaacatggcctggtcgaactgtatgatttccttggacatggctccatgcctctttccaatcgcggtttttcattgtctggcgactgaaaatcgtacccggtacggcccatgtccttttccatcaaggccggaatccaaaaatgcgcaagaattcggtcgttatccccttagagactaaaggaattctattagttcagcaaattcgtatatcaatttattttttagcatgtcggacaatacagtaaatcaaccactctatggctaagataccaaggtagaaaagcgcccatacggaaaaactaattagctttactcctagtgtctgtacagttccatgcccgtccactgttcttatgaaaaggaatacactaatgcataagaacaatatgaattgaatgatttggaaaattctccaacctttgttttccacaatcaccctcctgtaaccccaatctctatatgctgattccaccattataagccgcccttggtgaaatgtcaggcgccccgttgtctaattgaaagtgcaacacccgttggattggagattgtccggataaccagtccgaagggatgttgcacctatggggggggaaaaaaaagcatgttcgcacctgtcggaagaggaacgccaggtcatccggatcgagatcggcaacggcaccatcatccgcaggatcggtctgatgctcggccgcaacgcctcgacggtcggcagggagatcaaacgcgacacgtggttcccgtccaacgagaacgagtcctgccggccgtaccggccgaaacggctgaagacgggcccatggacgggcggatgctacatcgccggccccgccgcggcgcaaggccgaccgcaggcgcgccgaaccgcgcaagcgctaccgcctgtcatgcgaacgcctgtgggcgcgggtggccgaacggctgcgtcgcggcccgccgccgatcatcggcggcgggccgcgcgtcctgttccccgacgactccgccatgcgcgtgtgcccggagaccgtctaccgttggatccacgccgaccgccatcgccgtgaacgctgggcgcgctgccttccacgcggccacaggaggcgtcgcaggcgtggcggcaggaggacgtcgcgtttcccgattcccggacgggttcccatctccgagcgtccgccggaggccggcgaccgcagcggtttcggccattgggaggccgacggcgtgatcggcgccgga

SEQ ID NO: 1047 - DNA, 85939 bp, Unknown
  R13_10m  MAG No. k141_1509
cagggtggtctccaacatggcctggtcgacctgtagaatctgctgtgacatggcttcgtgccctcgtttccaatcgcggtttgttttgtttggcgacagaaaatcgtacacaggacacgggccatgtctctatctcaggccctcaaccaatttgcgcaaaatctcgggcgttatcacaatgaccgagtcgtatggaatcgtgtaatcgtcagaattacatcataattacctgagaggatgtcatatgtattgaaggtatttagcgacttacctctatatgcgcacgttctacaatcatataaaagtcatgtattttgcgaagacattaatggagagaaccctagcccaactccgcgcttcataaccgatttttagcatagcagcagagggtatccaagacactaatatttatcatattctaccatcaccagaaaaaaagggcttcctgttttccgaatgttcgactaaacaagcagattcacagcaccgaatggatacccaaccacaacaaacatatcaacacatccagccggataacaccttgaatcgttcactgtcagggagtactaaataccccataaactccatctccgttcatcgaaaaacgatgtttgtcacgggaaacccctatgcgaagcaatacgaaacggcatgttctagccgcctccaagaacgtttattggtcaaaagacgacggcacacctatgtgagcgatgacattaatgcccgaacatggcaactgttgagacgtaacgcgcaaagcgcatctggtaaggtcagttatcagctagttcacgatatctttgtttccccaaacgacgtagtatactgcttcaccgtccttggcgtttcgcgtaaacggaccttttcaggatgttcgaccttgcaccgtgtgggccgcaatcggctatatcgttgtgaacatcgagctaatggcgattaaacatcgctactattaataatccctgaggaattcgaacggtgatctataaggtaacaaaatgggaaaacaatgatgaccaggacaatcattattgaggaggatacagtaagtacgacggcagcatgaatagtgccagtgaagccgtataaaccgtaggcgagaggaattagaccgaagctaattgcataatcaattgaggaaactcgtcccatgtgccgcttatcgacgcatgtctgcatagtagatccccagaacacgccagacaattccagtccaagcccagcaacaaatgacgccacataccacagtacttggatgtccaaagtacctacaacaaaaatcggcataatagctaaagcgccaaataacactgatttagaaaacatgtgcctaggcctttccaactttaacgcgatgagactgccgcaaatgtatccagatgaggtgatagatgccatcagggaccatgcgccccggccactctcttgcacgacccacaagggcattgtgacgtctgttgccccggattgtacggcaaggaacaacgcccagaacggcactcccactgctaaccaaatataagtatggaacaaactgggaatagaacgtaatgcagaaatcatggaagcatcatcatcgttgttattagcctcgtcatcgcagctgggcatgagtttcaacgatagaacaagcggcatggagacagccagacacacagcaccatccagaaatagaaaagaaggtgatatcagttgagcaagccatgcaccaagaagtggaccgaccaccgagccggcattgcgaaacgtacgtatcaagccgttggcacgtacaatatcttcagggggagcaatcgaaggcaataaggcgaacaaggctggcgagccgaccgcaccaatgatacctgcggccaaactgattgcttgcacgggccatccaagaccactcaactgcacgacccatgttccgactccataggaaatagctagaccacccagcattcctgaggcaagagttttccgcggcaatcgatccgctaaaacaccacccagaaaagccatgaccaaggtgggcagcgtcttgaacatgagtaccaaggctaggcccaagctgtcagatgaagccgctccagtgaatacaacaccgcatgtgaagaacgccgaggacattgcttgcatgccctggaccaatgccagtttggctacctgccagcgtacgacactcccgacattcttcaccatgctcgaacagcctccttttgttttatcatgtatttaaaacgtaactatattgccttttattcaggccactaccgaaatatgctttggggattctaaaatattcacttcttcgcgagattcggcgaaaatatcgtgctcatataagacgggatctttaattccaagaatctcaaaagaagttcgtcgatcacgacacgggtcacatactccacaatgaactgtcccgcccaaggcacagctccacgtatcgccgaacggcacgccaagacccatacctttttgaatgacggcacacttattgatactaagataaggagtatggaacgttaccccgtattcatctccttcacattctacggtaaccgtatgaagagcttcaaaatatgatgcatgattatcgtggaacacagcatcgttactatgaactgcgtaataaacatcaacgatatcatgcttaagcgcccatgaagccattagcataagcgcaattgccgatccaaaaggctgaacatgctcttccttattaggggcaacgacaaatggcccaaatgctttgcggaggaactgaggctgaggcaattcatagaaacgcttaaattgctcggaaaaatcatattgataatgatggagtcgttcagagtggagatttgtaacgattctttgcgcatgttgactctcattacatccctcagtttcaccaaaattgaaagtaacggcatatatttctttcccctgatttaataggtcatacaagagagtagtagagtccgggcctcctgatagaagcaacgcgacacgattatgattctaaatcattgtttaatcctttgactttgtgaaattcagcgaatctgttgaacttctgtatagaagttattctgttaatcgacgtttgagaagtagtcatgtaaacgtcacaatgacaaatacgcgacgattcctgggtctgatgaaagatcttggtgcttggctttcagagtctctcctcattttttcaattgttgtatgtcgtttccgtgcaacaatacagcaccgaaacacagccagcgcctacaatggcctcggaaagggggacttatgccgaacaacgccgttacgctacaccacaccgaaccgaccgattatccggaacaagggcgaggaactggagcggcagcggtttgaggcgcaacggcggtcggataggatcgcgcggcggtaggggcttcatatatggctcccctcagggaggggagccagttttttacaacacccgtggggcgttgtggaaatcgaagaggacgccgtcggcgagccggcagatttcgggccagtcggccgcggaggaatcgtcgtgcatggcccagaccgtcataccgaccgatttggccgatttcatggcgaccagcaggtcctcgaacaccgtgcaatcggtaggtttgacgcccagacgtttagcggcaagcagatagacgtcgggctggtccttgccgacgtcgttcacatcgtcaacagagacgatgtcatcgaatagcccgaacatgcccacatgccgcagcgccggttcacgcaggtgcgggggcagcgaggtggcgacgccaagcttgacgccggcggccttcaggtcgtgcagatagccgagcgcgcccggcttggcctccaccgtggtggagtaggcgacactggccatgtcatcccactcctgcataagctcctcgggggtatctttcaggccgaatcgcgcgatggtgtattcggcgatctggcgaaactgcatggcggagaccgtggtcgtgtagtcgggcggaaccgcgatgccacgcttgttcaggaagtcgatgtcgacttggtcccagactcccatggagtctaggagggtgccatcgaggtcgaatatggcggctttggtcataggacactttccttcaacagttctcgggcgtggtctagggaggcttcggattcgctgccggagagcatgcgggcgatttcgtggacgcgggtttcgccgttgacttcggcgatggtggtgaccacgcccaaatcgtcgtcatcggcatccggcggctccttggtgaccacgaactgcgcgtccgcccacgaagcgacctgcgccaagtgggtgacgacgatgacctgcgcgctgcgggccagccgtgccagacgtttgcccagttcgaccgcggccttgccacccacgccggcgtcaacctcgtcgaagatgaaggtctggtcggcaccgccgcgcgtgtcggcggccaccagctccaaggccaacatcagtcggctcagttcaccgcccgaagcgcttttgcccatcggcaactgcggcgacccctcgaacggcgtaaacaggaacgcgatatcgtcgcgaccatacggaccgagcggatcatcggccttgtctcgcggcgtgacacgcacttccaaggaggcgcccagcatggcgagcgagccgagttcttcagtgacgcgcgcgcccaagtcggcagcggcagccacgcgcgcggcgctcagcacgtcggcggcggcgagggccgcatcgtacagcgtctgccgttcggattcgagttcggcgaccttttccggcgaggcgtccagatcctccaaatcgaacgccgccttgtcccgccaagcgagcacgtcggccaaggtggggccccaccgacgggtgaggtcgccaagctcgtggatacggccgttgatctggtccagatcctccacgctgccttcgtcgcccagctcctggctcagggcgaacaccacgtcgcccaaatcggcattgatggattcaagccgatcggcctgctcggcgaacgtgccgccgacgcgaatcgcgcgcaacgaggtcaccgcatgattgatgagttccacggccgaagcgccgtcggcggcgtccacatccacctgcgaggcatccagcgcgcccagcgccgaacccacgccttgggcgatgtcagccgcgttttcgatgcgttcgcggcgcgccttcagctcctcgtcctcccccggctgcgggtcggttcggttgatgcggtcgatggattcgcgcaggtagtcggcctgttggcgggcagaggattcctgcgagcgcaggcgttccagccgctcatccatggcggccagcgcatcccacgccttgcggtaggcggccagttcggcttcgtctccggccacccggtccagaaactcgcgttgccgtgcggcggccgcgattttcagctgatcggtctggccatgaatgatgaccagttcgccggcgatggcccccagcaccgaacgcggtacggacttgccgccgagcacggcccgcgaacgtccggaagcgcgtacggtgcgggaaaggaacagttcgccgtcttcggggtcgacgcccgcgtcgtgggctttggccacggccgcggcagcaccggtgagcccgctgtcagaatcgtcagaaccggcatcgtcaccggcatcgttggtgtcgccggaatgttcagatgcgacggcatcatccgcgagcgcgaaaatcgcctgggcccaagcctcgtccgccccggccgagacgcgcgaggattcggcggccccaccggagaccagtcggatcgcggagagcagcatggatttgccggcaccggtctcaccggtgatggcggtcatgcctgcggccggcgcaatggcggcttctcgaatcggccccagattgcggatatcgagttcttcgagcatcaggctcctgccttgccgtcgcgttcgcccggcttgtcgggctcggtaccagcgacaccagcgtcaccggcaacgccagccgcatacgcggccgccgggaacgtgtgcccgtgatgcagcggctggctcgaggcctcgttgcgcgcgtgctcgcgccaaccgaccacgggcagatcgaacttggagaccagacggttggtgaacggcacgccggagagtcgggcgaggcgcaaggtatcgcgcgattcgcgcaccatgacgcgcgtaccctgcggcagggcgcgctggcggcggccatcgcagcaaatccagccttcggacatggattcgtccagaatatcgatggtaaaggtcgaaccggagccgatgatcagcggcctggcgaacagggcgtgcgcggccaacggaatcaactgcagggccttgacgttcggccacatgaccggaccgcccgcggagaaggcgtaggcggtggaaccggtgggcgtggatacgatgacgccgtccgcgccgaacgagttcatctccacatcgtccacgcggatggacagttcgaccatcttgccccggtcggcgcgttccagcgtgatgtcgttcagcgcccaatcctcaatgggcttggtggtgccaggcagccagacgtccacatgggcgatcatgcgttcgtcgatcgaatagtcgtgggtggcgacccggcggatcgcctcgtcgatctggaagctttcgaattcggccaggaagccgacatgccccatgttcacgccgagaatcggcacctgggtgcagtggacgagttcggcggcgcgcagtatcgtgccgtcgccgcccaggaccacgacgatttcggtgtcgtccgacacgcacggcggctgcacaccgaaatcgggggcctcggtgttgtcgatgatggtgacttcgaaaccggccactcgcagctggctcaccgcctcggccactacggttccggtctgcctgagcctggtatgcgtcaccaccaccgcgttgcgcttggccatggcatcctcctgtcgattcggtcgcactgctcattattctagccgcagacaccgtcatcactcgtacaggtgttcgaaaaatgccgcttcgtggcgcgtcgtcgacaacgttccgcagagtcgattaacgtaaggcttcggcatacaatggcatacagccgcgcgatcaccgtacgcgtgccgtgcgcagcgcgatggcatgccgtatgaccatacagcagtatcagttgaggagcttgaggacccatggccaatgacttcgacgaatcctccgccaatgaggaggcctcgaagggcctgtcatggtggtattcggccgatgtactgagccgaggcaaaagcgataaaaccgccaagcgcattcgccgcatcagcatcaccgaccgtctgctcaggcacccgggccgtctgtccatggtgtatttcggcgcactgatcatcatcgtcaccggcttgctgctgctgccgatctccacatcggacatcatcttcaccaacttcccggtcgcgttcttcaccgccgtctcggccctgtccacctgcggcattccggtggtgaacaccggcgaatactggtcgacgttcggccaagttgtcatcctattctccatccagttcggcggcctgggcgtcatgaccttcgcctcgatggtggctcttggcacttcccgcagactcaaggtctcccagcgcatgcttaccgcgaacgaactgggcaccacgaagctttccgaggtcaaaggcgtactcaccgtggtattgggcacctccatcatcgccgaggtgcttaccttcgtgctgctgctgcccgacctgttccgcgtgaaccacggcaatatgggacgtacattgtggcaggcgctgttctacgcggtatcggcctacaacaacaccggtttcacgcctgacgccaccggcctgcatgtgaaccgttggggcgtgggactgccgattctcatcagcgcattcataggaacgctcggcttccccgtggtgctgaatctggtgcagtgcgcacgccgacatctcagcccgaaacgttggacgttgcacaccaaactcactttggtgaccaccgctgtgctggtggccacctcactggcttggttcctgctggtcgagtggggcaataccggcctgttccccgcagatggtcccggcatgaagatgcgccgtgcgatgagcgccgccgtcatgccccgctccgccggtttcgatatttcctgggtgcccgaagtcacgaatgagaccaaggtgttcatgagcatactcatgttcatcggcgcaggctcctcatccaccgccggcggcatccgtgtcaccacgttcgcggtgattctcttgatttgccgcgccgcattcaccggccatcgcgatgtcaccgtgttccgccgccgtatcccccgccgcgtccagatgaccgccgtgtccgtgaccacggcctgctttgcgctggttatggtcggtgcgatgatgctgatgttcaccaccggctgcgcgttcgtggacgccgtgttcgaggcctgctcggccttctcgttgggcggttattcggtgggcgtggcaagcgccggcaatccggccagcctgtttattctgtccgccgagatgattgtcggacgacttggcccgttgaccatcgcctactccatcagcagaccgatggctcccgaacctattcgttatccgcaggaaaacattatcgttggctgatcggccattcaatcggcacacagaaatccggcatagagaggaccatcatcatggcagcaaaaccgagcggcaacaaaagcgtgctggtcatcggcctgggccgtttcggcgggtccgtggccgccaccctcgaccagatgggtcaggatgtgctcgccgtggataagaacccggagcttgtggcccgttggtccgcgcatctgcccaccattcaggccgacatgaccgatgtgctggccatcgagcagatcgacgcctcccagttcgacacggccgtcgtggccatcggcgacagcatcgaggcttcggtgatcatcaccggcaacctgctggatgccggcgtttccgatctgtgggccaagtccgtgtcccaggagcatgcgcgcattctgcagcgcatcggcgcccgtcacatcatcaatgcggagatcgatgccggcaagcgcgtgggtcatctggtggccggcaattatctggattacatcgaaatcgacggcccgtacaccgtcgtcaagatccacacgcccctatacgcggtgggtcgcagcatcgaggacgtgcaggtgcacgacaaatacggcgtgaccgtggtgggcctcaaggccccaggcaaggagttccagtacggctccaaggaactggtcatgcatcgcaacgacgaactcatcctcatgggcaagcaggatcagatcgaccacttcatccaaggctaacccccctaactgcgctcgctataccccctatctgctcacatcgtgaccgatataacccccctcaacatggatgcgctcattattggggcaataagccataaagctgtacgtccatattgagggggctttatcatcatgggcaagcatacgcagaattgcacgttgataggcaaaggagtctacggcaccataggagtggaccaacgttcccgtcttgccgatggcgcgcattttcacaccatgattgtgaccagcaccctcgaggcctcagttatagaaggggacaaactggtcatcaagagtggcattgtgcggtgtgatggtgatattcgcgtatccagcatcagcggcagcggcgacatcgaagtcggcggcgacattatttgcgatgaaataacctttaccggcaaactgcgatgcaacagcgatatcgtttgttccggaaatctgtccgtcaatggctccctaggcacccgtcatattagcggtcagacagtccgcttgaacggcgtgttgaagggtcatgacgtcaacagcagggctctggaagttcatccactgcgcagtacgatgttttctcgttttgatatggatgggtatgaggatggcagcatggttcgccatatcacagccgtcacggttgaagccaaccatctgcaatgccggactttgacggcggactccgccatgctacgcaacggcagtgcggtggaaagcgccacgtgtgccaccgcaataggcatcgaccgtacctccagcgtgctgctggtgaacggagactgccgacgcattcatctcaagacagcgtaaagcaggtattcctcattaccgtgggtgccgatgatgggactatcggcagtggccaccacgtcaagtccgtgctgttcagcacaggcgaccacgtcgtgcaatgcccgctcccgcaatgccggatcttccacgatgccgtttttgccgagtcctgcccgcccgacctcgaactgcggtttgaccagtaacacaatctgcgcaccgggagccgcgatgcgcgcgattaccggaatcacataggtcagggaaataaaggagacgtcggagacgatcatcgccggccggtaaggcaggtcgtcggcctctacttcgcgaatgttgacgccgctcatttcgatgacgtgctcgtcattggcgatgcgcgggtcgagctggccgtggccgacgtcgagcgccacgactttggccgctcccccgcgcaacagtacatcggtgaagccaccggtggaggcaccgatatccagacattccaagctttccggcccggtaaggccattgccggcaaaggtctcgaacgcgcccaagagtttgtaagcgcctcgggagacgtagtcgtcgcccttatccacggcgagttcgctgtgcccggctttgaccatgaacgatggcttggtgatggtctcgccgtccacgcgcacatgcccggctttgatgagtcgctgcgctttggcccgcgattcgaccagtcccgaagccacgagcatcatgtcgaggcgatcaagtggggtcgcgggatcgatatgttgctcggtcatataccttcctttcgacccaccatccaccaacggggtggctcggcatggacccaccatccagcacttcacgtcatcttccgctggcgggagaatgaatctcctctgctagctgcggctgttatcaagctcgtgttgtaacgattccagcacgttgcgataggtctcaagcttgcggtcgttgtcttgttcatcaatatccgcaagttcggggtatcgctcggtgaccggcgcgtgttcgctatccgtaggcataggactatgcctcgatggcgaacaccggtaccgtggcctcgctgagctgtgcgccttggtcggcggcttcccatgcggcgcatacggcggcacgcaggccgtccatactggtggggtcgctgacgtgtacctggccgttttcaaaccaagcgctagccttgcggcattcccaagtaccgctctcgtcgcggaccggctccggttgggcttcgccgagttcacgcagatcaagggcgatgaatgtgggcctcaggtgtgccggagccagcatcagttcggtcgggttggtgacaccggtcagcaccgccagcgaatcatagtcaccgcggttaccggcctcgatatcagtgtcgagtcggtcgccaatggcgatggacgcctccttgggcaccagatcgtggccttcggcggcgttcagttcgcgggcctcatcgtacatgtacgcttccggcttgccagcggaggcgaccggttcgacgccagtggccgtgatcacggcgcgaatcatcgatccgcaaccgggggcgatgcccagttcacgaggaatcgtcaggtcgcggttggtcacgaaatacgtggctccggcctcgaccgcgaacgcggcatcggccatcatctgccaagtcatatccggataccaaccctgaataacggcctgcgggcggttctgaggaccgtccacgatggtcaggccgttgcgggtaacctcatcgcgcaaatgctcggcgcccaatacctgtacgcgcgcgccggcgggcaacgccttggccaccacacgggcggccaccaccgaagaggtgatgacctgccacggctccacgtccaagccgaagcccttgagctggtcggccaccacgtgctggaagcgcgaggagttgttcgtggtgtattcgatggtcatgccggcggcttcggccgcacgaatggaatcggctgcgtattcgaccggattcttgccgcgatacaccacgccgtcgaggtccagcagcgcaagctgataggcctcggcgagcgggcgatcggtgcctttgaggaaacgggtcattacgccgctcactcctcggtttcggtctcggtctcgtcggactcagccggttcaacggcaccgtcagcggactcggaagactcctcggcttcagattcctcagattcttccgatgcatcctcggactcagcattttcgacatcggcctcatcagactcggcatcgccgtcttcagcctcgtcgtcctcatcgccgtattcctgctccggatccggggcgtactgcgcctcgtccggatcgatgccgagcttctcgagcacgtcggagtcgtcggtgatgtcttcgagatcgtggtcaatcaccacgtcgtcgctgttttcgtcaatctcctcgtcggcatactgatcctcaagacggtccagcaggtcattaagctgctcggcttccttgctgcggccggcctcttcaaggaagtactgctcggcctgcacggcacgcatacggtactcacccggaagaccctgagagcggccgacggtatgaaccacttcaatggccttgtcccacatctccaaatcgccaagggcaccggcatacaccaggaacatctcgaccttgggagcgccatgcagctgcttgccctcatcggacagcgccagttccacggccttcttcggttcaccgacaccacgctcgcagtcagcgatgaacggcaggtagtcgaggaagccgttcatacggtaggcggtacggaactcacgcagggacagcttgtagtcgccctgacggtaggccacgaacgcgagcgtctcgcgggcaaagtcgatgcgggaggcctgacgggccacccacttggcgtgctccaaggcaagttcgggatcgctctcctccagcgcgaaagcggcgaggatgtgcagaccaatgttctccgcatgctccttggacaggccgcgcagacgttcgcgctcatccttggacagcatcgaccattccatgcccttgggcatcttgggctcgtcgggacgacggtcggtgtacgggttctgcgaggggaagctcatcgtgccgtcggagttacggcgcggacgcctcatgtattcagagcgcttctcctcacggtactggcgcttctcttcctgcgaaaactcgcggaattcgccgtcacgacggttgttgtcgcggcggtcgtccctgcggaagttgcggcgatcgccatcacggcgatcgtcgtcgcggcggaagttgcgacgctcaccatcacgatggaaatcacggcgatcgttatcccttcggtcatcgcggcggaagtcacgacgatcattgtcacgacggaagtcacgacgctcaccatcgcggtggaagtcacggcgatcatcgcgacggaaatcacgacgatcgttgtcacggtgctggtagcgcgggttctcgccgttctcgccttcgtgggaacggtagccgccttcgcggcgcggcttgaaaccttcaccgtcacggcgcggaccactgccgcggtaaccacccttgtggaagccaccggacttgccgtacgacttgcggtagccgccgtggccctcgccatcaccatcacggcgcggcgcgtaaccctcaccatcctcacgacggcgcggcttgaagccctcgccatcgcggtcgcggcgcggacggaagccgtcgccatcgcggcgcggaccgttgccgcgatagccacccttgccaccgaaaccagagcggccgcccttgtggaagtcgccacccttgccgtacgacttgcggtagccgccgtggccctcgccgtcaccatcacggcgcggcgcgtagccttcgccatcctcacgacggcgcggcttgaaaccctcaccgtcatgacgcggcttgaaaccgcccttgccgcgcggcttgaaacccttgccgccgcggttgcccggtcgacgatcgccataccccttatgaccgccgccgtaggacttgccggaacgctcgttaccttctgccattacttgttttccttaattcgttgttgattaacggttttccacggcgccgagcgccttcttgccacgacggatgagcgcgaagcggcctgccaggaagtcggcttcggccagcacctgctcctcatcctcgatacggttgttgttgagatacacgccaccggacttgatggcgcggcgtgcctcggaagcggacttgaacagtccggcagcctgggcggcgtcgattacgcgatcgcccggcttggagacggggaagacgtgctcgccgttctcgtcgaccaccttgaagccgtcgagcacggattccagcgtttcctcgtcgatgtcttcgaggttgccaccgcggccgaacagcgcaccggaagcatcgatggcagcctgggtagcggcctcgccatgcacgaagctggtgacctcccaggcgagcgtcttctgggcctcgcgcttgccggggttggtcttggattcctcgaccaatcgttcgatttcggccttgggcaggaaggtgaacgccttcagcaggctttccatctccacgtccgggcggttgatccagaactggtagaacttgtacgggctgagcatcgtggcgtcgagccagacggcgttgccctcggacttgccgaacttcttgccggaagcatcagtgatgatcgggctggtgaacacgttgacgtccacaccgcgcaccttgtggatcaggtccaggccggaggtgaggttgccccactggtcggagccgccgagttccagcgtgcagtggtattcgtcaaacaggtggaggaagtcgttgccctgcagcacctggtagctgaactcggtgaaggagatgccttcctcagagttcaggcggcgggcgaccgtgtccttggcgagcatggtgcccagacggaagttcttgccgacgtcacgcaggaagtcgatgacggtcatcgaggcggtccaatcgtaattggacacgaaacgtacggcgttcgcgccttcggtgtccagaatgccgccgatctggttcttcagacgatcggcccagccggccaccacgtccttcgggttgagcgtgcgttcgccggactggcgcgggtcgccgatgagtccggtggcgccgccgaccagagcaatcggatgatggcccgcaagctgcaggtgacgcatgttgatgagctgcacgaggttgccgatatgcaacgatgcagcggtggggtcgaagccgcaataataggtgatgggctcgccgttcagtgcttctgcgagtcgatcccggtccgtggactgggaaatcaacccgcgccattccagttcctcaagcagggtgttgaaacccgcttccttgaagtcggtgacgtgagccatagcttgtcgcttctccctatcgaattgtgaatgagactgcccaattgggcacagtcaagtttcgcagaacatggcgacagtgccgaacaccagccgagccgcgcgattcagtaaaacgccttattctagcggcgcgggcccataagttcgcgcaaagagtcgatgatgtcctgacgatccggcacctggaacttcgggaaggacttgagcatacgcttctgctgtgcgttgatgacgccattgacggcccagcgcagacgctcaaccgtatcctgcgaaagctcacgcatcctgtcggataccgcacgggagccccactgccacgtgccaccggcgcgtgccgccacatcctgcaccacctgagagacggaatcgagcacctgctcgaatccgagcatgcccgcaaccgtgaccgccaagtcgatgatggtgatcagggccaggaccgtgaccagcgtatgcagcatcggcagcggaatcatatccgtgacccgctcgacatatggctgcgaaccaagtaccacgcccacgccgccgagaccgaaaatcaacgcgcccagcaggcagacgcggccttggaggttgaagcggaaattcgagtaatcccaccagcgggcgtggaacagctgctccatgacccacgaggttgtgtattcgagtatcgtggcgcccaccatcgaaatcaggaagatgatgatcgggttatgtacgttgccgagaatggcgacgccgagtatcgcgccggtgccgtagatcgggcacagcgggccgttgaggaaccctcggttgaccaagcggtgctgttggcaggagacgagaatggattcgtacatccagccgacgaaactgtagaacagaaaccagaggaaataatgttcgagtgtgatgatcatcgacgggcttcgatctcggcgtagggcttcgcggcgggcaacgcgcgcttgttgaaccggtcgagcgagaaggtctcggcggtggcggagcatttgtccgccaaggtgaccagatagccttcgatatagcgcggcggcaccagggtcatcgggaacatgtggttctcgatgctgttgcgttcgatatcgttgagcttgaagtccttcagggcattgaccagggcggcgtggccatgggtgaagccatgccactggtgttcgccgttatcccagtcgtgccagtcgtacaggaagtaatcgtgcaggagggccgcgcgaatcagggatttgaggtcgacgcggtaccacaggtgcgcgcggtcggccatccacacagccaggcaggcgacacgcacggaatgttcgaacgtggtgacgttgccgtgctggtagtagcagcgttcgatctgcatgtggcgatgctcgatgacctcacggccgtgcttggcgaccaggcgttgaatctgcgttcgggtgagcagatgtcccacggtttcgaccctccgttcgggttggttcagtgcaatcccttgttgtgaattacgattacccgacgatattcaagaatccatcgagtaataccgtgaccgattgtagggcacacgtatgtccgtgcacactcatccaaaagaacgacaacgggaaccgttaatcgtggtgggtttcaagatagtcgagataaccctgaaaaccgccatcgaggcttgctacatcgtaaccgcgatcggcaaggatttcagctacttcctcgctccaccatccttgagcacaatagactacgacagttcgatctgtgggcacggttttgagcacatgggccagagggtcgagtggtgcattgatggcaccttcgaccgggtgtgcggcgaagtcggctggttccctcaagtcgagcagcgtgaccgtattcgggtcgagcttggcaaattccgccggcgtgatgcggcggtacgatgcttcactgctctcatcgtcatcgaccgcattacgcaaagcaataggcatgttcttcccctctcgttccgatcttggctcccctcaaggaggggtgccacatagctctaaatcgcgcaggccggctgaatatagttggccggatcaatagcagtaatggtcggctgctcaccgcacaccgggcagtcgggcacatggttcggcaacggcacacggcggatgttcatggtcagggcatccacagtgagcatacgagccacgagcggctcccccacgccggcaatcagcttgacggcctcagtcgcctccagactgccgaacacgccgaccaccgcgcccagcacgccggcctccttgcaggtcggaatttcacctgcggcgggcatatcgcggaagatgcagcggtagcaggggccttcgcctgggatgacggtcatcacctggccggagaacccgaccacgcccgcatggatatacggcttgttgaccagcacacatgcgtcattgatgaggaattttgcggcgaagttgtcggtggcatcgatcaccagatcgtacggttcgatgaggccggcgatgttgctggcatcgacgagctcgtagtaggtgtcgaccgtcacatctgggttgagcgcgcggatggccgtggccgcggattccactttgggcgctccgacacgtgcagtggtatggatgatctgacgttgcagattgctcatatccaccacatcgccgtccaccagtccgatatggccgacgccggccgccgccagatacagggcggccggagagccaagcccgcccgctccaataatgagcacgctggaggccaacaaccgcttctgccctttgacgcccagccccttcaaaatcagatggcgcgcgtaccgctccacctgttcatcagtcaatgccatgttttctccatgtttccagctcccctcagtccgctacgcggccagctcccctcagagaggggagctaataaaagtgtcagtgcaaatatcccgtagtcggactggacggcacggcctgtccctcggtcaccttgcccagaccggacagatacgccgcacgaccagcatcgatggcgtgcttgaacgcctcagccatcagcgggatattgccagcagaggcaacggccgtgtacgccatcaccgcatccgcacccatctccatcgcatcgcaggcctggctcggacggccgatgccggcatcgatgatgaccggcacatgcgcattggcgatgatgatctcgatgaagtcacgcatgcgcaggcccatgttggagccgatcagcgaaccgagcggcataacggcggcggcaccggcctcctccagctggcgtgcggcaatcgggtccgggaacatgtagggcatgaccacgaagccttccttggccagcatttcggtggctcggatggtttcggcgttgtccggcaggaggtacttggtctcgtgttcgatttcgaccttgacgaagtcggtgtggcacacttcgcgtgccagtcgggcgatacgcacggcttcctcggcgttgcgcgcaccggaggtgttgggcagcaacgtgatgccttcgggaatgtagtcgagcacgctgttctcggtggtctgcgcgcggcgcagtgccatggtgacgatttgcgtgcctgcatgttcgaccgtggccttgatgaggttcaggtcgtagcggccggagcccagaatgaatcgcgactggaactcgtgaccgcccagggtcagcggcttgtcttccactggcagaatcggcgcggcggtaccgaccggattggtgacggcgggctgcggcggcagcggagtcgcctcaacagatgcttcagtaaccggattaatattgctcatagcttttcctttcatccaccctgtacaaactgcacaatttccatgacgcactggtcgtcgagcatggcgtcggcacgcttatcgcgcgggataatctcaccattgagttcgatggccacacgctcggcgcggaatccgtgcgcttcgagataatcggcgacgctgaccggcgtctcgagcgtgacctgctctccgttgacctgcataatatcctttcagatagtaaaaaagggtgcacgaaacgaaccgtaccttaagtggtgcgcccattcatgaacccaatcatgcgaccgttcgaccgctgtgatgtattggctccatcacgaccgtctcacggctgaattatgcaaacggaatgaaagctgtatcggagaacccggcaaatctgcaacaacgattccttacggcggcatgacccgcgtcaagttccccggtcgaagtctggcgacttcctctcagcctcacggctcccgttcgttacgatttctcagtgtatgccgttgcagtgacaacagcaaaatagagctccctctgacgagggagctctattgggactagaacgtgccgggggctttgtaggcggagccatccgacgtggatgcggggaagagcttgagttcttcgacctcggccttggcgtcggcgatctgctcgcgcacgcgaccgtaagcggtgccgcccttgccgttgcgggagtcgaccgaaccgtggctggagagcacttcgcgtactcccggagccttgtcggccggcaggaacgcggcgaaggtctcgatgaagtcattgtcggtcagatcccacagttcctggccgcggccttcggcgagcttgacgcaggcaccagagagctcgtgcgcatggcggaacggcacaccgttcttgacaagccattcggcgatgtcggtggccagcgcgaagccggtcggggcttcctcttcaagccgctcgctgtcgaagtgcatggtcttgaccatgccggtgaaggcgggcagcagcacttcgagcgtatcgacctggtcgaacacggcctccttgtcctcctgcaggtcgcgagcgtaggcggtgggcaggcccttcagggtggccagcagaccggtcagatcgccgatgagtcggccggacttgccgcgggcgagctcggcgatatccgggttcttcttctgcggcatgatggaggagccggtggaatagccgtcgtcgagcttgacgaaggcgaactcctgggtgttccagatgatgatctcctcggacaggcgggagatgtccacgccggtcatggcggccacgaacgcgaattcggccacgagatcacgtgcggcggtgccgtcgatggagttgtcggtcacgcgggagaagccgagctcacgcgccacggcctccgggtcgaggccgagcgtgttgccggccagtgcgccggagccgtacggagaggcgttgatgcgcttgtcccagtcgatcagtcgctgcacgtcgcgaatcagcggccaagcgtgggccatgagctggtgcgcgagcagcacgggctgggcgtgctgcatgtgggtgcggcccggcatcacggtgcggccggccttttcgctctgctcgatcagggcgttgacgaggtcaagcaggagtccggcaatcgcacgggagtggcggcgcagccacatacgaatcaggcaggcgatctggtcgttgcgggaacggccggccctgagcttgccgccgagttcgtcgccggcaatgtcgatcagaccgcgttcgagggcggtggcctcgtcctcatcgtcttcgatgggggcgaaggagccgtcatccacatgacgctggagcgtgtcgagcgcatcctccatgcgctgcagctcgtcggcggtcaaaagtcccgcacggccgagagcacgggcgtgggcgcgggaaccggcgatatcgtcgtcggccaagcgccagtcgaactgcgtggacttggacagtcgggccagttccggcgacggaccggacgtaaagcgaccaccccacagggccagatgttcgttgttctcagtcatgaaggctccttgaaaagtgaaaatagctgtgtttaagcgtagcaatgtgttcaaacatacagttgcccccgctggcgagggctgtcacatggagtgtgactgagggcagtcctttcaaagaccactcccagtcagctatgccgacagcctcacagcgggggcgactgagtaagaatcactcgacggtgttcttcgggacctcgatgccgttgccgaacttgacgtcgcgggctgcggccacgcgggacggcaggccatagatgtcgatgaagccgttggaggacttctggtcgaaggtatcgccggaatcgtaggtggcgagcttgtagtcgtacagcgaggagtcggaacgacggccggtcacgacggcgcgaccgccatgcaggaccatgcgaatctcaccggacacgtacttctgggtgtcctcgatgaacgcgttgagcgactgagttgccggggagaaccactgcgcatcgtagaccagctcgccccagcgcttgtcgatgtcgcgcttgatgcggtgctgttctcgttcgaggcagcagttttcgagttcctggtgagcggtgatcagggccacggcacccggagcctcgtacagctcgcgggacttgatgccgaccaggcggtcctcgatgaggtcgatgcggccgatgccctgggctccggcgcggcggttcatctcttcgatggcctgcagcggggtgacgtcacgtccgtcgatcttgaccggcacaccttccttgaactcgatgacgacttcatcttcgaccggcgggaaggccgggtcgtcggtgtaggagtagcagtccttggtcgggccgttccacggatcctcgaggaagccggtctcaatggcgcggccccatacgttctggtcgatggagtacggggacttctcggtctgggtgatcggcagcttgtgctccttggcgaacgcgatctcgacatcgcgggtcagggacaggtcgcgaatcgggctgatggccttcagcgtcgggtcaatggaggcaatggagacctcgaaacgaacctgatcgttacccttgccggtgcaaccgtgggagatggtgtcggcgccgaactggtgggcggcgcgcacgaggtgcttggagatcagcggacgggagatggcggagaccagcgggtagacgccttcgtacatggcgttggccttgagggccttcatgcaatattcgttggcgaactcgtcacgggcgtcgaccacgtaggattcaacggcaccgcaggcgagggcgcgctgcttgatggtctcaaggctttcaccaccttggccgacatcgagggacacggccacgacgtccttgccggtgcgctccttcagatacgagatggcgacggaggtgtcaagaccgccggagtaggccagaacaatgcgcttgttatctgccattggttccctttcattcaaggtctgaaaaacaaactgatgcaagtatatacagaggactgtatatttatgcacggcgtgttggttatttggaagcgaggcttagtagccagtcggagcgggagacggcggtgtcgtcattggtgcaaatcaccatgacggtgtcgtctccggcgatggtgcccagcacgccttcgatcggctgcctgtcaatcaccgaggccacgtattgtgcggcaccggaaggcgtgtgcaccacaaccagatttccggcggcggccaccgaggtgaccagtccgttcagcacgcgggacatctgtgcctcaccgcgctcccctacatcctcaccttccgaagcaacgacgctgcgacccaccgtgtaggccaccgtgccgtccttcagccgggtcttcaccgcatgcatctcatcaagatcgcggctcagggtcgcctgagtcaccgcaatgccctcgtcgataaggattttggacagctgtgattgcgaggtgatgatatgcgtggcgagcgcctgttctatggcactcagccgcgccgccctggtggcagggcgctgcagggacggaccggtttcactcatgcgagcagactttcatctccacgggccttgccggtcaaccaagtcagcaacgctttctgtgcgtgcagacggttctcggcctcatcccacaccacggactgcgggccgtcgatcacttcagcggtgacttccttgccgcggtaggcgggcaggcagtgctggaagagcgcatccggcttggccaatgccataagttcggtgttgacctggtaatcccagaacggcttggaacggatggcgtattcggcctcctcgcccatggagacccaggtgtcggtgaacacgcagtcggcgtccttcaccgcttccttggcatcggtggtgaccaggatggagccgccggtctcggccgcgacgcgcttggcgtcggccacgatgtccgggcggggcaggtagccgtgggggccggccacgcgcacgtccatgccggccacggcaccgccgagcaggtaggagttggccatgttgttggccgcgtcaccgaggtaggcgatggtctggttcttcaggttgtcgacgccgcctcggtgctcggcgatggtctggaagtcggcgagaatctggcagggatggaagtcatcggtcagggcgttgaccaccggatgggtggagtacttggccatttcttcgacgcggtcctggccgaaggtgcgccacaccacgccgtaagccatgcggtcgagcacacgagcggtatcggccacgggctcgccacggcccagctgggagccggacttgtcgatgaccagtgggtagccgccaagctcggcaacgccgatggagaagctggaacgggtgcgggtggatggcttgtcgaacagtacggcgacggcctgcggaccggcgaacggctgcttgtagaagcggtcgtggtggaacttgatggcaagttcgagcacctgcttctgttcctcatggttgaggtcgtcgtcacgcagcatgtggcgaagttctggggtcatgatgatctccttggatcggtgggtcggcagtgacggcgagaaatcagtcgtcgggcaggtccgtaggcacatccttgaggatggcaagtgcctgatccacgtcttgagcggttacaatcagcggcggtgcgaaacgcagcgcattgggagccaccgcgttgacgatgagcccgtgttcgaggcagtagttcatcaccgcgtgggagcagggatgcttgagctcgacggcgtccagcaaaccacggccgcgtacggaaacgaacagcggattaccggtggccataatgccatcgcgcagctgttcgccgcgagcttcggcgttggccaccagattctcgtcttcaatcacgccaagagtggcgagtcccgcagccgcacccagcggattgccggcaaaggtggagccgtgggaaccaggagtgaacagagccgcaagtttctcgccaaaagcgatcatgccgcccatcgggaatccgcctgccacacccttggcgaaagtcaccatatccggcgtcacgccgccggacagatcgtcacgctggaatgcgaaccacttgccggtacgtccgataccggtctgtacttcatcgatgatgagcagcgcgtggttgatatcgcacagttcacgcacgaacttgacgtaatcggcgcccaacggctgcacgccggcttcgccttggataagttccagaatcacagcagccaccggacccttgccatagcggccgagaccggtctgtgcaaaagcgtcgtgcagggcgaccttgtcgccggcgcgcacgaattcgatgttcggcaccagcggatcatacggcttgcggataccgggtttccatgtggcggacagcgcacccatcgtacggccatggaagccgtgagtcattgcgagaatgcgtgcgggcttgccgccgatggaaggcagggcaccaggcaaggtgcggccatacagcttggcaagcttgagggcagcttcattgccttcagcaccggagttgccgaagtagactttggagccttcaggtgcaccagccagcttgaccagtttggatgccagctcaatttgcggctcggacgcgaaatagttgctgatatgagccaccttggcagcctgatcggcaaccgctttgacccacttggggtgggcgtatccgagggaattgacggcgatgcctgccaggaaatcgaggtattcgttaccgtcaacatcccagatgtgggcaccttggccgtgatccatgacgcgcaacggcgtaccgaacacattcatgtggacctgagagtactctcccagccacttgctgtcttccgtacctagtttttcctcatgctcagtagccataagagctcctcatttccagtccttcatcgggcataaccatggtaccgatgcctgcggaggtgaatatctcattcaaaatcgaatgcggcttgcgcccgtcgatgatatgggcttggggcacgccaccgtcgatggccctgacacaggcctccatcttgggtcgcataccggattccaggtccggcagcatatcgcgcaggttttccacaccgatccggccaatcagagaattcttgtccggccaatcggcgtacagaccatccacatcggtcaagataacaagcttgcgtgcgcccacagcggcagccaaagcggcggcggcggaatcggcgttcacgttgagcacttcagtggcatcttcttcgttcggagccacggaagagacgaccgggatacgaccggcggccaccagatcctcgactgccgaggcatcgacggaaaccacatcgccgaccaagccgatatcggtgggcttgccattgatgatgggcttgcgctgcatggccgagaacaggccgccgtcttcaccggacaggcctacggccagcgggccgtgcgcgttgatcaggccgaccagttcgcgtgacaccttgccggtcaggaccatgcgcaccacgtccatggcctcgggggtggtgaccctcaggccgcctttgaattcggatttgatgccgagggccttgagcatgtgggagatctgcgggccgccgccgtgcacgacgatcggatgcaggcccacctgacgcaggaagaccatatcttcggcgaagcactgcttcagatggtcatcgaccatggcgttgccgccgtatttgacgacgatacgctggccggcgaactcctccagccaaggcagcgcttcaataagcacttctgccttctgatcggcgcgcaaatcggtgtgcacgtcgaaatggaacccaggtcccttcaattctgtagccaatttttctcttttctgcgacgccggcgacgctatcgctgccggctgctacaaacagcccactgggctgtttgcgttatatgcgacgccggcgacgctatcgctgccggctgctacaaacagcccactgggctgtttgtcagctttcgtagtcggcgttgatgtggacgtattcgtgggtgaggtcgtcggtccagacggtggcctcggcgtccgagccggtgttcaggtcgatgtcgatgtggacttcgcgcggggtcatgtcgacctcgctgcggtcgcggccggcgccgccgttctcgcagatgcgcacaccgttgacgtccacggtcaccttgttcgaatcgtaaggcgcgacttcaggcggcacagtgcccaaggagctgacgatgcggccccagttcggatcgttgccggagatggcgcacttgagcaggttcgaggcggcgacggcacgaccacaggcaagtgccgcgtcttcgctggtggcaccggtgacggtgatacggatgtcgtgggaggcaccttcgccgtcgccgatgatttggcgggacagggatgcgcaggcctcacgcaccagcttgttgaattcgtccttgtccggttcgacgccggaggcaccggaggcgagcagcaggaccgtgtcgttggtggacatgcagccgtccacgtcgatgcggttgaacgaatgttcggcggccacggcgagtgcggcctgcatctggccggcggagacgaccgcatcggtggtgatgacgcacagcatggtggccagctgcggggcaatcatgcccgagcccttgaccatgccgccgatcttccagccgttggagccggtcagttcgaccgtcttcggcttggtgtcggtggtcatgatggcgtgggaggcgtcggcgccggcttcggcggtggcggcaagagcctcatgggcgctcttggcaccagccagcacgttgtccaacggcagcagttcaccgatgagaccggtggagcagacagccacatcattcggttcggcgccgatgagaccggcgaccgtttccgcggtggcgacggactgggcgtaaccggcctcgccggtgcaggcgttggcaccgccggaattcagaatcacggccttgacgtgaccgtcggcgacgaccttacggctccactgcaccggggcggcacagaaacggttcgaggtgaacacgcctgcagccgcgtcgagcgggccgttgttgaccacgagggccaagtccttcttgccttcgacggatgaaatatcagccgccacgccggcggcggagaaaccttgtgcaaatgtaacgctcacggtgctactccgatcttggtcaggcccgcgtcttccggcaggccgagtgcgatgttcagtgattggaccgcttgtccggcggtgccacggttgaggttgtctatggcggcaaaagcgtagatgcggccggccttgcggtcggcgacgacctgcaggtgggctgcgttggatccgatgatgttgccggtggcgggcagtgtgccctcgggcagcagcaccatgaagtcctggccttcataggccttggaccatacggcgcgaatctcctcatcgctcagcgccttggccttgtccgtcatgcgggcggacacggtggcgaggatgcctcgggacatgggggcgagaatcggcgtgaagccgagcgtgaattcgctggcttcggccgcgctcttgccggccgcgtgggcgaagttctgcagaatttcgggaatgtggcggtgcttgccgcccaccgaatacggcagggcggattgcagggcctcggcggcaagcaggttggtgcgcttgagattcttgccggcacccgagtatccgacgaccagatcggccacgatatcctgcgattcaaccagtccttcggcgatgccgggctggagggccagcgtggtggcggtgacgttgcagccagggcctgcgatgcgcttggtgccaggaagcgccgcgcgctggcgggtgtatgagccgtccgcggctttgccggtgatgagctcgggcatgccgtaggtccaatgctcatagaaatcgccgccgtagaactcatcccaagcggcctgttcttcgaggcgatggtcggcacccaaatccacaaccacggcattcggatcgagctgcgaggcgagcttgcccgaagcaccgtgcggcagtgcgaggatgataacgtcatgcccgttcagcacttcgggcgtggtatcttcgacgaccagattggccagttggggaatatgcggcatgtgcttggccatcgactcccccactgaggaatggcctgccacgcaggtgatgtcgaagtcggggtgcgcggccagaatgcgcagcgcttcaccgccggcatagcccgtggcaccggccacggccactgtatatttcgccatactcatctcttttcactgatgtgtcttgggatgagtatacgcgattatgcagactattgcatatttatgcagtgggtgtgttggtatgtgaacgccacttatgcggagatggagtcggaggaggagccggtgccgccggtgagttgctggagggcttcctggtagaggctcatggcgtcatagccattgaaggccatccagatgacggcgatggtgtacagcacgttgatcaccacggcggccacagccaaaccgaagcccttcatatggaaggtgcgcgtgcgccacattgccaccgcgcccatcagtgccgagagcactggcaccgggaagaacagggcgaggataaaggagatgatcgcatacgaatcccagtgcccgtagagtgggttctggtttggatcgttcaggtcgatgccgtggtaataatgcggctggtgaggctgaccgttcggctgttgaccatacgactgcccctgcatgcccgggtacccgcccggatatgcgcccggaccggactgttggccgccttgagcatacggccagccgcccgcctgctgattgccgggccacgccggctgctgaccgtacggctggccggcctgctgggattgcgccgcgccaccgttgatgccagcggctgcggcggaatccttcttggtatccggctcgggagcgccataaatatacgggttgtaattcggtccgtattggccagacatagcaccatattcaggctgctggtactgcccgtatttcggcttgtcctgctccggttggctcatgacgctcctcgattcggatgatcggttgggtcaggcgcgcagctgggcgccgatttcggcggcctcagccacgatggccttgcggatggcgtcgctgtcttcggcggacagcgtcttgctcggtgaacggaacaccaccgcataggccagagacttcttgccctcgcccacctgttcgccggtgaacacgtcgaacagttcgatggattcgaggttcgcgccggcggccttgcgaatcacgttctcaagctggcctgcggtcacggtctcgtccacggtgaaggccaaatcctgcttgaccggcgggaacgtggagatcggcttggcctggacgggcttgccggtcagcgtggcgaacagcgcggtgaggttcagctcgaaggccgcggaatgggccgggaagccgagcgcctcgttgacgcgcgggtgcagttcaccaacccagccggtgaagacgtcgcccaccatgacgcgggcgacgcggccggggtgccattggacgggcacatcgtcggcggcgggctggtcgagttcgattgcggcaccgatacggccggcgatgcggcgcacggcctcgacggcgtcggaccagtcgaccgggcgcttgccgcccatccagccatcgtcctcggccagaccggtcaggatgccggccacatggtcgggctgttcgggcagaccggcgtcaagcgcggcgagctgttcgtcggtggggcgcacgccgccgggcagtgccgggatggcgggcgcgttcggatcccacaggtagacgtggccgagctcatacagggacacgttttcgatgccgcggcggatgttgcgctgcacggtggtggccagggtcggcagaatctcgcgacgcaggtacggacggtcgccgtagagcgggttggcgatctcgacgctgaccttcttggtggcttccgggtcgaagccgaaggccttgtaatcgtcgtcgcccacgaacgggtagctcagcgattcgaccatgccgaactcggcgagctcgtccgccacgcgacggcgacgctgctggtccggggtcaggcccaccagaccctcgaccggtgccggcggcacggtgatcggaatctggtcgtagccgaccagtcgggcgatttcctcgaccaggtcgcacggctcgttcaagtccgggcgccagctcggcgcggttacggcgaactcgccgttgccgccgccggccaccgtgcagccaatgtcggtcaggatgtcggagatgcggttgatgtccacgtcgaggccggccacgcgggccacttcggaggccttgaagtggatgaccttggcgcgcggcgtgttgttcacgtcgttcgggtgttcgctgggctcgccattgccgtacttggccatgagctcggcggccatctgggtggcggcgggctgcagcgcggtgtcgacgccacgttcgaagcggcgggaggcctcggatggaatcttgtggcgacgggccgaacgggcgatggtcacctgatcgaagtgcgctgcctccagaagaatgttcttggtgtcagcggtcacttcgccatacaggccgcccatcacaccggcaaggccgaggatgcgcgagccgcgttcgccgttcggcgaatcggtgataagcagatcttcgacgctcaggtcatgttccttgccgtccagggtggtgagtttctcaccctcgttggcgcggcgcacgacaatcgggccttcgagcttgtcgaggtcgtaggcgtgcatcggctggccgaggtcaagcatcacgtagttggtcacgtccacggccaaggagatggagcgcatgccggcgcgaatcaggcggcggcgcatccagttgggcgtgtgggcgttgggattgaagtccttgacgatacgcgcgtagtagcggtcgcaaccgggcacgccgtgaatcggattgttatcgtcgatttcaacatcgatgtccaccggggtgccgggctggtagtcagcaggttccggggccttctcgttcagtgccacggccggatcggtgtaggcggcaccggtggagtggtggtattcgcgggccacgccacggtaggacagcgtgtagccacggtccggggtgatgttgatctcaagcagaggctggtcgaggtgcagcaggtgcatggcgtcctgaccaggcttcagagcctcatattcagcctcggagaagccgtactgacgcagcagaatgatgccattgtggttgtcgcccagacccagctcacgttcggaggcacacatgccgttggagatgtggccgtaggtcttgcgcggctcgatcttgaagtcgccgggcagcacggcaccgggcagggtgacgacgaccttttcgccggccttcatgttgggcgcgccgcagatgatgccgcgcggcaccttgttgccgtcttcgtcggtctcgttccattcgtcgccgcagtccacgtggcaccagttgatggtcttgccgttcttctgcggttcgggggtggcgtcgaccacgtagccgaccacaatcgggccggtcacctgggaggagtggatctcctcttcctcaagacccaccttgacaaggtccttggcgagctgttcgtaggtcaggccttcgggaacctcgacatggtccttgagccaatcgatatcgatcataggcatggctgaatcactcccccatcacaaactgttcggcgaaacgcacgtcaccttcgaccaggtcgtgcatgtcgttgatgtcgctgcgcagcaggagcgtgcgctccatgccgacgccgaaggcgaaaccggtgtagacgtccgggtcgatgccggcggacttcagcacgttcgggttcaccatgccgcagccgccccactcgagccagccggggccgcccttcttgtcggggaaccacaggtcgagctcggcgctcggctcggtgaacgggaagtagctcgggcgcaggcgcgtcttggcttcagggccgaacatggcgacggcgagcttgtccagcacacccttcaggtcggccatggtcaggtgcttgtcgacggcgagggcttcgcactggtggaacaccggagtatgggtggcgtccagctcatcggtgcggaacacacggccgggggacgcgatgtacagcggcacgccacgggtcaggagggcacggacctgatcggaggaggtctgcgtacgcaccaccatgttggagccgacgaaaccggcggcgtccttggcttgattgcccttgacgtagaaggtgtcctgcatctggcgggccggatggtccgggccgaagttcagggagtcgaagttgtaccattcggcttcgatttccggaccggaggagatctgccagcccatggagatgaagaagtcctcgacgtcttccatcagcttgggcagcgggtgacgggcgcccagaggcttgcggttcaccggcagcgtcatgtccacggtttcagcggcgagtgcggccttctcggcggcttccttgagctcgacctccttggggccataggcacggccgaagtcggcgcgcagcttgcccatgagcttgccggcttccttcttctggtcgacgggcagggagccaatggccttgctggccttggtcatcgccgaatcggcacctgcgtacgttgtcttgatggccttgagctcctccaggttggaggcgttctggattttctcgatgcccttggcaacctcagcggtcacctggtcggcgtcgaacaccatttgttctgccacgagaaccctttcgtctgatgttttctcagcgtttcacagcgtttttaccggtttcacattctttcaacatgacccgacatagacagcgacatcaacatcaccgcggccgaggtgccgaggttcagcgattcggccttgccgtacagcgggatggagacgatgcggccgcagcgtgtgaggatgtccggttccaagccacgcgcctcattgccgaacaacacggctttcggagcctcgaccgccgccttgtccgccagtactgcgggcaggctttccggcttgcattcttcggtgccgtatacgtcggcggcccagacgcccatattatggtcgcctgtccaggtgaagaattcgtcggtgctcatggcgagtaccggcagatggaacagggagcctgcggtggagcggatgaccttggggttcagcacgtccacgcagtcgtccacgaagattacggcgtcgcagccggccgcatcggccgcacggatcacggtgccggcgttgcccgggtcgcgcacctgccagaaggcggcgatctgcgggccccggccgttcttgccaagttcgacgtcatcggcaccggcgtgcatggactcggcattgccgacggccacgatgccctgggcgtccggactgatgcggtgcatcacgtcgccggtgcagtagtgcacataaatcgtggcatcctgcgaggtttcgacgatcttctccaacgtggaggagatgatacgcggatgttccaacgcctgcgaaacctccacatagaggtcctgcaccacgtccggccgccaagtgacggcctcgcgcacggattgcgggccttcgataagaaaacggcccgaacgttcgcggcctttggcgcgggtcagatcggcgatgcggcgaacgcggtcggatttcggattatcaagaatctgggcgttgatgggcatagccactaccctactgccgggtcattacgtcagtcgtggctcgctcccgctggcggaggcatcgtaagcctgaaaggcactgtgccagtctgtcgcctttcagacaccttgaaaggcgaagtgccaattcccggtgccgatggctacgcctatggaggccagcgggacagccagacagatgacgtagaagatccagtcgataggcttcagacgcgagatacgggcttgggagcgtggggcgctggagccgaagccgcgcgcttccatggcggtggcaagtttggtggcgcgccggatggagagcaccagcagtccgaacgcttgggagagggcacgggcgatggcgttaccgtcgccaaggccgcgcgaacgctgggacaagccaagtgcgcgccaatcttcctgcagcagcgtaaacatgcgcaatccagccaacccgccgtatacgaatcgcggtgagaagtgcagaatctcaaccaaaccgtccgccaaatcagtgggatcgaggcccagggccagaatcacgccgggtacggcaatggccgccaccctgatagccgtggcgatggccagattaacggatccctcgctgatcacaatccagccgccctgccacaggatctcgcccgaggtgcggccgtagagaaacacggagataaaactgccggcggcggcgatccataccggccaggtcttacggcatacggtccacggagccacgccaccaatccacagcagcacgaattcgatgccgagcgccgtggatgcggataccacatccagactgatgaacatcggaacgcacagcaacagcgcaccgatgatgcgactgaccgcgttgatgcgcgctatgaaccatgagggcgatgaggctttgaccggctccacgcgcgtttcctgcgggctgacggttaccacgtcactcatgcctcgcctcctcgaacatcacgcgtcgtgcgcccagcgcatccaccagcgcctcatcgtgcgtcaccatgaccacgcacgagccttggtcgcggatggcggcgatcagcttgaccatttcattccacgtactgaaatcctgtccgaatgtcggttcgtccatcaccaacactttgggtgcggcggccagcatggaggccacggacagtcgccgcttctccccgccagacaaggtatacgggttggctttggcgaagcgcgtgagattcatctgctcaagcatgcggtcggcggtccgataagcctcgtcttggctctgccccatcgacttggggccgatggcgacttcgtcacgcacgaaattggcagcgaactggtgttcgggctcctggaacaccatgccgatacggcccagcagttccttgcttttccagtcaatcggctcacgcccggcatgcgcgggcttgaggttgtcggcgatgagcaccttgccggcgataggctcgagcagcccggccaaggtcagggccaaggtcgatttgcccgcgccgttcggacccatcagagccgttacttcgccgggatagaaatccagattgatgccaacgccaagagcggtcccacggccaaagcttaagttctcggtgctgagcaccggcgcatcgtgcgcaggctcccgcttcggcgagtaatcgggaatcgcacggcccggcacccacgcgccaccggcggccaacacgtcgcccatctcggcgaacacctcgtccggcttgccgtcggcgatgaccgcgcccgtgggcgaacttgcatcgggtcggccgagcacgatcacgcgatcgaccagatcgagccatacatcgatatgatgttcgaccacaaccatggtctgtccggtggcctcgatgacctttttgaccgcgtcatgcacttcgaccacgccttcggggtcgaggttggcggtcggttcgtccaacaacagcagaccgggcttcatagccagcacgccggccaacgcgagacgttggcgctgaccgccggacagatggcgggtggaccgatccagttcgagtccgccgagtcccaccatatccaatgattcgcgcactcgctgccgaatctcctcgcgcggcacgttgaggttttcgcagccgaaggccgcgtcatcgcccagtcgttcaagaatgatctgcgagtccgggtcctgaagcaccagtcccacgcggcctcgcgcctcgcgcgcatcgacgccatcgatggtgagcgagccctcctgctcgccttcctcatcgccgccaagtacgcctgcgagaccggccatcatcgtgcttttgcccgcccccgaagcaccgagcagcaacacacgttcacctggccggatggtgaaatcgacggcacgcaacgcgaagtccttacgcgtggcgtgccgccatccccagccgctggcctctaccgcagccggattaacctgcatcagacgcgcgccttgctgcggccggattcaaagcgttccagagcgccggtggcggcgagcgcacgagacaagtaccagaccaccacgccggcgatcacgacgccggagatgatggagccaaccagataccaagtgacgcgcaggccgttccagcccgggttggtggcccagtagtaggcccagcagcccacgccggcgagcgcaccggacaggatggtggtgccgatgttccacttcttccaggcgaagacggcgaaggcgatttcggcacccagaccctggaggatgccgacgatcagcgagccgccgacgccccactggttgcccagcgtaagctcgaggaaggcggcgagggtttcggcaaacagtgcggcaccgggcttgcgcacgatgattgcggcgagcgggccggcgaacagccagaatccgttgagcagaccctcgaaaccgggggtcacgccttcgaacagggccagcggggcggagcagacaatgtcccagccccagaaaatgacgccggatgcgacggcgatgattgcggcgacgacgatatcgacgacgcgccacttgtaattggctttggccacagcttcagtcatgaatgtgcctttcttctgctcgtacgcaggccgaacatacatggatatatgtacgcacatgatgcacatgttcgtggccacgcgcgggttggttcaggcacgggtgggtaagagcgacatttccgtgcgccggcattatccggtcacgttccatcggtcgagactatgaatctcctctcagccgcctaacggcagctcccgtgtcaactccccgactataaagcaagccgccgtcaaaggcaatagccacatccgtgacctacctgacggcagctcgccaccattaccgatgcggttcggttacttgccgagcttgtccagcagcaaagcctcggtgatcacgttgttcttgaggccgggcagggagatggactcattggggctgtgggcgttggccttcgggtcttcggggccggtgaccagcacctgagcgttggggaaaatgcgctgcagttcggggatgaacggaatggaaccgccctcgcccttgttgatgggctcaacgccgaaggcctcggtcatggcttccagcgcgtctttggtggccacggcggtcgggtccatggcccagcccatgccgttttcgccgcgttcgacagtgaccttggcaccgaacggcgcgtgggattcgaggaatgcagccagtgcttcctgcgcttcttcagggcgctgggtgggcgcggtgcgcagcgacagacggaagcgggtctccggggcgatcacgttgaaggatccctcgaccgggtgggcgtcgaagccgatcacggtcacggacggcttggtccacaggcgtgaggccagcgaaccggtgccggcgaactcgtaaccggccaccacgccggaatcctcgcgcacggtggtttcgtcaaggtcgcgttgcaaaccgccgattggctcttccgcggccacgccgggcacggccagatcgccgttctcgtcgtacatggaagcgatgagcatggcggccaacgtgttggagtcgagaatcgggccgccgtactgaccggagtgcaccgggtgctcaaggccctgcacggtcacgtccacgcaggtgttgccgcgcagcgaggtggtcaaagaaggaatgtccgccgaccagttgccggaatcggccacgataatcacgtcggcggcgaattcgtcgcggtgagcctcgatgaagggaatgaagcttggcgagcccatctcctcttcgccttcgatgaacactttgatattgacgttgaggtcgtcgcccaaagccttcagcgcaccggagtggatggcgatgccgccgccgtcatcggcggagccacggccgtaaagacggccgtcgatttcggtggccacgaacgggtcggtgttccactcggccgggtccggaacaggctgcacgtcgtgatgggcgtagagcagcacggtgggggcgtccggagaaacgatatgcgagccgatgacctcccatgcgcccggagtgccgtcggcattggaagcctggaccaccttggcatccacacccacgaggcgcagttcgtctgccacgaattcagcggagcgcttcatatgttcggcggtgatgcccttggcggagatcgactgcagcgcgaccttttcggccagcaccttgacgatgcggttccaatcggtttcgacgcgcgaacgaatctcgtcagcggtgagcgttgccatgatggtcctcctttatatatgtgcgtatatatgtgcgtgagcggcgtcattgcaatgactgcgccagtgtacaagtgtctgaacgtcaccgtaacctcaaagcatgacatggaatccgtttaggaaaaaagaagaggcccaagttcccgttgagcaggccccgaagaaggccgccgatccttctgagaaaaaaggccgtcctaccccgaagatgaagcaggctcaggccgccggtatccgtccgctggttccggtggaccgcaaggccagcgccaaggccgccaaagcccgtctgcgcgagagggagaacgccgagtacgaggcgatgcagaagggcgacatcaaccacatgcccaagtcggaacgcctgccttggcgtatctacatccgtgattatgtggatgcccgtttcaaccttggcgaatggttcatcccggtggccttcgcgattctgatcgtctccatgttcgtcacttctttgatgcagaaccagtgggcttccatcatcatgatggcgcttatgtacggttacctgattgccgtgatcatcgacgtatggctgatgtggcgcaagctcaaggccaagctcatcgccaagtacggcgaacagtccgtgtccaagggctcccgctccttctcctacgcttggagccgttcgattcagatgcgtcgttggaggcttcccaagccgcgttacccgaagcgcggtcactggccggcagactgatgtccatatatactctggctcccctcgttgaggggctgagccgtaaagaaaacagtccagtggactgtttttaggcgaagtggcggcgatagccgcatatggctccctagcatgggagccatacttatatgcaccaaggaggcaatcatgagcgaacagtttgatctggtcatcatcggggccggccccggcggctattccacagccctgcgcgccgccgaactcggcatgaaagtggcactcgtcgagcgtgacgccaccgtgggcggcacctgtctcaaccgtggctgcatcccctccaaggcgctcatcaccgccacccacaccatcgacaccgtgcaccgtgcggccgaactcggcgtcaacgcctcggtgaatggcatcgacttcggcacgctgcgcgactatcgcctgcgcgtggtcaagacgatggtgggaggactggccggactgctggcccatcgcggcatcaccgtgttccgagccaatgccgcgttccatgcggatgagatcgctccagcaacttccaaccacatcgtccacctcgttccctcccccgaccaaagcgacatcctcacctatcacaaggccgatgtccccgaacccagcggccccacgatggacctcacggccacgaacatcgtcatcgccaccggtgccaagccacacccattgcccggtaacccgttcgccggcgccctcatcgactccacacaggcgctggaagtcaacgaatttccctcttcggcggtgattatcggcgccggggccatcgcccttgaattcgcctcgatgtggaacgccgccggttcgaaggtgaccctgctgattcgcaaggaccgcgtgctctcagcctgggaccggagagccggcaccacgctgacccgtgagctcaaacgtcatggcgtgaacatcatcacccgcgccagcgtcacccatgtggacaccggcgcgaaccttggtgccaccgtgcactacacgcgcgaaggccaggacggcgaacagagcgtttggggcgaaatcgcccttgtcgccatcgggcgtgacccgatcaccgacccagcatggggcgtgacgattgatgaccacggacatgtcgccacggatgcgtacggtcgcaccgacaaaccgggcgtatgggcggtgggcgacgtgacggccggtcacgcactggcgcatcgtgcttttgagcaaggcatcgtcatcgcggagaccatcgccggactcaatcccaagccggtggacgaagccgctgtgccgcagatcgtgttctccttccccgaagcggcgtcggtcgggctcaccgtcgaacaggcgcaggcgagagaggacctcgtcgaaatcaaggagaccaactatccgatgctggcgaacgcgcgcatgctgatgagcggcacggccggctcattgaccatcgtctccggctgcgacgcggccaacccggacaccccgcgcgtgctcggcgtgcacatggtctccccgatggcctccgacatcatcgccgaagccgaacagctggtcggcaaccatgtgccgctcgccgacgcagcccgcctcgttcacccgcatcccacattcagtgaaacgctcggcgaggcgctgctcaaggccgacggacgaccgttgcacacacgctgagaccgaccagcacaagcaagttcggaccagcgcacctgataagatattgcccagtgtgtttcgtcccaacaaaggaagaagtgatggcggaaaaggacgcgaagccgaagaagcagagcacaatcaagcagatcatccagatctacaagtacacggctaaggaagacaaggccctgccgtggcttgaggccggtgctttcctgctgcctgtagtcgtgatgatcatcatcggtctgattgtcaagtggacctggctgacctggatcttcaccatgattaccgccatcatgctcggcattctgctggccaccatgatgctcacccgccgcgcggatgcagtcggctacaagcagattgatggcaagccgggtgccgccatcggcgtgctgagcaacatgcagaaagccggctttgacttcccgcaggaaccggtgtggatcgacccgaagaccaaggatgccatctggcgcggcacttcgatgaacggcatctacctgatcggcgaaggcgaatacggtcgcgtcatgaaggcgatggatcgtcaggaacgcgatatcaagggcgtcaccgccggctcctccattccgatataccgcatcgccgtgggacacggccccaagcaggtgccgctgaccaagctgcgtagcacggtgatcaagtccaagagctatgagcccacgcaccacaagaacgcactgatcgccaagattcatccgcgccgtcgcttcctgctgaccaaggccgagatggaaacgctgaacgatcgtcttcgcacgctgcaggccaagaagggctatgccatccccaagggcatggatccgaaccgcccgcagaagatctcccgccgcgcgatgcgcggtcgctgatcggcagcacacaaccaaatcgcacagaagccccggaatccgttcaatcggttccggggcttcgtcatatgtctcataatcgcgtccacttacatccacctacgtcacctgtcaatacccactgtccacgttgcggacatctctacctactcccccgatagtctccgtttccattctgtaatggtgtttcgttgaaataacgcgcctgcgcgattgtcggccacagtcacgaaacattctcgtaacccaagtttcgagccggcgaaacgcgctattttacgatatataccgttatatctcatacgaaaggagcggtcccgtgaccgaactcaagtccaaggaagacgtcgaggcccttatcaacaaggaaggcatcgagtatgtctccgtccgtttcaccgatcttatcggcgttcagcagcacttcaccgtgccggctagcgaattcctgaaggacgctttcaccgacggcatgccgttcgatggttcctccgttcagggcttccaggccatcaacgagtccgacatgaagctggtcccggacgttgagacctctttcgttgacccgttccgcaagcacaagacccttgacgtggccttctccatcgtcgacccgctgaccgacgagccgtactcccgcgacccgcgtcaggtcgccggcaaggccgaggcctacctgaagtccaccggcatcgccgacaccgcatccttcgctcctgaggccgagttcttcatcttcgacaaggtgcgtttcgagaactccatgcagcgctccttctacgaggtcgactccatcgaagctccgtggaactccggcgttgactccgaagaggacggcaccccgaacatcggtttcaagaatcgcgtcaagaagggctacttcccggttccgccgattgaccacacccaggatctgcgcgacgatatggtcgccaacctgcagaaggtcggtctgatcctcgagcgttcccaccacgaggtcgccggcgctggtcagcaggagatcaactaccgcttcaacaccctgcagcacgcaggcgatgacctgatgaagtacaagtacgtcgtccacgagaccgccgctctggccggcaaggctgcgaccttcatgccgaagccgatcgccgacgacaacggcactggtatgcactgccaccagtccctgtggaaggacggcaagccgctgttctacgacgagaagggctacgctggtctgtccgatctggctcgctggtacatcggcggtctgatcaagcactcctcctccgtgctggccttcaccaacccgtccctgaactcctaccaccgtctggtcccgggcttcgaggctccggtcaacctggtgtactccgctcgtaaccgttctgccgccatccgtattccgctggccggcacctccccggctgccaagcgcatcgagttccgcgctccggatccgtcctgcaacccgttcctggccttctccgctcagctgatggctggcctggacggcatcctgaaccacatcgagcctccggagccggtcgacaaggatctctacgagctgccgccggaagagcacgctggcatcaagcaggtgccaagctccctggccgaggctatggacgccctggaagaggaccacgacttcctcaccgccggcgacgtgttcaccgacgacctgatcgagacctggattggcctcaagcgcgacgagatcgaccaggctcgcctggccccgaccccgctcgagtacgagctctacttccacatctgagtttgagagcttagcaacgttgggatttcgccattgctcttctcttgtgggagtctaatgggagtcattcagcgtaactagaaagaacctcgtgaaattcgtttcacgaggttcttttttgtatgttgcgttgtgtgttatgcgatgtgtgttgctcctggaatattccaggggcgggccgctacttagtctcccaacgctccttgagtacataggcggcggctttgggctgacggtcgcgagtgaagacgtccttcttgttgccgtcgacgcgcatgatgccttcaccggtttggaagtcgcagaggttccatacctgctcgcccaccactgcctcgaacatgtcgaacacttcgtgctgcatggtgaggtactcgcattggtactcttcactccattgcacgctcggcagcttgtgcgcaccggcatcggtgtccgcaccgtattcggtgaacagaaacggcttgttgggttcggtgttcatccattggttcatctcgttgatgaaggccttcttggctccgatgagctgatatccatcttgcacataccagccgtaataccggttcaggcagatgacatccgcgaactgatggcacttgtctttgcctccggcggccatcagcagattggtgtaggtcagcgggcgatgctgcggatcgagcgtgcgcgcgtaatcgaatatctccttgaaatacggcacggccgcctcggatgccgagtcgttggcggcgtcgatgagattccaagcgccggaggcccccggcattcttttcgtcgaaggggacaattcagaacacaactgccgacacaatcgtcagggaggccagcgagaacagcgtgcttacaagcacgaagccgaccgcatactcgggcatgttgttcttgcgaccggtgaacatggcaatggtggtcatggtcggcagtccggcgatgaccgtgatcatcagcaccatgtcatgggtgatcggcagttgcggcaatgcgccggtcagcgcggtcagtagcgcgtagaaggcgagcgggaatgcgatcatcttggcgactaggccagcatagagttcgtagcgtttgaggacgccccaccacttggtcagcgcgaacaggccgcccaagtagattagcgacatcggcgtggccatattgccgatggtgtgcagcggcttcaggatgatgtccggcaccttgacgccgagcagaatcagaatcagggcgagcatcacgccgacgaaggcgggattgacgaatcgtttaagcaggccgaggacgcgggtgcctggcgaggggcggacgacggccggagaaccaccgtttgcggcattgctcgccgaaccagcattgcccaccgaaccggcgccgttcaccgaaccgttcacgaccgcacctcgcgcgccaatcgcgttgccgccagtcgtttcgtcgaccggctcgcacagccatacgccgtacgtccagagcagcgtctggtcgatgatcgacatcagcgccacgtaaatcgcgccgttctgcggccaaagtgccataatcaacggaatgccgatgaatccggcgttgccgaaaataagcgacgcctgaaatacatggctacgcgaacctttgagccgcaacagttcggcgaccagccagaacatcaggatgagcagcgcgtacatcacggcggtcagcagcatcacgccccagttggcggcaagctgcgcgcggtccgcgccgtcgacggcgttcgagaacacaagcacggggatgagcacgttgagcagcagcgagcacatgccgtccaacgccgtctgaccatagaaccggagcctcacacatccgtatccgaccatcagcatgatcagaaatccgactaactggccaatcatgacgccgaactgccccatgcacactcctctcgtttgctctcccgcgatttcctgtcactggttcatataggcagccatctggacaggctcggcggcacacgcatcagtatgttcgataccaccacatgccaatccacttctcgttcaaccgttccccgtgctaatgcgccgccggccaccccgtgttgccggtgctgcgcgagcaccgctacgtgtattgcattccggtggccctcgggcgcaacgtgtgggtcggcgcgaacgtgtcgattctgtcgggagtgaccatcggcgacaattgcgtgattggcgccggttcggtcgtgacacattccatccccgccaactccgtcacctacggcgcgccctgcgaggtcgtgcgtgaaatcggcgacaaggaccgcgagtatttctacaaaaatcgcaagctcgacgtgtgggagtgagctttcgcgctactgctctttgagcttaaaacgctcactgaattggcggtcgcgccagtagtagacgtcgtcgcgttcgttgatttcgcgaattaccttgcacgggctgccataggcgaccgtgttggcggggatgtccttggtgaccagcgagttggcgccaatgaccgcgttgtccccgatggtgaccccgggcagcacggtgacattcgcgccgatccagacgttctcgccgatgtggactggcaacgaatactgggcaccctgatagcgcaggtccggacgcacgggatggccggtggctacaagcgtgacgttggggccgatcatggtgtgggatccgatgaagatctcaccatcgtccaccagcgtcaggttgaagttggcgtaacagcgctcgccccaataagtattgcagccccagttcgcatacaccgggcattcgaggtacagaccctcccccgccgcgccgaagaacgcctgcatgagttcggtacggcgcttcgggttggtcagcggcgtggcgttgagttcgagctggagatcacgctgggcggcctgcagatcaaaaaagccgtccacatcatccggcaggtagacctcgccagagaacataagcgccattttctcgcgcgtcgcatcatcgataatcggcttggcgatcggcttgtcttcggtcatcattggctcctgttcggcgttttggcgattgtgtcggtcgaactattctgtcacagactcgttttcgacacccagcatcgagcgcagccagtcaaggattcagatgtgcgattggcaccgtgcgggcctcacacttttcttattgagaacgattcgccgtgcagtcaagccctccatccacccaaaaaggactcgcttttgggcgcgtcgtcgcggtaggccttgccgaactcgtcaatgagcccatggaattcctgcaaatccttgacactgaggttcgtatccagcaccacgggcgaataggccctgtggaatgccggatagccggccggcacgtcgaatccaaggaaggcgaacagccgccgcgcgtaggtatcggccacgaatgtgcggcgcgagaacacgtacagcatcagatcgtcggccgtctcgccgccaataccaaataatccaagcaactcggcccgtaattcggcatcggaaatagccgcggcaccctcgggcgcggccccgcaacgctccacataccaccaactcagcgactgtacggtcttggatttgttgacataaaagcctgacggtcgaatcagttcctgcaaacgctccggctccatggccaccagcttatggggttcgagcacaccctccgcgttcaacgccgcaagcgaacgattcacattgccccacgccgtattctgcgtcagcaccgcgcccaccataatctcgaacgtggtctccgccggccaccatccggtcgggccgagtgcgtcagccatggtgcggtacagcaattcgatgcgctccggcacaggccacttgtgtgcctggttggctttcatacgtttcatattctgcattcaggctccgtattagccatccgccattcatttattaggtcgattatgcgttcattaggtcacttgtgatgaacactgccttcaagaatggcttcattccaatgctcattatctcatgctaagcagggcaccgacctaatgaacgcataatcgacctaatgaacgcaacggtaaggaaaaactacagagattcagcgagatatgctcggtccacctggtctggaagtcgaaaatcttgatgacatctaccgcaattcgtgcaggattcgccgcatgaacgggatagtgactaggaatgtcagcacgtcggacaccgattgggccatttccacgccgagcacgccgaacatcatcggcagaatcagtacgatcggtgccaaaaacagaccttgtcggcacagggccaggaaggaggcgatgccggtgcggcccatggtctgggtcatcatattgcccatcatgttgaagccgttgagaatcaccgtgcagcattggatgtgcagcgcggccacacccaccgcgaccacggccgggtcggagcggaagatctcgaccagttgcggtgcgaacacccacagcaacaccgccaacaccacgagcacgcaggtggcgagccgcacgcagaaccagtacccttctttgacgcgcgcgaacaggccggcaccgtagttgtagccgcacaccggttggaaaccttggccgaggccgacgatcaccgagttggcgcccagcataatgcgcatcacaatggccatgccggcgatggccgcatcgccgaacggattggcggcaatgttcacgcaggtcacggaaatcgaaccggcgccttggcggatcagcgagggcaggccaccgccggccacttcgcgcatgagcagcacatccggcctgcaattgcgcagggacagtttcatcacgccgaatttgcggctcattgtggtcaaaatcgtgaagctcaccgtctggcagatggcggtggccaggccggcaccaaaaattccgaggtgcagcacgaagataaacaacggcgcgagcaggaaattcagcaatgcgcccgaaaccagcccgatcatgccgaacgccgattgcccttggtatcgcagcagtccgttgagcgcgaacgacccgcatacacagggtgcggcgaccaacaacggcgtcaggtattgcacggcgtatggggcgattgtcgaggtcgatcccagcatgacgaccagcggccgcagggtcagcaatccgattgtggcaatcaccaaaccagagagcaccgcacccgcgaagcccacggccagtagtcgggaggcgcactcattgttctgtttgccgagttcgcggctcatcgagttgcccgcgccgttgccaaagaagaagccgagcgcctgcatcacggtcatgatggagaacgcgatgccgatggcgccggactgcgcggtgccaagctggccaataaagaacgtgtccgtgagattgtaggcagtggtcaccagattggagatgacggccggcaagcacagtttgagaatcagcggcttgaccggctgcccggtcatctgccgatatttcgcgtccgcgcttgcgcgtctaatgccatgaatctgcaccatggacggctatcctactcgcgcagggtcctatgcaaaggcgcgttaccgccatacgagtcagcgcagataccgcccggtgatgctgttcggattggccgcgatttgttccggcgttccggtggcgacgatgcgtccgccgctttcgccgccgcccggacccatgtcgatgatccagtccgcattggcgatcacgtcaaggtcatgttcgatgaccacgactgttgcgccgctcgccacaagccggtcgaacacgcccagcagcacacgcacgtcgaacgggtgcagaccgatggtcggctcatcgaacacgaataccgcgtccgattgggccttgcccatttcgctggcgagtttcagccgctgggcttcgccgcccgaaagcgccggcgtcggttcgccgagcgtcaagtagccgaggcccaagtcgtgcagggtggtcagacgtgcgtgaaccttcttgaggtcgctggtcacggccagcgcctggtccacgctcattgccatgagttgaggcaggctcagggaaatgttgccgccaccctgatccgtcgcctcactcaatttttccttggcagctttgcgcttatccgggaccttcatcttcgccgctttgcccttagccgctttaacggcacgccgaatcgcgccggcttcgggcgcataccgggatccgccgcaatccgggcattcgatggtaacgtccggcaggaactgcacgtcgagtgagatcgaaccggtgccgtcgcacgtggggcaacgcagtcggccggtgttgtatgagaaatcgccagccttccagccgcccgccttggcgccgtccgtgcgggcgaaggcgcggcgcaattcgtcgtgaatatcggcataggtggccacggtggagcgcacgtttgcgccaatcggcgtggcgtcgatgagattcgcgcgactgatgcccgcggtctcaagctcgcgcacgtgttccggcaacagctcccccgccgcctgcgctttgagtgcgggaatcagcgattcgagcaccatcgtggttttaccggatccggagacgcctgtcaccgccacgagccggccgcgcggaatatcaacgtccagcggcttgaccgtatgcaactggctggttgtcatgcggatgtggccaaggtcgaacacctgcggttccgccacgcgctcacgaatacgcgcgtttgcctgatctgacaggaacggtgcaatgcggctgcctggattcgccgccacctcgccgaccgtcccttgcgcgatcacatgccctccttcggcgccggcaaccggtcccatttcgataagatggtcggcggccttgagcacgcgcacgtcatggtccacgaccaccacggaattgccgtccgccaccaagtcatgcatcacgccgagcagcccatccacgttcgagggatgcaggccaatggacggctcgtcgagcacatacagcacgccggtggtgcggttgcgcacggcacgggcgagctgcacacgctggcgttcaccggttgaaagcgtggcaccggcgcggtcaagcgccagatagccgaggcccagatccaacagtcggcgggccacgtccaggaatgattcgcagatgttggtggccatcgtccgcatgtcggcaggcagggattccggcactccgcgcacccaatccaccgccgcatccaaggtcatcgcgctggcttcggcaaggttcagcccgcgcacgtgcggagcccgggcggcgacgctcagtcgggtacctccgcagtcggtgcatgggccttccttgaggaaccgggccacgcgcttcaggcctttctcgtccttggctttggcgagcgcgttctccaccgtgtatacggcgttgaagtaggtgaagtcgagttcggcgaaatcgtcgcctttcttcggcttgtaaagaatatgctttttgacggccggcccgttgaatacaatgtcacgctcttcgggcgtgagctcgctgaacggcacattggtgcgcacgcccatcgcgccgcacacctgcttcatgaggtcccacatgagcgaaccccatggcagcaccgcaccgtcgtcgatacttttcgactcatccggcaccagggccgcacggttcacttcgcgcacaatgccggttccggagcaggtcgggcaggcgccggccgagttgaaggcgagcgattcggcgccgggcgcgtggaattccttgccacagctgacgcaagtaatgggcagtccggccgccacgttcagcgtcggttcgttgcgcgccccgcaatgcgggcacacgtgcgaggcgacgcgggagaacaggagccgcagactgttgagcagttcggtcatcgtaccgaacgtcgagcggatgccaggcaccgtgggccgctggtgcagggccagcgcggccggcacatgcagcacttcgtccacttgggcgcggctggcctgggtcaggcgacggcgcgtgtacgtggacagcgcttccaggtaacgccgcgaaccttccgcatacagcacgccaagcgccagcgagctctttcccgaaccggagacgccggccacgcccaccagttcgcccagcggaatgtcgatgtcgatgttcttcaggttatgcacgcgcgccccgcgcacttcgatcgcctgcggccgctgatcgttgctcatgctcggcactgctccgccgccaccctactgtctgacctattatcaagcgtcacgccgttacctctttctcgacctcgccctagaccgccgccgcacgagcttcatggtctccagtatcatcacgaccaacgacggcagccgagaggctttcgctattgagcaccgcctctcgcatgcagttcgccgcgtcattaccgaaactatccgcgtttggcataatgagttcacgggcggcgggcataatggcaatagaagtccatccacaccgaaggagccccgaggatggaactgcgcgtcctgcgatattttctggcggttgccgaggaaggcaatatcacatgggccgcgcagttgctgcgtatttcccagccgacgctctcccgtcagctcaaacaattggaagaggaactgggcgtcacgctgttcgaacgcggcagtcacaccatcacgctcaccgaggaaggccggatgctgcgcgagtgtgcgcagaccgagtcaatacgagttcctgcgcaccggcattacaaagcactggtcagcgatggttcccggaaaccacccgctggcggaacgcgaatcgttgaccccgcagaatctcaaggatgtgccgctgctgttcccggtgcgcacgcccatacacaatctgctgctgaactggttcgggcaatacgccgatcaaggcggagctcaacgccgggtatcacacgccggaacgcacccatgagcttttcgaggaactggtgagccatcctgttgaccccacgttccggttgaacgcgccattccgcaccgacttcggccgcgacgaacacggcacgcagggagccgtcaagcgagggcgtgaaggtggcgaccacaccgaatacggccatgccgatcgcgccgccgcgcagaccggcagcttcgccaaggccggccatcgcctgcatatttccacaccggcggtggccaaacagatcaatacgttcgaaaaagaatacggtctgacgctgttcgaccgatcgcacagtggagtgcaactcaccaaagccggcaaggagttcgtcgaggacgcgcagatgatcgtgcgccaatgcgaggagattctacgccgtgcacaacggcgcagcaccgacggcatcgccaccgtccgccttggcgtttccatcctgcaccccggccgccgcatcctcgacctatggcagcgcgatgccggcaaacacaccgacatccgcctggaactggtgtcgatgcccgatgactccgaagcgatcaacgacatcgtcacccatctcggcgaagacgtcgatctgatatccacggccttcgacaccggctattgggacgacaccggcaacaccctcgccctcgattccgagccgctgtgcgtggcggtgccgcgcaatcacgcattggcgagacgcgcacggctcacattgaaagacctcgaaggcacacgcatccgcatcctcaaacgccatcgcggcgccaacgacacggcccgggacctgctggaacaatatccggccatcgatctgatcgacatcgaccattacgacctcgacacgttcaacgactgcgccgaatccggcgacctgctcatctccaaaccgatgtgggccggcattcacccgcagctcgtcaacgtggccgtggactggcccgaaccggtcatcatgcactacggactgctctacccgctcgacgcaagcccggcgattcacacattatggaatttctcgccgcagacggagatctcgaaccgtgaccgtccaacgaaaccgcgccgatgctccggcgtgaagtgcggtaatctctaagaaaaggccattgtgtcgagatggcggggcaacgggcagcgttgcggatttgggctgaggccccgtcgcttgcggtgttacatattgtgacgatgaggagggcagcatggaggccgcagagagcaggcagccgacgattttcgatgtcgctgcggaggccggcgtctccaagtccatggtttcccgcgtgatgcgcggcgaagggggcgtgcgtcaggagaaggtggaccgtgtgctcgccgcggcgaagaagcttggatacgtgccgagcgccatggccagcgggctcgcctcgaagcgcacgaaaacgctgggagtggtggtcaggaacgcgaagctgcctttctatgggttccttcagggcgccatgcagaagcgggcgcgtgagcgcggctatcagatggtgtccatcagcggcgtggaggaactgtccgcggatgatgcgcgccaggcgctgcgcgatttgatcgccctgcgcgtcgaggggctgatcgtatgctccgccatgcttgcggtggaggatttcatgccgttcatcgaccggatcccgttcgtgatggccgggcacgaggacacgacgtgcaccgtgtcctcggtgttttgcgatgaggaggacggcggccgcaggctcgcgcaatacgtccacgacttcgggcaccgggaggtggcggtgtttctggtgcccagggaatactcggtcagccagtacggccgcggcatggccatgatcgagctgctcgggcagctcggcatccgcgtgaaggtgatggatatgaaaggggccgaagaggttggaacgctggtggacgaggtgctgtgccatcccaggatcaccgcgtatatgtgtccgtccgacgtggtcatgctcaatgtgatggacgagttgcgccggcgcgacgtttccgtgccgcaggatgtgtccgtcaccggctatgacgggtttggcccgctcgcgtcgccgtaccttggatttaccacatatcggcagcctttggaggagatcggttcccgcgctgtggatctggtgctcgagcgtctggatggcggggaccacgccgtggaggcgctgccagtaaagggggaattcatccacgggcgcaccgtggcgctgccacgttggaaagacgggcgatagacgggcaataggcggaacggaagccgcatcccgcgccgcaatcccatgcacccgcgcgtggtggcgacggagcgatagcacccgtcgcccgaggatgcatcacagtggcagcagatcgagcccgttggctgcggcatagcccaggatccaggccatgggcagggttgccgcccatgcgatgaggatcctgcgcgcctcgccccagcggaccttgcgccagtcgttcgtctggcaggtgccgatgagcgcgcccgatatggactgggtcatgctgaccgggcttcccagcgccgagctgacgagcacggcggcggaggccgcccacagggtgacccagatctgccgggaatccggcacgatggtgccgcgctgcaatgcggctgctcccttgggcatgccggtgagcacgccggccaggaacgtcgcggcgacgattgcggtgatggcggcgctgtgcgtggcagttcccaaatcgactcccatggcagtgccgaacaggacgatcatcttctgcccgtcattgctgccataggcgatgcaggtgagcaggaatccgaggaagaccatggtggtcgaggactgcggggttctggattggaacagcaggtagatggtgcgggagacggcgaacgccaccagaggcgaaagtatcgctatcccgaggacgcgcagcaccagatgccattggggatgtccgccggcgaagccggctccggaggatgctccgaccagggcgagcgtgatcgaggtgggcacgccgcctccgttgagcgccagcagggtggccgatgcggcgacgagcaccgtcgccagcaggagcggactttgtccgccggatccttcggaggagaccatggcgacgatggttcctccgactcggctgttggcggccggcagcaaggccaccgccgtcgccagcatcaggaagggggccgccgtgacgcggcgcgcggccttgaggttgatggccaccaggggagacccgtcgttccttcctccaagcaggcagaacaccaatgccaacatgggaataacccacatatctcaccctccttgctgagaacgctcccaatactgtaattattgagtttataaatattagcactgaattcagcgaacgttcatctttagcctgaaatggctgtatatcgtcgattagactttcttatgtcgaaaggatatactatgaatcactgggagcgctccgaagatggagtgacccccccccccatacaacaacggatatagatagcagcaaatcagcaactcgatacgccgcgtccgtcatcggaacggctgcggctcacaaccaaaagacgtaaaagggtattacccatggctctcggcaaggcaatgccggagccggagaaagaaaggaagcgcgagatggcgtcatcaacccatttgtcgcaatccccgcacggcgccaagacgcacggcggacgcacggcgaacgttctcgttgcgaagaatcgcctgaccggtgcggtcatgctggttccggcattggcattgctggtcgtgttcgtgttcggcccgctggtgcgcgtggtgatgatgagcatgcagggcacggacatcttcggttcgccctcaggcttcatcgggctggagaactacaggacggtcttcacggacccggcgtttgtcaaggtgcttatccagacgttcctctacgccgtgctggtcgtggcggggcgcatcgccttgggcgtgctgctggcgattctgctgacgaggcacatcatgggcatcaagatactgcgtgtggccacgacctcgatcgtcagcgtctcggtggcggccgcatcgctgggcttcctggcgttgttcggttcgagcggcgtgatcaattcgatcatcgagaaactgggcatccggccggtcgggttcctcaccgacgcgaagtgggcgttcttcacggtcaccttggtgaccatctggaccggtctcggattcgcgctgatcctgttgtgcgccgcgatcgacggtgtggaccaggagatcctggaggccgcgcgcatcgacggcgcgaacgaagcccgcatccagtggtccatcgtgctgccgctgatcacaccgacgctgttctacatcgccgtgaccacatgcatcgaggccctgcaggcgttcgcccagatcaacatcctgaccaagggcggaccaggccaggcgaccacgaccatcacctacaacatctacaccaccgcgttcaacgcgggcagcgcgaatttcggcatcgcgtccgcactgggcatcgtgctgttcctgttcgtgttcgtcctgacattgctgcagttccgcttcctggaaggcaaggtgaactactgatgatccgcaagacctcccccgtgagccagggcctgtgggccgtgctggccctgatcgtgaccgtgctggtcatgctgccggttctgtacatctacgtcggcgcgttcttcttcgacgccaacggcctgttcaagggcttcaccctgggcaatttcatgcgcgccatgtcccagatgcccctgacccagcagctgggcaacagcatcgttgtgaccgtctgccagaccgcgggccagattgtcaccgcgttcctcgcggcctacgcgatcgtgttctgcaacctgaggcgcccgggcatgtggatgatggtgttcctcatgagcatgatggtccccggcgagaccacgctcctgtcgaactatctgaacatcgccaactggggcctcatggacacgattccggcgatcttcctgccgttcctcgtgcagggcttcaccgtgttcctgttccgccaggcgttccgctccttccccaaggagctgcgcgaggcctccctgatcgacggcgccggccacctgaggttcatggtcgacgtgctcctgcccatcgtcaagcccaccatcatcgccgcgaccatcaacgccatggtcgccgcctggaacggctacttctggcccctgctcgtgaccaacaagcccgagcaccgcaccatccaggtcggcatcacccagctgagcggcactgacggctccaacatcggcgtggtcctcgccggagcggccatcgcggtcatcccggccatgatcctcacgctcatgttcaacaagtccctgcgcggcatgagcgtcgcgggcagcatcaagtaacccctggccgcggccgtccacgcgacggctgcggatcgtgggccgatccccatccgtacgacacaagaaaaaccaacaaaaccattttttccggccggcggccgtcgaaggccgtccggcgcaacgagaaaggaaacctatcatgaggaagtcaaccctgctgaaggcggtcgccgtcgcggtcctgcccatgctcgccctgtccgcatgcggatccacgtcggacaccaacgccgacgccaagggcggcgagcagaccgtcacgttctggtactcgaactccggtccggccgtggacgccatcaaccagctcgtctccgagttcaacgacgcccacaagggcaaaatcaaggtcgaggcctcctaccagggctcctattctgacgtgcagcagaagttctccgccgccgtccaggccaagtccaccccgtcgatcctgcagatgaacgacacgtccaccggctacatgatcgacagcaagatgaccaccccggtctacaagctcgccaagggcgactccgatttcgacaccgccgacctgcagcccgtggccctcaagtactacagcgacgacaacggcctgctgtccctgccgttcgccatcagccagcccgtgacctacatcaacaacaagctcgcccaggaggccggcctggacgtgtccaacccgccgaccacgttcgacgaggtcgtggactgggccaacaccatccacgagaagaccggcgcgtacggcttctcgatgaacatggtcgactcgtggattctggagatgctctccgccagccacggcgagctcatcgccaccccggacaacggccgcggcggcaaggacgtcaccggtgtgaacatgacctccaagactcagctcgacatgttccagaagatcgttgacatgttcaaggacggcaccgccctgaaccccggcaccgactctagctccatgatgaccgcgttcacctccgacaagctcggcctggtcctgacctcctccgcctcctacacgtccctgctgcccggcgactccacctcgaacgtgaccgtcgcccagttcccgcatgacgcctcgaacaagaaggccggcaccccgatcggcggcaactccctgtggatcgtggccgccgagcactccgaggccgagcagaaggccacctgggaattcggcaagtatatgatggccccgcacgcccaggccgtgttcgccaaggcctccggcaacctgttcgccaacaccaaggccgccgacgagaccgaaggcaaggaggccctggccgacccgaacgtcaaggtcttctacgagcagctcgaggccaacccgtccaccagcgtgtccctgggtgcccgcaccggcgcctacccgtccatccgcaaggacgtgatggcctccttcaacgaggtcgtcagcggctccaaggacctcaagaccgccatgcaggaggcccagacccagtccgctaaggacatcgccacctacaacaaggccgcaggcaagtaaacacccgcgatacccgcaacccaatcggccttcccgccccggtcttctctcccggggcgggaaggcccgtatcacccatagcctcccggcagcagcaaaggagccgacatgaacaccgcagccacccccattcgattcggacgcgaacaatacgcgcagatcaacgccaatctcaaccaggcatgcgcccgctcgccgttcgtcatcgccgcccaccgcggcaccccgcgcggcgacattcgcgagaacacgctcaacagcgtcctcgccaccaagcaagtcaacgcagacatcgccgagatcgacgtaatccgctccaccgacggcgaatacttcgcgttccacgacggcactgaaatggcccgtctacgcatcaccgacgacatcctgtccaagactgccgccgaactcgacgaactgcgctacaccgaataccccggagcctactacggcaacgtcgaacgggtcgcgcacatcctgtccaacgcgcccgacatcctcatcaacatcgaccgctcctggcgctactggggcagcggattcctcgactggctcgaccagttccacctggaaagcaagctcatcctcaaatgccccgtcaccggaggcttccagcaggccctccacgaccacgacgtcaaatacatgttcatgggcatgatccagaacccagacgaactcgatctgttcgtcgacgacgagcagatcaacaccgtcggcgtggaactcgtcgccaccaccgaggacaccccgctcgccgaccccgcgatcttcaacaggatcaacgaactcggcctgtacacgttcgtcaacgccctcgacctgggcaacggatactgcggcctcaagggcatggacgacacccgttccatcctcgaaggcccccaggcaggctggggcgccctcctcgccctcggcgccgacgtcatccagaccgactggcccgagaaactcgacgagtatcgccgggtcatcgcctgattccggcggttctccgcgatttcccctcagcggctcctctgcgtttccggaccagcctgaaacggcgcccgttctgggctggtccggaaacgcagaggccgctgccttcgccgcgacaacgaacgaaagaaggtgccacaatgccgtggttcagcgtcaagaacgcgctcgcagaggatcccgtcatggggctgctccgggaacaggtgacgacaacccgcaaaggagtgtccatcgcgttggacgccgtcgaggggcatctgagcgtcgatgaatccagaaagagcgtcaacgatatcgagcacgagggggacgaggtccgttccaaggtcgttcacgcgttggccaaggcctggaccacgccgttggaccgtgaggatttgttccgtttctcccgatccatcgacgacgtgctcgacaacacccgcgatttcatacgcgagatccatctttggaaaggacatgccggcgaacacgccaatgtcgcgttgacccacgtgaacgtcgccctgcacgatctggaactcgccgtgaccgcggaaggcgccgacatgcgccgatactgtctcgaggccagcaaggaatccgcccgcgtgcggcgcgcctacgaatcggggcttgcagccgtctacaccggcgaaatgagcatggacaccctgaaaacccgagatctgctgcgccgcgtcgacgtcataggcctgaggcttggggagtcctccgacgccatcctcgacgggctcgtcaaacgcgggctgtgactcaccggaataccgcaaagggaaaggcgcgaatatgcgcaggaaactgattcttgatttggatacgggcatcgacgacgcgctggcgatcggatccatcttctcgcgtcacagacagtgggccatatacaacggcagcttgatgcgttctccatccacttcgagttggcggggatgcagaacgtattccttgcccaatcgttgggcataccttttgcggaatttgtcgagcgaagatacgccgtatcgtttcgtggatttcacttcaatcgggctgatgcgaggcttcatcgcggcattatcgtattcccgaacgatgaggaagtctatttccatggttttcgtggcatccgccctatccgagcgcgagaagaaatacagtttgcgcccattcgcccggaattgctgagccaccgcattctccaccagcatcccttcgttgagcgagagtttatcgaacagaatatcccggtacacatcatccggcgttgtctctcgatcggcaaacgactgcgacaccagcaaaccggtatccgccatatagcatttgaatgaatcgttatcttcgtacaatcccagccccaccaaagggtcagtcgaattacggcacaggttcaccaagcgggcgtcttccaaccagaagaacgccgaatcgtattcacgagatcgagcatccttgtcgaccgatgccagagtgaatcgtttctcacgcttggacagctgccctggaatctgagcgaaaatgccccgcacgcggccggcatcgccattggcgaacttgccgatatcatcactgtacagctgcaggatgccacgcttgatcaaatccacctcgccaaaatcgcgctgctcgacataatcggcaaccgcctgcggcataccgcccaccagcagatattcgcgccacagcctcatcgctcgtttgtgcagcgcatcgggcaacgggaccagacgctcgaacgatttgcgaatcgtttcagcaagcagctcctcccccatggcccagcagaactcctcaaaatcgagcggccccatgtccattttccgttcctcggaggggatgacgatattcgccacattcctcttgatggagatcagcgaaccagtttccacatagtcataccggccatccgcaaccagatatttgatgagctccctcgccgccggataccgctgcacctcgtcgaaaataatcaacgattcacgctcgtacagtcgcttgcggtaatacgcagacaacagcatgaaaaatgtgtcaaagtcatcacgctggttttcgaagatgtcgcgaacgtcgcgcggcaaacgtgtgaaatcgatgagaatatatgacttgtactgagtgcggccgaattcctcgacaatggtgcttttgcccacacggcgagcgccttcgatgagaagagcctcacgcccacccgctttttgtttccatgcgatcagcttatccagcatcttgcgcttcaacatgagcaatcacctcattacacgaaaacaacagtatgggcatatgctattctacacgaaaacagaagtatagaggtagccgattctacacgaaaacaacggtataaggacgcaagccgaaccggctcacccccaatctctcccccatcacaccggcggcctgttcgattgtgcggttttgtgcgaatggctcacacggttcttagtgagaaccgttctctgcgcacctgaccctagaaccggatcagcgccttgatgaccttgcgctggtccatcgcctcgtaggcgtcctggatatggtcgaggtcgtactcggcggtgaacacgcgaccggggttgatttcgcccttgagcaccgcatccagcagaccgtcatcgaggtcatagtggcgcacgggagccgggccgcccttgatgccgatgttgccgtagaacgtgccttcggcgctgatctccacgtcgtgcggcaggcccacacgaccaatcacgccaccgcggcgaatcaggccaatcgccgtgtcgaaggactgcttggagcccacgcattcgagaactgcgtccgcaccatagccaccggtcatctccagtaccttgtcaatagcctcttggccacgctcgggcacgatatcagtcgcaccgaattcgcgggcgagcgccgcgcgatcctcgtgacggctcatggcaataacgcgcgtggcaccgcgcatcttggcggcaatcacaccgcacaggccaactgcgccatcgcccatgaccacggcggcgtcaccgggcttgacctcggcagaaaccgccgcgtgataaccggtggacatcacatcggaaacggtcagcagcgaagcgagcgtcgcgtcatcgtagtcttccggcgaaccgggcaccttgaccacggtgccgtccgcctcgggcacacgcaggtattcggcctgacaagcggagaagtagccgccgtgcgggcacacggattcgaagccggccttacataccgggcacttgccgcagctgtatgggaatggcacgaccacgaaatcgccgggcttgacggattcgaccgccgcgccaacctcttcgaccacaccgatggactcgtgacccacctggctgtgcgcggcctgtccgctcagcccacgaaagaaccacaaatcagagccgcacacgcacgtgcgcaccacgcggatcacgatgtcatcatcctgttcaagcgtcgccttcggcacttcttccacggtcatcttgccaggctccacgaaaatcgcagctttcatggtttcagacatacgttcataactccttgttttccggcatcgagcgcttaagagccgttatcctcgtgttctattaaacaataatcgccttgcattaaccaataagccataaaccatgtttcgccatacccatgaggtatggcaacaaccgagcaattcactgcgataggccaatatccgagatacgctcactgttcgattcgtcgccatgagtaatctggagaaccggcgatgggacccgcctgaacttgtttcgaaccgcacactgctgatagttcctacacacgatttgacattgcatggaatcgttgtgtcttcagcaggattcagcggtttcaggaaaggctactatgggctcgcaatccccatccgcagatgcccggccgggcacgcgcacggccactcccccggcgcgcaagctccccgatatccatcttgatattgtgttggtcgtcttctgcggcggtgccatcggcaccgcgattcgctatgcgttcgcgcagattcccgcagccggcagcttccataccggcacgtttgtggccaacatgctggcctgcttctgctatgcgggtctgaccgcctatttggccggctcttcccggttcgacacgcgtgccaaggagctcaccagccgtgggctcggcatgggcgtatgcggcggtttgtctacgatgtcgacgttggcattggaaggcttcaccgcgattcgcgacggtcaggtggcggccggcattgcctatctactggtgacgttcgcgctgggtctggtttgtgcgtctgccggcgtgtgggcaggaacgcatctggccggctcctcgaacgcatccgccgaagcgtccgctgatacgaatgccgctacgaccagcaagggaggtaaggcgtgatgaccgtattcctaccaatcttggtctgcctgtgcggcggcgtaggcgcctcctgccgctatctgcttgacgcgaccatcaaaacgtattggcaacgcgcattcccgctgtccacattcaccatcaatctcatcgccggattcctgaccggtctggttgcggcgctggcactgggcgggacacttgatgaaccgtggcggctggtgctggccaccggtttcctcggcggattctccacgttctcgaccgcgatcaacgaaatggtgacgctcttccacaaacgccgctaccccacggcaacggcctatctggtgctgtcgctgggtgtgccggtcgttgctgcggcctgcggttttctcgtctgaccgccacgacgattcccgacgcggtcagcggtatcatcgcgaggtcgaacgtcacaggtacatccgggaggtatatgggcatggcgaacaatggagcggatgtgaagcacaatcagggcgcggacgtcacgaacgcctcggccacgacgaacactgcggaaaataccgtgggcacggcaaccccgaagcaaaatggactcgccgtgttgggcaagtatatgggtgtttccgccacgcagaccattgtggagtatgcgacgttcgccatcctgcacttgatcggcgtgccctcgcagatctccaacggtatcgccgtggtgtgttcggcgacctacaacttcgtgatgaaccgcaacgtgacgttcaaatcgtcaagcaacttcacccgttccgtgatgcttttcgtgctgctgtggatctggaacttcacgttcagcacactgctgatcggctggatgccgggcgcgacggacctgagcccgtatgtggtgaagttcattgcgatggcctgccagttcggctggggttatccgttgtgcaagtacgtgatttttaggtgacacattccaattgctcactgtcgttcgccttcgcctatttgtatttggagcgcttatcagaagaacagcatcgcaacacctgcggcgaagcacatgagcagaatcgatgtcaggaagctggcgagcatcggcttcttgcccttggaagcgatggccttgaagttcacgttgatgccgagcgcggccatggccatgccgagcacgatgtacgcaaagtccacgagctgcggggtgatggaggcgatgagcggcacgaaggtgccgatgatcgaagcgccgatgaagccgagcatgaaccacgggaaggccacagtcttcttgccggtgttctccacctcggagtgcttcttctcccaccagatagcgatgatgatggccgcgaacacgagcatgagcacgcgggaaagcttcatgatggtggcgatgtccaccgcgccgaaagcgtcgccggcggcgaccgcgtgggcgatttcgtgcagggaagcaccggcggtgatgcccagctggtccttggtcatgccggccagcgggccgagcgcgatctccagcaacgcgaacacagtacccataatggctacgatggccacggccatggtcacgtcgttgtccttctcgtcctgcttgtcctcaggcaccttgatggaaccggctaggcccatgacggcggccgcaccgcagatgccggtgccaccggcggtcaggatggcgagcatcgggtcgacaccgagcttgcgggcgatggcatagcacacgatgatggtcagcgtgacgaccacagctgcgatcggcagacacttgatgccctgcgtgaacagcacggcgaggttgagcttgaaaccgagcaggatgatgccgaggcgcagcagcttgttggaaatcaggccagcggcgtccttgacgcctgccttgcggccatcattggaaccgacgtaggcactgcggatcgggaactggatgatcataccgatgagcagcgcgatgataagcgcgccgaacaggctgaatccggggaactgcttgagccaggaggcgaacagcgaggccagcagagtcagaacgccaatgaacaacatgtcaacggtggtaatgcgcttccaccattttgtacagaactctctcacggtgtctattgaagctcaagcatttacatcggtcaaatcattgcaaccaatacatatcatcgattttgtcgatacctaattgatctccctctggtgagggaggtggccgccgcaggcggacggagagagagaaacaacgttcgcgacctcccctcagtcgactatctgactacccgcgcagcgcagcaataatcatctccgccaactcccgctgatcgtgcgtcagaccggatctcggcaccagcgcatagaaccgccgcacaaactcatcgccaagctcccgctgcaccggcacgcccgccggcacggcggcttccgaaatcaacgactgcccgaacccggcggacagcgccgccacaatcgccgcattactggacacttccatcgtgcgtgcaggcacaacctgagcggtcttgaaatacaaatccgtgtaataccgcacgccggaaccgtgctcgcgcaccatccacacgccgtcgggctcccccgccaacaccagccggtcctcgcacagggtgacgcggtccaccgaatcgttcacgatcggcttttccaccacgccgagctgcacggccttcatgctgacccgttcgagaatcgcatccgagttcatcacgtgtacggcgaagtcgaaactgtccatgttccgagccatcaccggcaacgccttcggcagcagaatcgccgcggtcgtgtgcgagaacgaaacggccagcggctcacgcgcctcctgcacgcgggcgatctgctcacgcgtatcccgccataatccgtcgatgccgatggcggtctggtacagcatccgcccggcctgtgtgggcgtcacgtcgcttttcgcattgcgcacgaacagcggcgcgccgaccatctgctccaattgggcgatacgcgacgacaccgtcgactgcgacaccttcagttcgtcggcagccagcgtgaactggcccacctcgtatacggcgaccagggtttcgagcagagggaacatggtttaactgtacgctgtatgatgcacgaatatttcaattagcttgggcgtagccctgggccacggacctggaccaccctcagtctcgctttgcgagccagctcccgccagcgggactccaatggttttcatatcactatgcttcgcgcagttttgcgagctgtgttttggccttgtggagcttggcatagatttcattgcgctgaacaggattcttgacgcgctgatggtcgcgggtgagcttgtccacttcggattcgagccgagcaatttcagtatggcgaatgatgcgcgcatccagattttcgatctccggcgtgcccagaatggtctgtgagcacagcgaggcccacagctcatcaatagtagagccggccagctccagctgggcctcccccgccggctgccagtcgccggcatatacccgatagatcggcgtgtggccggcacgccccggtatcgcccgacgcacggcgaacgcacattcctcacgtgtgctgccctcgaacggcacgtcgcgtacgcacacgaacacgatgcccgatttacgctgcccggcaatcaaatcgatgacctcgttcggtatgccagtggctttggccgtaagcttcagtccgatgaccaacacttccggaaccagtttgccgtccgcaagcccagtgttaatcgaccggaccaacgccagcatggtaatggattcgatttcgttcaccaatcgctgcttgagtttgcctgaaatcggtgccttgcccacgaacaaggctttcggcagtgtgcctttggcttcgggaatcgccgtggagacgggcagtcccagtgaaagcgcggatacggaaccacagtgtgcggcttgcgaaccagtcatcatcgaccttctttcccggcctgccatcagtgtcataccctcgcagtgcagcagtccgtttatctattggaaagcaacactagcgcatccaggccggaagtcgtggtacatatccatatcctgctgcggttataggaaatcccctccgagtttcctcgaaggggatttcttaagtcgctagttcaagcgaagattcttgtctgatgataatcaggcgaggatcttggtcacacgaccggagccaacggtgtggccgccttcacgcacagcgaaggtcaggccctcctccatggcgatgggctgaatcagctcaacggtgaaggtggcgtggtcgccgggctgaaccatctcgacgccttccggcagctcgatgacgccggtgacgtcggtggtgcggaagtagaactgcggacggtagttggagaagaacggcgagtgacggccgccttcgtccttggtcagcacgtagacttcgccctcgaacttggtgtgcggggtgacggagcccggcttggccacgacctggccacgctcgacatcctcacggccgaggccacgcagcagcagaccggtgttgtcgccagcctcgcaggcgtccatggtcttgtggaaggtctcgatggaggtgacggtggtctgctgggtcggacggataccaacgatctcgaccggggtgttgacggccagctggccacgctcgacacgaccggtgacgacagtaccacggccggagatggtgaagacgtcctcgatcggcatcaggaacggcttgtccaggtcgtgaaccggggtcgggatgtagtcatcgacggcggccatgaggtccttgacggactggacccacttctcgtggtccggagcgtcgtcgtgcagggcgccgtaggcggaggtgtggatgaccgggcagtcgcgatcgaagccgttctcgtcgaggaggtcacggacctcttcttcgacgagctcgatgagctcttcatcgtcgaccatgtcgcacttgttgagggcgacgaggatcttcgggacgccgacctgacgggcgagcagcacgtgctcgcgagtctgggccatcgggccgtcggtggcggccacaacgaggatggcgccatccatctgggcggcaccggtgatcatgttcttcacgaagtcggcgtggcccgggcagtcgacgtgagcgtagtgacgcttctcggtctggtactcgatgtgggcgatgttgatggtgataccgcgggcggcctcttccggagcggaatcgatctggttgaagtcgtactccgggttgacatccgggaactcctcgtgcagcaccttggagatggcggcagtcagggtagtcttaccgtggtcgacgtggccgatggtaccgatgttaacgtgcggcttagtacgctcgtacttttcctttgccattacttttgtcctcctggacgtctcgtgagtttcctgcgccctttcgcacagggactcgcttattctactgggtttctgggttatgtgccactttgaagagccagaacccagtcagcggtatacgatattaccgctgactggagacaccggccacttcatgatgtggcgcgtgtcactcgccgcgctgggccttgatgatctcctcggagacgctcttcggcacctcgtcgtaggagtccatctccatggtgaacatggcgcggccctgggtcttggaacgcaggtcgccgatgtagccgaacatctcggacagcgggaccttggcgtcgatgaccttgacgccgacaccgtcggtcatggactggatgttgccacggcgctggttcagatcgccgatgacttcgcccatgtactcttccggcgtacggacttcgaccttcatgatcggttcgagaatgaccggcttggccttcggggcagcttccttgaagcacatggaacctgcgagcttgaaggccatttcggaggaatcgaccgggtgcatctggccgtcggtgacggtggccttgacgcccacgaccgggaagccggcgagaacaccggactccatggcctccttgacaccggcctcgatggggccgatgaattcggcggagatgtggccgccggtgaccttgttctcgaactcgaaggtcttgccctcggtggtgtcgagcggctcgaagttcatcaggacctttgcgaactggccggaaccaccggtctgcttcttgtgggtgtagccctggtccatgacggccttgcggatggtctcgcggtaggcgacctgcggcttgccctggttgcactcaaccttgaactcgcggcgcatacggtcgacgatgatgtcgagctggagctcgcccatgccggcgatcagggtctggccggactcttcgtcggtcgtgacctggaaggtcggatcctcttcggccagcttggacagggcgatgcccatcttctcctgatcggccttggtcttcggctcgacggccacctggatcaccggatccgggaaggtcatggagtcgagggtgatcgggtcgttgatggagcacagggtgtcgccggtggtgacgttcttgaggcccacgaaggtgtagatgttaccggcgtcggcgcggtccatcgggttttccttatcggcgtgcatctggaagatcttgccgatgcgttccttcttctcgcgggtggagtcgagcacggagtcgcccggcacgacggagccggagtagacgcgcacgaacacgagcttgccgtagaacgggtgggtggagatcttgaagaccagagccgagaacggatcggtcttgaccgggtgacggtcgatctcgacggactcgtcgccgggcttgtagcccttgatggccggcacatcctcgggggacggcaggtagtcgacgacaccgtccagcatcggctgaacgcccttgtccttgaaggcggagccgcagaagaccgggaaggcttccttggcgatggtgagcttgcgcacgccggcgcggatgtcttccttggacaggtcgccgtcctcgaagaactagttcatgagttcgtcgtcggcttcggcggcggcttccacgagcttctcgtggtactcctgggccttgtccttgagatcgtccgggatctcggtggtgtcgtacttggcgccgagctcctcggtgccgttccacacataggcctgcatctcgaccaggtcgacgacgccggtgaagtcgttctcggcgccgatcggcagctgcatcacgatcggagcggcgcccagcttctccttgatggtgtcgacggagtagtagaagttcgcgcccagcttgtccatcttgttgatgaagcagatacgcggaacgccgtacttgtcagcctgacgccacacggtctcggactgcggctccacgccttccttgccgtcgaacacggcaacggcaccatcgagcacacgcagggagcgctccacctcggccgtgaagtccacgtggccaggggtatcgatgatgttgatctggaacttgtccttggtgtcgtgggactgacggctccagaagcaggtggtagcagcggactggatggtgataccacgttcctgctcctgcgccatgaagtccatggtggaggcgccgtcgtgggtctcgccgatcttgtagttcttaccggtgtagaacagaatacgctcggtagtggtggtcttgccggcatcgatgtgggccatgatgccgatattgcggacgtcgtggaggtccgaaatctcttcagccatctttttccttagttttactcagggcgagtgattaccagcggtaatgagcgaaggccttgttagcctccgccatcttatgagtatcctcgcggcgcttgacagaagcaccgaggccgttggaggcatccaggatctcgttggcgagacgctcggccatggtcttctcacgacgggcgcgggagaagtcggtcagccagcgcagcgacagggtgttggcgcggttcggcttgacctcgaccggcacctggtaggtggcgccaccgacacggcgggagcgaacctcgagggacggacggatgttgtccagggcgcgcttgagcacagccaccggttcctggtcggacttctccttgaccatatcgagcgcggagtagacgatgtcttcggcgatcgacttcttgccgtcaagcagaatcttgttgatgagctgcgccaccacggtggaaccgtagatcggatcgggcagcacgacgtgcttcttggaaggtcccttacgtgacatatctcttacttcgccttctttgctccatacagggaacgaccctgcttacggtccttgactccctgggtatcgagcgcgccgcgcacgatgtggtaacgcacacccgggagatccttcacacggccgccgcgcacgagcacgatggagtgctcctgcaggttgtggccctcgcccggaatgtaggcggtgacttcgatgcccgaggacaggcgcacacgagcgaccttacgcagagccgagttcggcttcttcggggtggtggtgtagacacgggtgcacacgccgcgacgcagcgggctgcccttcagggccaaagtcttggacttcttcggctttgcctgacgtcccttacggacgagctgttcaatagtaggcaacttgaattctccgattcagtggtttctcttgcttttgtgtgaccgccgcactgcgcccacacttttcagcacactcgcttggcatccgcctgttggcgacacccgacgaatcggaaaagatagcccagtccaccggcccgatggccttcgcccctcccgtcggcgcattactacgtgcgatcagcggtttgaaggatatcccagcatgctcgcctgttacataaggcgtgctgctggcacacacgaatatctatactacgattccgccggacaacgacgcgccgggcctcgactcactggtttggggacctcctgcgccctgtacttctcccctccccccaacgcaacaatcccgggaatgcgtcgcacaacacacgcacacacgccctcccaacgcaatattcccgggaatgcgtcgcgaaaaagcgaacgccacacagcaggtgcccccgcggagactatgtcacacgggggcaccgccaaggaggttacattatgtttcttttcaccacatgccgcttctgtgttatctgtttccagcacaccctcgtgctcttccatatccgatgggaacctctagcgacccggcctctttgccgtatcaccttgccgctttctgcattactaattatagcaaaaccaccctcgcgaaacgcccgatacatcaatcgggagtaagcgggagcggctatgttatgcgaggtaggaaaggtgagtgaccgactgactggagtcgtgccttacccgacctttctcaccatctcaggatttcaggcagcgaccttggcggccttgtcggcgtcgaacgggtgggccacggaaacggtgctcttggcggagcccttctcgccgttgtcagaatcccaatgaatctcgtgccggtcgtcatggttgcgccaccagctggacaggatggagccggagatgttgtgccacacggagaagaaggtggacggcacggcggcgagcgggttggacgcgaaggaggtcagggccagcgtggcgcccagggcggagtcctgcatgccgacctcgaacgtgatggccttctgctgcgcgtagcggaagcccttcgggtagatcctgtacatcagcttcgagaagccgaagcccagcgagtagccgcacaggttgtgcaggatgaccaccggaatggccatcagggagctggccacgaacagcttcggaccgttggcggcgacgaccacgccgatgatgagcaggatggccacctgggagacgatcggcagggccaccgtgaccttctcgatcttcttgccgaagatcatgtggcagatcacgccgagggcgatcgggaaaagcaccaccttgacggcattgaggaacagggattcgaccggcacgctcacatactgggaggccagcagctgcatcagcagcggaatcatgaacggggcgcacagggtggagaggatgccgatggagacatcgagggccacgtcaccacgggacaggtagctcatcacgttggaggaggtgccggacgggcagcagccgacgagaatcacgcccacggccagcgggccggacaggtggaagatcgcgcacagggccacggcgacgagcggcatgatgacgaagtgggccaccgtgccgacgatgaccatcatcggctgggtgaggatgcgcttgaaatcgtccagcgtcagggtcagccccatgccgaacagcacgatgcccagcatgtagccggtgtacgccttgccccacaggctggcggccggcacgaagtagttgaagacggcccagacgatgacgatgaccgtaaaccacttggtcagccaatctgcaaaggctttaaccttttccatggtgtttctcttcccttgttcggtgtaggtaacatcgcatgaaactaggcgggtcgcggttgatatgaaacataatgctcacattgtgaacgctcacgtaatcatctctgcaatccccagccgcaccatcacgccgttgtgtgccctgacttttcatcaatcgccacacaagacccactcgtccacatcccaccatttgagacagcccacagcctggccccaagaatgaaaccaaccgcttgattccatcgcgacacaccgatgagcacacatccgcaaagttgtgtatagtattcacctgttgtgcgaattcagcttgctgaatacgacaccatggtggccatagctcagttggtagagcatctgattgtggttcagaaggtcgcgcgttcgagccgcgttggccaccccagtaaaacccttccgttcgcggaagggttttgtttttctccatgaattccccgctcctgccgggaaccgccacgttgtacactcgggcatatccaattcatctaacacaaggacaaaaggtccgtcatgctgtcttttgagaacgattactcccgcgccgcccatcccgcagtgcttgaagccgtggctgaagccaacaaccatctgtattcgggctacgggtccgacgaactgagcgatcaggccaaggccaagatccgcgaggcctgcggccagccggacgcggatgtgtggttcctcgtcggcggcacgcagaccaaccaggtcgtcatcgacaccatcaccccggcgtatgcaggcgtggtcgcggtcgcctccggccatccgaacgtgcacgaggccggcgccatcgagttctccggccacaaggtgcttacgattccccaacacaacggcaaaatggatccaaccgaactggacgagttctgcaagaccttctatgcggacggcaactacgagcacatggtgttccctggatccgtgtacgtctcgcaaagcaccgaatatggcaccatctactccaaagccgaactgcaggccatcgccgatgtggcgcataagtacgatatgccgctgttcgtggatggcgcgcgactcggctacgcgctgaccgccaccggttccgacatgacgctcacggatctggcgaccatcgccgacgtgttctacatcggcggtaccaaggtgggtgcgctgttcggcgaggccgtggtgtttaccaagcacaacacgccgaagcacttcctgacccgcatcaagcagcacggcgccttgctggccaagggcttcgtgctgggcgcgcagtttgacgccttattcaccgacaatctgtacttcaagatcgcccgcaacgccaatgaggcggccgatcgtattcgcgaggccctgcgcgccaagggctacatgctcactttcgaagcgcccaccaaccagattttcgtgacgatggatcagccgaccatcgaccgtctggagcgcgaggtcaagctcggctttaccgagaaggccgacgacacgcataccgtgatgcgcatctgcaccagctgggccaccacgcatgaagaagtcgatcagcttattgagttgttgtaaaacccttcgctaatccctccctccgtcatcgcttcgcgatgccacctccctcatcagagggaggttttttcgtagctcccgccgatgagggagctggccgccgcaggcggactgagggaaaacctctccgcaaacgagaaggctcctactcccctatcgccttgcgttccatatccacgaacttgtggaccgaggcttccacggaataatgcgccttggtgtattcggcgtatttctcgccccattcggcgcgctcggcctgatgtgcgatccaccaatcgatgcgtcgggccagcagggccgcgtcccgcacggggaacaacgactcgtcgatcagcgcgaactggccggccgccgacaattcggacgcggcgatcaccggcaccaatccgcacgccatcgcctcgatcacgctcaccgattcgatgtcggcaatcgaacaatgcacgaacaaatcgcccgaacgcaacaaatcgggcatatcggcgtgcttgtggaatccgatatcggccttgcgcgccagcaaacgcccggcgcggaacttgagatactgcttgagcggcccagtaccggcgatcaccagctgaatatcgccggcgtggcgggacatcgacaccgccttgatcagcgtaatctgatctttctcgctggccagtcggccggaagcgacgacacggaacggcacgggagccgaggcatccggatcggccggcttcttcggcgaatacaccggtgaataaccattggaaatcacgtgcaacttggctttatacccgtgcgcgcgcaacaggctcgcggtcatttcggtgggcacatggatgtggtcaatgcgcttgtacagccagtgcttgaacagccagtacaggaagctggaaataccgggaatgcgacgtagcgggccggccgaatacagcacgttctccggctgcaggtggaatccagcagtcacgggaatgcccatttggtgggcgactttagcggcgcggcggccgaatttgaacggcatatagatatgcaccacatccacgccttggaaggcggtgcggaacaacgtgtcgctgggttcggcgaattgcatgagctgcttggcggccacccacgagacgagtggcaccttattcacacgcgccggatattcgggcgcccctataccgacaagcctcacatgatggccttgccgctccaattccgcagcccattgcaaagccgaattggaggtgccgttgccctgattgcccaccgtatcgaccacaagagcgatagtcagcggacgatcaatgctctcttcaatcccgttttcgcgcattgcctcatcctaaaccaccgcgaggcaatggcgtcggccgcgctgcttggataggccggaaatggtatgggctgccgcattttgcctaatattgaatcacgcgcttcgcagcgcacgatcgacgcgggccacgacctggaacaactcggcggtgtgcttgagcagactgatgcgcacccagccttcgcccacctgaccgaagcagaccccggcatcagcgccacgccggccgtgttgagcagccaatccacgaatgcggcggaatcgccatgccaccgcgccagccggccaccatatacattttggacagcgagccaagttccagcgccacgtccagcgcgcccggagtctccagcaggctcagcgagcgtacgtcaccgaattcgagccccgcataggcggaatcgttaagtacttcgactattgccagcgtgccggcttgtagcctgaaacgccggaaccggcacgccgctattcgctatatgtcgcatcccaaaatgttggcccgaccgccccatacttcatcggccggtgattgctaaggtacgacggctctgttacgcacgcaatggcatgtctatacgcagtatttatggcgggttacgggcatctgaatcttcatggggcggcaacctgcccatggggcggtatttaccccatggggcggtgaaattcccatggggcggtaaggcaaaacggcttaattccgcggtttcacaaaaccaacaaaccgccccatggactcattaccgccccatggggaatttaccgccccatgaagccggatattccgcccgtaattttgccgcgcgaggcactccgctcacgcgacataccgaaatcatcgcgtcatggcagaatgtgggtatgactgagaacgccgtgaatactgccgtgacttccgcctcctctcccgcaattcccgccgagacttccgccgtcccccccgcaactcgcgcagccaaccacccgctgggcacaccgctgggcaagcaccccacccgtgtgctgtttttgggcgctggcgagctgggcaaggaggtcacacttgaactcatgcgactgggcgcatgggtgtgtgctgctgactcctatgccggcgctccggcccagcaggtggcgcatgaataccgcgcgttggatatggcgaatgccgccgaattgcaggcattgttcgatgaaatcaagccggacatcatcgtgcccgaggtagaggccatcgccaccgatgtgctggccggtgctgcggccgcgggcgcccaggtggtgccgagcgccgaaatcgccgcgatttgcatggaccgcgagcgcctgcgcgtactggcccacgaagaattgggcttgccgactacaccgtatcgttttgccggctcgctggaagagctgcgcgccggagcttcggaagtcggctatccgtgcgtggtcaagccggtgatgagctcgtctggtcacggccagtcggtggtgcgttccgccgacgccatcgatgccgcttggaccgaagcgcaggagggccgccgcgccgccgatgagggcgatgtgtcgcgcgtgatcgttgaggcgcttgccccgctggagcgtgagctgacggtactgaccgtttcttcgtccgccggcattgtgacgtgcgcgccgatcggccaacgtcaggagtccggcgattaccgcgagtcctggcagccggctaccgagcccgatggtgaggccgagcgggcgcgcgacatcgcacgtaccgccgttgaaggcttggtggccaaggctcaggcgaccggcgaaaccggttggggcgtattcggcgtggagctgttcgtgctcaccgacggctcgattctgttcaacgaggtctccccccgtccgcacgataccggtatggtgacgatgacctcccagcgtctgagcgagttcgcgctgcacgcccgcgcgattctcggcctgccgatcacccccgagcatgtggcgctcacgattccggccggctcggtggcggcaagccatgcgattgtggtggccggcgacggtgaggccgagttcaccgatgtggccgctgctctggccgaacccggcacggacctgcgcatttttgccaagcccgaagtgcatggccaccgccgcatggccgtggcactggccgtcggcgagtccgaagccgacgcccgtgccaaggccggccgtgtggccgatgcgttgacgattaccgtggagtagtccacggcctgatcagctcagcatggcctcaatattgttgccgtccgggtcgtggatgaacgcggcgtaatacgtggggccatagttcgggcgcgggcccggagcgccgttgtcggtaccgccagaggcgagaccggcctcatggaacgccttgacggcggcctcatccttggcgcggaacgccacatgagacggcaccaccgggttgccgtccttcggagactccaaccaaacgctgtcaccatcctcgtcattggcaaagcacacggcggtcgggtacgccactttcttgacgtagcccagcggggccagcagcttctcgtagaaatccgcgtactgtgcggcgtcggaaacaaacaaaccaatatgatcgatcatgacgaacctccttgcaccatttcgtcactcccattatcgtgcgtgcgcggccgtacactcacgttttgtctattgacgaacatctgagtgttcgcgtgcttgcgtagatactgttactccgaacgactatgcgaccggcaatgagtcgattgtcggaccaataccgtccgcctccgccatcccaacagcgtatggtcgttcgatgcagcgacgtatgatgcgctggccgcatcgtagcgtcatgccgagtgttgttgtagccctcgattgatacccttttaccgttagttcacccagaaattccactcctgaaaggtgagtcatggagaagctggaaaagctctacgagggcaaggccaagcaactgtacgcaaccgacgatcccgaggttctgtgggtcgaatacaagaacaccgccaccgctggcgatggtgaaaagaaggaagacttcaccggcaagggccgcctgaacaacctcatcaccaccatcatcttcgacctgctcaagaagcgcggcatcgacagccatctcatcaagcgagtgaacgacaccggccagctggtacgcaaggtgaacatgttcccgttggagatcgtgctgcgcaacgtggccgccggccacttctgctcccgtctgggcgtggaggaaggactgccgctcaaggagccggtgcttgagtacttcctgaagaacgatgatctgcacgatccgttcgtcaacgacgatgacctggtggccctcgacgtatgcactcgcgaggatctcgccgagatcgccccgctggcccgcaagatcaacgaggccctgatcgagatcttcgccaagatcgacgtcaagctggtcgacttcaagatcgaaatgggccgcgccaccgacggcacgctgctgttggccgacgagatcaccccggattcctgccgtctgtgggaccagaaggaccactccggcaaggtcgagcaccttgacaaggacctgttccgccgtggtctcggcagcatcatcccggcctacgaagagatcgaggagcgcctcgccgaactcgccaagtccgaaggcatcgaagtcgccgaataagtcgtttaggtgcaggtagcagaacatacagctggctcccctctccgaggggagctgtcgccgataggcgactgaggggaggtcaagacgttcaccgccatgacaactcccctcagtcagctccgctgacagctcccctcggagaggggagccaagttcttttaccgcacttcttcaatttttcaataatttcaagaaaggatttccatggtttttcgcgtgtacgtggaaaagaagcccggctttgatgtcgaagcccagcagcttgcgggcgaactgcgcacgatcctcggactgaacggcctcaaggccctgcgcatcgtgaaccgctatgacgtcgaaggcatctcccaggagctgttcggccagaccgtgcccaccgtgttcagcgagcctcaggtggacaatgtggcctacgacctgcccgacttcgccggagccaaggtcttcgccaccgagttcctgcccggccagttcgaccagcgcgccgactccgccgccgaatgcatccagctcatctcccagggcgagcgcccgacggtccgctccgccaagctgtacgcgctggaaggtgacctgaccgacgccgacgtggacaccatcaagcattacgtgatcaacccggtcgaggcccgcgaggccagcctggagaccaaggaaaccctgaagacccaggtgccggtgcccggcaaggtcgagaccatcgccggtttcaacgagatggacgccgaagccggccagaagttcatcgacgagcgcggtctggccatggacctggccgacctcgaattctgccagaagtacttcagcgaggagggccgcgaacccaccatcaccgagatcaaggtgatcgacacctactggtccgaccactgccgtcacaccacgttcggcaccgagctggacgaagtgaccatcgatgacgccaccgtcaaggccgccttcgagcgttatctggcgatgcgccacgagctcggccgcgacgccaagcccgtctgcctcatggacatgggcaccatcggcgccaagtggctcaagaagaacggcgtcctgaccggcctcgacgagtccgaggaaatcaacgcctgcaccgtcaaggtcaaggttgacgtgaacggccacgacgaggactggctgttcctgttcaagaacgagacccacaaccaccccaccgaaatcgaaccgtttggtggcgcggccacctgcatcggcggctgcatccgcgatcctctgtccggccgttcctacgtgtatcaggcgatgcgcgtcactggcgccgcggacccgaccgtgccggtctccgagacgctggaaggcaagctcccccagcgcaagctcgtgaccaccgccgccgccggctacagctcctacggcaaccagatcggtctggccaccggtcaggtcgacgagatctaccaccccggctacgtggccaaacgcatggaggtgggtgcggtcgtggccgccactccggccgaccatgtgcgccgcgaaaccccggcccccggcgacaagatcattctgctgggcggccgcaccggccgtgacggcagcggtggcgccaccggttcgtccaaggcgcataacgtggaatcgctcgaactcgacggcgccgaagtgcagaagggcaacgctccggtggagcgcaagctgcagcgtctgttccgccgcggcgatgcctgccgtctgatcaagcgctgcaacgacttcggcgcgggtggcgtgtccgtggcggtcggcgagttggccgacggcctgttcgtggacctcaacaccgtgcccaagaaatacgagggcctggacggcaccgagctggccatctccgaatcccaggagcgcatggccgtggacgtggccgccgaggacgtggacgagttcctgatctacgcccgcgaagagaacctcgaagccacggtgatcgccaccgtgaccgaggacccgcgcatggtgatgacctggaacggcgacaagatcgtgaatctgtcccgtgagttcctggcctccaacggcgcttccaagcaccagaccgtgcatgtcgaggcacagcagtcctacgagaccccgtggggcgagggcacgctggccgagcgtatgaacaagctggtcaccgacatcaacgtggcctccaacaagggcctttcggagcgcttcgactccaccatcggcgcgggcaccgtgctcatgccgttcggcggcaagcgtcagctcaccccgaacatggccatggtcgccaagctgccggtgttcggcgagaccaccaccgcttcggcgatggcgtggggcttcaacccgtacatcatgtccaagaaccagttcaccggcgcctacctgtccgtggtcgagtcgctggccaagctggtcgcggccggcttcgagcatgagaaggcctacctgagcttccaggagtacttcgagaagctgcgcgacgagccggaacgctggggcaagccggcggccgccgtgctcggcgcactgatggcccaagtggacctgggcgccggcgccatcggcggcaaggactccatgtccggttcgttcgaggatctcgacgtgccgccgacgctgatctccttcgccgtggccgtgggcaacatgaagcgcgccacctcccctgaattcaaggacgccgatcaccgtatcgtgcgcatcgcgccgcgctacctggccgacggtctgaccccggacaaggatgcgctgcttgaggtgttctccgtgatcgagaagctcaccgacttccacgatgccctggccgtctccacgccgggctatggcgccaccgccgaagccctgttcaagatgacgctcggcaaccgcatcggcgtgactctgaacgacagcatcgccgtggacgacctgttcaccccggcatatggttcgttcatcgtcgagctggcagacgatgccaagcttccggccgtctccaatttggtcgagatcggcgaaatcggcaccaccacctccgagtacgtgttcaaggccgccggcgagacgctggacctggacgctgtgcaggaagcttgggagtccggcatcgaatccgtgttcccgtaccgttccaagggtgaggacaagggcgcgaccgtcgagaccatcgacttccacgcgccgaagaagaccgtgtacgtcggctcttccgtggccaagccgcatgtggtgatcccggtgttcccgggcaacaactgcgagtatgattccgccgccgccttcgagcgcgccggcgccgacgtgaccacgctgatcatcaacaacctgacaccggccgccgtcgccgaatccacgcaggcgttggtcgatgagatcaacaagagccagatcgtgatgatcccgggcggcttctccggcggcgacgagccggacggttccgccaagttcatcaccgcgttcttccgcgcgccggccgtcaccgaggccgtgcgtgacctgttgaagaaccgcgacggcctgatgctcggcatctgcaacggcttccaggcgctcgtcaagctgggtctggtgccgtacggcgacatcgtgccgatgaccgacgcctgcccgacgctgaccttcaacaccatcggccgccaccagagccgactggtccgcacgcgcgtggcctccgacctctccccgtggctgtccaagacttcggtcggcgacatccacaccgtggccatctcccacggcgagggccgcttcgtggcctccgacgaggtactcgcccagctcagggccaacggccagatcgccacgcagaacgtggacgagaccggcacccccggcatggacctagatgtgaacccgaacggctcgctgctcgccatcgagggcatcaccagcccggacggccgcgtgtttggcaagatgggtcactcggagcgttccggcaacggcctgtacgtcaacgtgcccggcaacaagtaccagccgatcttcgaggccggcgtggaatacttcgccgcctgataatcggcgcgtatcgcgcctgatacggcacacagggaaggaactctcgggttccttcccttttttgttcatgccggtcatgggctaaggttggggtgttcgcactaccgaatccgccgctgaaaggacctgtcgtcatgccgatcaacgagg

SEQ ID NO: 1048 - DNA, 76842 bp, Unknown
  R13_10m  MAG No. k141_1545
cgaccccaggctgcgcaagggaaccgccaaagactcgttcaccgaccccggccaggtggtcggctaccggatcacgtggcatagcacggatgggtggatagaacggttcaacgccttcgaactcggcgacgacatgcgattgaaacgactgcgcgacgactgggcggacgatgccagaagccgcagcctcgccgtccaggaatggcgcgccgcgatggagaaccgcccgcccttcctcgatgccggacgcgaaagacaccccgagaatctatccacgcacgacatggaacgcctcgtatccgaagcgttcgccatcgccgccaacctcaacagcgcggcggacgacgacgaataccgggcagcgatgcgcgagggcctgcacacgttcgacatgctgcgcgaacgctacgggcttacgcaggacggcctgtggataacggccacggacatgaacgaaagccctataccagcgcacgtaggaaaaatttgacagcagcctcgaatccctacctccatcgcatgtcggtgcaaactcagaaggaatgtcctcccgagagtacacatccgctctcattcattgaggtatcgcgcgtaacgagttttcattgtaaatgccacggtatggtgacggattttggaggacgataatgacaatacaatatacagcgcagccggctgatccggcgtcgagtgcggtgctgacgcgcgggctggtgaagcggtatggggattttctcgcggtgaacgggttgaatctgaacgtgccggcgcatggcgtgtatggtttgctggggccgaatggtgcgggcaagtccacgacgatgaagctgttgcttgggttggcctcggccacgagcggcgatatgtggatgttgggggagaaggtgggtggccggcacaggttgcaggcgggccgggtcggttcgatgatcgaggggccgagcttctacccggggttgagcggtctggataattgccgtatggtggccgattacctgaatctgccgggttcggccgcgcccgcgattttgcggcaggtcggtctggccggccatgagggcaagaaggcgagggactactcgctggggatgaagcagcggctgggcatcgcgatggcgttgatctcgcagccggagctcctgttgctggacgagccgacgaacgggctggacgcggaggccgtggtcgaggtgcgcgagatgatcatgggtctgagccgcgaacggggcatcacggtgatcatcagctcgcatatcctttccgagatcgagaagatggcgccggtcgtgggcgtcatcgcggccggctgcctgttgtatcagggttcgctcgacagtctgcgcgaggaggggcacatcgatttgcgtgtctccgacccgaagctcgcggcggcgatgctgggctcggaccggatcgactaccggtggctgccgggcagggatggcggcgtgctgcgcctgccggaactgccggaccagcggatcggcaccctgatcacgcagctcgtcggccagggcgtcgcggtctatcgcgtcgcctccgagcgcaagacgctggagcaggcgttcctcgaactgatcgaaagcccgcagagccgcgagcccacgcctcatcaggcgcaaaatgccatggattccgacgccgcacgcgcatccgcgcacgcatccccgcgtcgtccgttgccgatccggcaggctgcgggtcgggcggcgttcgcggcggcggacggaggcgcacgatgagcggcgcggcagtgttcgcggcgacgggccgccgtccgccgcgcccccgcgcgaagaccggcagcccgttcacgctggcgcgtctggagttgttgaaggtgcggggctcgtcgttctggtggatgctgctgggcatgatgctgctggtttcggcgtgggcgggcatggcgttcatgaaacgcgccggcagtcccgtcccggcgttgaggtcggccgcgttggccgatggcgaggtctatcaggtcgtgagcctgctggccccgattctggcggccctgttgaccagccgcatcgccgtgctggagacctcggagcgcatgaacctcacatggctgtcgttcggccagtcggacgcggcccggttcgtgggcaagctcatcgtcgccggcaccggcgtggggctttgcttcctgatcccgttgctgtgggtgccgatcgcggcgaaggcccttggcttcacggtggccggctcgttcgccgcgctggtgtgggtgccggccctgaccggcttcctgtccgcgacggccacgagcgcggtccagctgatgttctcgatgatgatcgacaagcaggccatcggcctgggtctgggcgtcatcgccggcgtgctgggctccggcctgggtgcgatgaacagacccgcgcttggctggctgttcccggccggcctgagttcggccgcgagcccgttcgtcagatccgtggatgcgggcggcaacgccacgatgctgctcgccgcgcgcccatggatggccgtggcctccgcggccatggcgttcctcggctggacgctggtcagcatggtcgtggtcaaggtgaaggagtcaagacgatgacacacgcaaacgcagtgaacccggcaaccaatccggcaatcaacccggccgccaatccagctgccggcccgagccatgccgcgatgccccgcgcgcatgcggcgggacgccgcaggccgtccgtgtgggcggcgttccgctgggagacgcgcaaggccggcaacctgtggtactggatcgtgaccgtcttgttcgacgcgatcggcatgttcaacgggtggagccagtacaccggctaccaggcggagttcgccaggcagggcgtgacctgggccgcgatctggggtcaggcgatcctcctgccgagcatggtgttcatgccggtgcttgtggccgcgttcgccgcgcaggtcgaagccaacgagcatcgaggccgcaactggcagcggctgaacgccgccggcaccgtgaacgcggcgatcgccggcaagatgctgcacgggctcgcggcttcggcgctgaccgtcctcgtgttcgaggcagagttcatcctcgtcggacgcttcgccgccggattcgacctcgcgcagctcggcccgttcctgctgcgcggtatcccgctgaccctgtcggtatgggcgatcatgacgctcacgcaggccgtgagcgcgaaggccgaatcgttcgcgggcacgatgagcgtgatgatggtcctgaccatcggcggatgcgcgctgagcctggccgccccggccatcgccgggccgtatccgctcgccctgatcaccagcgcctccgccgcccgcgacctcgcgaacatcgccagcccggcatccatgctcgcctccacgaccgccgccgccatctggaccgccatcagcgccctgatcttccaccggctcgccaaacaagccgtctgagcaaccgtccacgggctcccctcacctgcgggagcccgccacccaacaccatggaaaggcttcatcatgcacaccaccagccaacacaacgaacgacacgacgaacaacacaacgcgccacacaacagcgaacagtccatacgcctgccgcgccgcgtcatcgccgtgctgatcgccgccctcgccgcgatcatcctcaccggctgctcgaccggcatcggcgtggccggagacaggaacctccaaggcatacgcacccaagacggcgactcctacacgggcggctacaaggccgactacagcaagttcaccggcgaggaggccgtattcggcggcaccggcaagaaggccagcatccacctgaacggcaccatcacaggcacatccggcaccggcagaatcctcgtgaccaacggcagcgacacgaaacgacccgtgcccgccacgaacggcaaaatcgaccagacctacaacgtcacaggcaccagcttctacatctacgtcaccggcgaccaattcaccggcaccgtgaacctcacatccaaggagcaatgaccatggcaaacacatcccaatacccaaaccagcaaccggcatatacgccggcaccgccggacggcgggcggacatggggcggctgcgccagcctcgcattggccgtccttccccttctgtgcacgctcgtgccccagctgctcggcatccacctctacacgacgggctgggtcaggaacatcctcgtcatcatcgacttcgtatgcctcatcgcttcgctcgtcatcgcgatcgtcacctatcccgaacaggcgggaggacacagaatcgtcagtacaatcgcgatactcctatccgcaggcctgactgccgccggcggcatgctcatcttcctcatgttcatcaaccagtaggaatccgactgacaacggaaaacttctttggaagttcatctaaccgcatacacgccatgcagcacaggccacatgcgatacgcttcaacacggatggggcagcacccagggaaggagaatcgcatgaccgcaaaaaccggaaacgacaagcgccacgcggttaccggcctgatcggccacgtggccgcgttctggcggtccagcccggtcgcgcgcatggtcgcgccgatactgtgcctatgctacgacgtgatgatgctcaccagaatcgtattcacccatggcgggggcgattcggcagccatgaaactgttggagcatcaatggggaatccccgtactcgccatcctatgtgccttatctgttgtggcgctgttgttccgtatcagaatgccgttcgctattttgtgtgccatatgcggattgtatctatgcgcttgcttgattcaagcggagccatatctgatgttgcctctcttgtttgccgtctacacgtctacagccttggccgcgaccgctgaacgtgccattgcgggaatggttttgtcgggattgtcaatcgtttgcggcctctggattgcgaccttccccgccttgcagactgatatacttctgcccgagtccctccttgcgtcgatgaccgttattttagctctttggtcgcgcaacatcagtcagcggcggaagggagcggccttggtggaagctcaacagcaacgaagcctggaattggaacaggaacgcgatgaagaacgtcggcgggcggacgtcgcagccgaactgcatgacagcgtgggccataatctcaccgctatcattgcacttactgaaggcttggagggattgacacaggagccggtggaaggcgctataaagagtatcaataacttagctcggcaaagtctaggtgatacacgcgaggcggtacggaaactttcatctccggtgacgttacggaaaacaaaaacaggaacggtggaactgtgcagctggaatgatataaacccgattcttcaacatgctcgtgatattggaatcgccgccattctgaccgagacaggaaggcgtccagacgatctagcccaagctgatttatgcttccgagtgagtcgtgaggctgtcacaaacacaatgcgccatgggaaaaatataacgcgaattgtggtttcatgggatcatctggataatggggaactccatataacagtgcgtgatgatggtaagccaacgctgaacaaagataaccgcgctaaggggaccggtttcgggcttgctggcctagtgactgaagttacgcgggtcggcgggcaccttcactatggctcatcatcagggcaggggtggactgtttcagccattattccacagcaaaaacgtccatatattcctgtgcaggagggaaacgatgattaacgtaatgatcgtggacgatcagcagccgaccagaatgggtttttcgctcatggtcatgaaagatcctgcgcttcgcatgacgttgcaggcggggaatggacaggatgcccttgatattcttgcggcactgcaattacatgggcagagcctccctgacgtcattcttatggatgttcgcatgcctgttatggatgggctcgatgccacggcaagaatcaaacagttatatccttcaatacgtatcctgattctaaccacgtacgatcaggatagctatgcgtttgggggattgagcgccggagcttcgggattcttgcttaaggacgttaagactaaggacctgtgtcgggccattcactcggtgtacgatggagacgccatactcacaccacggattacaaaggaagtgattcgccgaggggttcccaacgtcagcatcaatgctgacactctggccatcagaagtaaattcgattcattgggacctcgcgaattcgaagtctcagcactggtcagcgaaggaatgactaacgctgaaattgctcagcgtctcggaatgcaactggaggcagtcaaaaaggcggttagtaggtctcttgccaagctcgatgtcaaagaacgtgttggtatcgcggtgctctggtataaggccggaatgccgaatctgcagaagtgacagattccgtagaataatgtagggtttctgaatcgtgaagggctcgtagcgggcgaacccgtgacggtccatgactgtcctcgtttgaatggcgatcggcgcgcatcgtggtaccgccgaccggtattttctcacgtgaatgaagcagcttcagggaatgagtaacagaaaagccaccggcgacacgccgatggcttcaggtgagctcctgcgactgggcttgaaccagtgaccgtccgattaacagtcggatgctctgccaactgagctacgcaggaatgtctgctgtgtttgagatttctctcgcgcacaagtcacacatcttacatgcttgccacgaaaaagcaaattacatgcgtgtagggcatgtcgcgctgaattccgcagaatcggactcatcgaatacccactcatacaacatgatgacgatgcggcgatactgtcacgcgaaatttcattgtggataacttcggaagctggaaccacataggtcgttctggctggacatcctgtttcggacccctcaaggtgggtatcaccggcaaagaagccggaatcgcatcacactcacactatggggaggaatctcatgaatgcaccactgttgtttgattggcgtcgcgacgaagcccgacgtgccagcaggcggcgtcagcaggcgcgtcagcgggctcaggaacggcaacggcgtatggatgccataatcgcgttggccgccgttatcggcctgctgcttgccttgggagtgggactggcatccacgcctcagcatgttgcgcatgcggatactgcggtgaccggagatgcggcatacacggtggaggatttcaccgatatgtctgatctggcgtggcgcaatggcaatcagtgcgaatcccggttcgactggccggtcgacgatccacaggtcgaacaacagttcgagcggccgatcaacccgtgggcaccaggtcatcgtggcgtggatcttgctgcggagcaaggtaccgtgattctgtcaccacaggcagggaccgtgagttttgctggcaaagtagctggcaaagatgtggtgagtgtacggcatcgtggaggtgtcacgtcgacattcgaaccggctgttaccgagctctcggtgggggatacgatctcccgcagacagcccgtaggcattgttgagggcaactcggaccattgcgaagaccgttgcctgcattggggcctcaagcgaggaacggccgactatcttgacccacagcaatatgcggggagtcgaaaaatcgtactgaagccgtcatgattcagcaatgtttgtcggccggaacagggccgtacggaagaggcatcgcaggcggctagcggcgtgacgagtatgaatcacagaccggcatcggccaaggagatatatccgggggcgatcagcgcggacttgagattgctggcgctgacagccagcaacggttcgttgatggtcgggatcttcttcacgccgcctacctcggagttcctgattgaaggcatggaattcagcgcttcgttcttgttgagcctggcgcaggcctgagcgatatccgtggcgatggtctgtctgtcttccatgccggtcatccattgcttgccattgacgatggatgggatgttcgagacgtacgcgccgtatccggtcaccagaggccattgcgagtcacggtccttgtcggaagcggaggtgtccttatccgcatcgtcatcggaactggatgagtcgtttgcgttgtcgttttcaggggatttgatcgggtccggcactgcgtcgcggctgagatccttcttgccggtgatattgccgacaatgcccgagatggtgatctgcggattgatatcggcggcagagccggtgtatcccagatcgtccaattccttgacgacctcggaggcgatatagtcgttcatcgtgatgatgccgtcaatacgggtgagtgtggactgcccgtcggtttttgccagacgcttgtcaagcactttcgcagtggagccttccttggcggcatcgtaggccacggcttgccaatcgttttccgtggatttgccgtccaaggtgcctgaagggctttccacaacgcccttctgatagtaggagcccagtacctgccagataccacggaacgcctcttgggcgaacgtggaatcgttggcgttgcctttttcgtccacggcggtgtatggcagcagcacctcaatgtatttggggttgtctttactggccttatccaacttgagtttggacaccatcttttccgcctgtagcttgccgatggtctgggcgtccgagaacttgacgaaggcgtccggcctatacccctcgatgctgttgccgagcaataccacatgcatgccggattccttggccagcttgagcgatgagaccagccggtccacggcctgcgcctgctcgtccgatgcagtgccgtcgctctcagtgttggacgagtcatctttggaagagctgtcttcggaagaatcaccgtcagaagtagctccctcatccgtggcatcgttggtgctcaggttctggctgacgtaatcgccgtattggcgagtggaagcgtcggcctcgactactggagccacgagcaatgtcatgttgtcgggcgcgatggcaatgccggaatcgtccgtggtgttattcgaaagatgatcgaccacaaagtcttggatggcgcggctttgcttgtccaacgagtcggacgtcgtatgatcgatatcgcctttcttgaaaccggcgtcgaccagggccttggttaggtcgggcaccagcttcgcccatttgttcagtggcgtctgctgattcagcgtaatgccgtccgaaggcgtgaacacggccacgccgccggcagaattggacgtcaccgtggtttgaccatctacaacggtcttattgtctgaggtgcacgcggtcagtgacagcaccatcgcgcaggatgcgacaatggcggcgagcagggtggttgagcggcgtgcgaacaccataagcggcgaaacctcctcaagcgggcgtgaaaacaaactgaatcacgattctagtaggccgtatacgaaaaagtcccggaccagtggacaaatcgccacatatccgggaacaattaggggtatttcgcgcgtgtatcgaacaactgtcatgattgtcgtgctgaggaacattccagatgaagcacgacaatcatgacagttggcgacatgacatgacccatgtaggtccgcacgatgtgttcgatgatttactcggccagagccttggccaggttctcgtccagcgcgttcatgaagccgtcggtgtcgagccacggttcgtccgggccgatgagcatggccagatccttggtcatctgaccaccttcaacggtgtcgacgatgaccttttccagcgtctcggcgaagtgacggacttcgggcgtgccgtccagatcggcgcggtgcttgaggccgccggtccacgcgaagatggaggcgatcgggttggtggaggtcttctcgcccttcttccagcggcggtagtgacgggtcacggtgccgtgcgccgcttcggcctcgacggtctggccgtccggggtcatgagcacggaggtcatgaggcccagcgaaccgaagccctgggccacggagtcggactgcacatcgccatcgtagttcttgcaggcccagatgtaaccgccgtgccacttcagggagctggccaccatgtcgtcgatcaggcggtgctcgtaagtcaggccggcctcggcgtacttgtccttgtattcggtctcgaacacctcagcgaagatgtccttgaattggccgtcgtaggccttcaaaatcgtgttcttggtggacaggtacaccgggtaatgacgcatcaggccgtagttgaagcaggcacgagcgaaaccgcggatcgaatcgttgacgttgtactgcacctgggccacgccgccgtcttcgccgtagttgtagaccacgtgctgaatcggctcggagccatcgtccggagtgaaggtgacggtcagctggccggcgcccggaaccttgaaatcggtggccttgtactggtcgccgaatgcgtgacgggccacgacgatcggcttggtccagccgggcaccagacgaggcacgttgctcatcacgataggctcgcggaagatcgtgccgcccaggatgttgcgaatggtgccgttgggggacttccacatcttcttgagaccgaattccttgactcgggcctcatcgggggtgatggtggcgcacttgacgccgacatggtgcttctggatggcgtgggcggcgtcgatggtcacctggtcatcggtctcgtcgcggtgctcgatgcccagatcgtagtagtcgaggttcacgtcgaggtacggcaggatcaggcgatccttgatgtccttccagatcacgcgggtcatctcgtcgccgtcgagttcgacgacagtgccttcgaccttgattttggccatgcttcctcctgatagatggtgtgaagatgatttagtcatagcgcatgtttgtaacgacttgaagcaatcgtccggtccgtgggaaacgaccttgttggcgtcccacccgggcaataggcttacaaccatgtctcaggaaattgaaatcggtttgggcaaaaagggccgtctcggctacgcactcgacgatgtggcgatcgtcccctcccgtcgcacccgcgaccccgaggacgtctccacctcttggcagatcgacgcctatgagttcgatgtgccggtgatcggcgcccccatggattcggtgaccagcccggccaccgccatcgccatgggcaagatgggcgcgctcggcgtgctcgatttggaaggtctgtggacccgttacgaggacccgaccccgctgttggacgaaatcgccgggctgccggccgatcaggccaccgagcgtatccagcagatctatgccgagccggtcaagccggagctcatcgcgcagcgtctgcgcgagattcgcgccgccggtgtcaccgtggccggcgcgctctccccgcagcgcacccagcagttctactccaccgtggtggacgcgggcgtggacctgttcgtgatccgcggcactgtggtctccgccgagcacgtctcctctggccaggaaccgctgaacctcaagaagttcatctacgaccttgacgtgcccgtcatcgtcggcggcgcatccaactacaccgccgccctgcacctgatgcgcaccggcgcggccggcgtgctcgtcggcttcggcggcggcgcggtctccgccacccgccagaccatcggcgtgcaggccccgatggccaccgccatcgccgacgtggccgaggcccgccgcgactacatggacgaatccggcggccgctacgtgcaggtcatcgccgacggcggcatgggcgactccggcagcttcgtcaaggccctggccctcggcgccgacgcggtcatgctcggcgcgccgctggcccgcgccaccgaggcccccggcaagggcacccactggggttccgaagcccgccaccagacgctgccgcgcggctaccgcaccacggtcggcacggtcggcccgctcgaacaggtgctgttcggaccgagccaccaggcggacggcaagaccaacttcatcggcgccctcaagcgcgctatggcctccaccggctacgtcgacgtgaagaacttccagcgttgcggcatggtggtcaacccgtattccgcacgataatcccgattaccccccctgaaaatgggggtttgccctccatgcaggaggcttagcttgccctaaggcgcgctcaagtcgtttgacttggcgcgcctttcgtgatgttgtagtacaaacgctcgccaatgatggtgagttgcaagggggcttgaaggggtcatcatggagtattcgggatttttccacggcacatatcagtacgggccgttgccgagttatgacggattcatcgttgtggagctgtcggatcgcccggtgcggtatcatatccaacccacattcataggcgggctgaatgcgaaggaatgtcattccatggccatggctgcatgccgcatcgcctgcacatcggcggacgcgatacgtggcagactcagcgtcgcacatctcaacagagccatgacaaaaccatgcctggaacggctgcaaaccatgcaatacctgctcggcacccacatggtcactcatccggagctcaaagcgaaattctgctatctgcccactgtccccacattgatcgacggcatgatcaccggcaaggacacgctggaaatggcggtattcatgaccatcggccaggaaaatctgcgagtcaacctcaaactgaagttcatcggttctcgatggatgtgcatctatgccgatctgggctgaccagacggccccgccctcacaccgattcctacgctggcagcggaagacggttctgccgtgtcataggctggttcgcctatagtagtgaccatgcgtgaacatgtagaagaacccagatatgtcaccaccgatgacgacaccgtctactcgctgctggccaaacgagcagctcgcacgccggatgacatcatcgcggaatggcaggatgacaacacccaccaatggcgcggcgccacagctactgaaatgctgtcccgcgtacgcgaggtggccaagggcctgttgggacttggcgtcaaagccggcaccatggtgctgatttactcgcctacctgctatgagtggggtgtggctgatttcgcttgcgcggcaatcggcgctgtggttgtgcccgtctatgagaccgattccgcccgtcagaccgcgggcatcgtcgaggaagtcgatcccgccatcgcctttgccggcgacttccagcgcgcacagacgcttgagcagatccgtgtcaatcatccgggcatgaaatacgtgttcaatttcaaggccgatggccttgacgctgtcgctgacttcgggcatggcgtatccgatgagacgttggatgcggctatcgctcgtatcaaagccgatgatctgcttaccgtggtctacacctccggttccaccggcaagcccaagggcgcgatgctctccaaccgcaattacacgcacatcgtgcttaacggctacgagattctgcgtggcatgctgtacgacgacaaccgtctgctgctgttcctgccactggcgcactgcttcgcccgctacatccagtacgtgtgcatcggtggctgcggcgtggtcggatacattcccgacgccaagcgactgctcgccgatatccgcagcttcaggcccacctacctgctgggcgtgccacgtgtgttcgagaaggtgtataacgcggcctcgcagaaggctggtgccggcatccaggggcatatcttcgcccagtcggtcaagcacttcgtcaagtggagcaaggatgagcaggccggccgcggccattcgttcatcgagcgcatgcgccattcgttctacatggccacggtgggcaaatccattcgttccgctctcggaccgaacctcaaatggctggcctgcggtggtgcgccgctcaacgtggatttggcccacttcttcaacggcatggatgacatcaccttcatccagggttatggcatgaccgaaaccgccgctccgatgctcgtcaattgggaggacgacaacgaggtcggttcggtcggcaagcctgggcctggcatgggcgtgcgtcttggcgaagacgatgaaattgagctgaccggcccgaacgtgttccttggctactacaagcagcccgaactcaccgcacagacgatgactgccgacggctggatcaaaaccggcgatctgggtcgtatcgacgaccgcggcttcaccttcattaccggacgcaagaaggacatcatcatcaccgccggcggcaagaacatcagccccgccccgatggaggatgtcatcgacacctgcccgatcgtggctcatgcagtagtagtcggcgacggcaagccgttcgtgtccgcacttatcgagctcgaccccgaaatgctgcattcctggctggaaggtcagggcctcaatgccgacatgacactcgccgaggccagcgacaacgacgcggtgcgtgcttttatccagcagtacatcgaccaggccaacgccaatgtctcccgcgctgagtccgtgcgcaaattcgcggtgctggatgaggaattcagtcaggagcacggcacgctcaccccgagcatgaaagtggtgcgtcccaaggtattgcagcgctacgccaccgtcatcgaagaggatctgtatgcgcccaagccctccaacaaaccgctgcccgccacagccaagatcatcgacagcacgctggagaccgtcaagaaatcctccgaatcggtcaagcaggcgtccgaacaggtcaaacaggcctcggaacagatgaaaaccagcgtgtctgattcgattgctagcgtgtcggagaagatcaagaagtcgaaggccgaacccgaagagggcgagaccggcgattccgccgacaatgccgacaatgccgctgacaccggcagcaagccggaccggccggctgacgagaagaacgaggagtaacgagaagtggccatccgtgagatcagggtcgtgcccgacccagtcctgcgcaccccctgcgatgagatcaaggaaatcaccccggccgtgcgccgcctggttgacgacctgctggaaaccgtggacgatccgggccgagcgggcctgtccgccaaccagatcggcgtgagcctgagggccttctcctacaacatcgacggcaaggtcggctacgttctgaaccccgtactcgaggagaagtccggcgagcagtatggcgatgaaggttgtctgtccgtgcccggcttgtggtacaagacccgtcgggccgactacgctcgcgtgcgtggcatcgacctggacggcaacgaggtcgtgctcgagggctccgggctgatgggccgtatgcttcagcacgaatgcgaccatctcgacggccacgtgtatttggatcgcctggaaaaggaagaacgccgcgaagccctgcgctacatgcgcaatcgtcaggcgaagtagtccatacccggctcccgctggcgggagccgccgaacgtagtgagactgagggtggttctgccggtaccgcccgtaactcccctcagtcgcctacggtgacaggctcccctcagagaggggagcctgtttttcttagtaccggctccgtgctatccttgaaacttgtgtgccacccggcaacggacgcagtcgctggcgtccggaaccacccaatattgtcaaccggcacacaacaaattcgcgtcatgctcgcgacggcctgtgtcggtcggctgcacaactcgtgaaaccgggggagcagctgcacgcaggtgcgcatggccaggcaagaaccgacaatgaaaggtagtaataccatggctcagatcactatgagcgatatgctgaaggctggcctgcacttcggccaccagacccgtcgttggaacccgaagatgaagcagttcatcctcacccagcgcaacggcatccacatcatcaacctgttcaagtcgctcgacatgatcgacaaggcgtacgacttcatcaagaccaccgtggcccacaacggcaccgtgctcttcgtcggcaccaagaagcaggctcaggaagctatcgccaaccaggccacccgcgtgaacatgccttacgtctccgagcgttggctcggcggcatgctgaccaacttccagaccgtctccaagcgcgtcaaccgcctcaaggaacttgaggaaatggacttcaccgacgtgcacggctccggcctgaccaagaaggagctcctcctgctcgagcgcgagaaggacaagctcaacaggcagctgggcggtatccgcaacatgaaccgcaccccgtccgcgatgttcgtcgtcgacatcaccaaggaggccctggctgttgaggaagctcacaagctgggtatcccggttgtcgccatcgtcgacaccaacgccgacccggacaccgttgagtacccgatcccggccaacgatgacgccatccgcggcattgaactgctgaccagcctgatggctgacgccgtcgccgaaggtctgctggagcgctccggcgccaacaaggccgagggcgaagccgccgagcagccgatggccgcttgggagaaggaactcctgaccaacgaggctcctgccgaggcttccgctgaagccgccgctccggctgccgccgagggcgaaaccgccgaggcccccaaggccgagtgatgctctacgatgggaagtgcctgaataagcgcttcccatcgttcatgggtaagcaaaatttctcaaggagaataatcaatggcagcaattaccgccgcactgatcaagcaggttcgtgaagacaccggcgccggcatgctcgacgtcaagaaggctctgaccgaagccgaaggcgacgtcgcccgcgccaaggaaatcatccgagccaagggtatcgccgcagccggcaagcgtgaaggccgcaaggctcaggaaggcaccatcgcctccaaggtcgtcgagaccgccaatggcgagaccggctacgccgtcgagctgaactccgagaccgacttcgtggccaagaccccgaagttcgtcgagttcaccgaggaagttctcggctacgccgtggacgccgacgccaactccgctgacgagctgctcgaggccaaggctggcgacaccaccgtcaagctggctgtcgaggaggccgccgccctgttcggtgagcacgtcaaggtcggccagttcgccaagatctccggcgagcacgtcgaagtctacgctcacaagaagtccgccgagatgccgccgagcatcgtcgccatgatcgccaccgacaaggccggcgccgccgtggctcacgaagctgctctacagatctccgccatgggcgctaagtggctgacccgcgaggacgttccggccgatgtggtcgagtccgagcgtcgcgtggccaccgagaagtccctggccgagggcaagccggagaagatcgttccgaagatcgtcgaaggccgtctcaacgctttcttcaaggaagtcgtgctgctcgagcagccgttcgtcaaggacccgtccaagaccgtcggcgacctgttcaaggaagtcggtggcaacgccaccgcattcgctcgtgtcgaggtcggcaagggcgaagaggagtgagcctaaggcttactccacgcgcttagcgtaatttcaacgaaacgccatccggttattcaataatcggatggcgtttcgctattccaagggtgtcgttgctagggggtgtcgtcgtaaaccgatacgcttgtctacggataatttcgcactttcggttttgagaaaggcatgatatgactgatagcgacaagccgcgcagagttctgctcaagttgtccggcgaagcattcggtggtggcaaggtcggcatcgatacccatgtgattcgtcgcattgccgaggaaatcgttccggccgtacaacagggtgtgcaggtggccatcgtggtcggcggcggcaacttcttccgcggtgccgaactgcagcaggccggtatcgatcgttcccgcggcgactacatgggtatgctcggcacggtgatgaactgcctcgccctgcaggacttcctggagcaggagggtcaggccacccgcgtgcagaccgccatcaccatgggacaggtcgccgagccgtatattccgctcaaggccatccgtcaccttgaaaagggtcgcgtggtgattttcggcgccggtgccggcatgccgtacttctccaccgacacggtttccatccagcgttccctcgaaatccactgcgacgaagtgcttatgggtaagaacggcgtcgacggcgtctacaccgccgacccgcgcagggacgagaacgccaagcgttttgaaaccctgagctacaatcgcgccctcgtggacaatctggcagtcatggacgcctccgcactgtccatggcccgcgacaacaagaagcgcatccgcgtcttcggcctcgaagagccgggcaacgtgacccgcgccctcgtcggcgatgaaatcggtacgctggtctccaccgccgaatcgcgcgtggccgagtaagccgcaaacgcctacaatcgaatcaaacgttcatagacgaacaacacagacgaacaccaacacacaaggagtgaatatgtctcttatcgaccaggccaaggaacagatggccaggaccgtggaaaacaccaaggaaaacttctccggcatccgcaccggtcgcgcaaacccggccctgctcaacggcatcaccgtggactactatggtgcccccaccccgattaaggccgtcgcctccatcggcgttcccgaaccgcgcaccctgtccgtcaccccgtttgacgcttcccaggccggtgccgtcgaaaaggccctgcgcaactccgacctcggcatcagcccgaaccgtgatggcaacgtcatccgcctgaccatgccggaactcaccgaggaccgtcgtaaggagtacgtcaagctcgccaagggcaaggccgaggacggcaaggtcgccgtgcgcaacattcgccgtaagaccaaggaaaccatcgacaaggccgtcaaggacggcgagatgggtgaggacgaaggcgatcgcctgctgaaggatcttgacaaggtcaccaagtccgttaccgacgagatcgatactctgctggagaccaagcagaaggagatcatggaggtctgattcagaccaggtccggagaattatggaacgcaacgaacaactccatgaagaggccgaggagacgctcgaccggatcaacaagaagaccggccgcaacatgccgcaggccatcgccacaggcgcggcactggtcatccttattgtcgcgtgcctgctgctcagcgtcgacctcttcgtgctgctggtagtcgtgttcatgattctggcgctgtgggagctcagggtggacttcgccaccgtaggcctgcacatcccggtgttcatgctgtggctgtgcgcgtccttcaccctcatcgccacctattattccccgtaccatctcatcacgatgtcgctgagtatcatcgtgtcgattattctggtcgccatcgcggccagcgcaaaaatcagcgtcggcaaccgcctatctctggcggttgccggcaaactgtccaacacggatgccagcgcgcgcctcgaatcctcgttcaatcatgagggcggggaacagcatcattcccggctcagccatgtggctgtgtccgtgcttaccgtgttgtacattccgttgctggccagctgcatcatcatctcgctgactttcaatgggcatccgattgcacacgccatcatgctggtgttcctgcccgccctctccgatacgggtggtttgtttgccggtgcctggctcggcaagcacaagctcagcccgcgtatctcgccgaagaagtccgttgagggcctgatcggctcgatgctcttcgccatggctggcgcattcgccgtattcgcatgcacgtatgatgcctcgaaatgggccactcgttggtgggtgccgatcgtggcgggtattctcatcggcgccgtgggcacgttcggtgatttgtgtgcttccatgctcaagcgcgatatcggcatcaaagacatgggccatctgctcaagggacacggcggtgtgatggatcgtgtggattccattttgatgagtgcaccgttcacctgcgccttgctgtgggtcaccggactgtgattcgcatgcctcgtgcatgaacaatgtggcatcgtgtgtatatcgcacggtgccacatgtcatatatgggggaaatcatcgttcaatatgcgttcgccatgggctaagacatgggccatctgattcgtatgcggcacgccgtatggtggattctgatatttctattgcatgtttgactattttctgatattgagagcgaagcgaacccatcatgaccacacagcatcctgacactccggaaaccggcattactcccggcggcacatcaggtgccttccgtgacgtgctatccaaggaccatgcccgccgtggtaagccgccgctgcactttgtggatatgacgcccgagcagcgcatcgagaaagcggccgaactcggattgccgaagttccgagtcaagcagctcgccaaccattactttggccatttcgatgtgaatgccgccgaattcactgattttccggcagccaagcgcagcgaggccgccgccgcgttcttcccgcagctcatcaccgaggtgacccgccaagtggcggacgaaggcaccaccatcaagaccttgtggaagctgttcgacggctccctcatcgaatcggtgcttatgcgatacccgacccgcaccacgctgtgcatttcctcgcaggtcggctgcggcatgggctgcccgttctgcgccaccggcaagcttggcctgacccgtaacatgtccaccggtgaaataatcgaacaggtgcgtgtggccgccaaaatgatgcgtgacggcgaagtggccgggggagagggccgcctgagcaacatcgtgttcatgggcatgggcgagccgatgggcaactacaactccgtgctgtccgccgtacgacagatttccgccatgcctcccgaaggcttcggcatttccgcgcgcaacatcaccgtatccacggtgggcgtggtgcccggcatcaagaagctcactgccgaaggcattcccgtgcgtctggccgtttccctgcatgcccccagcgacgaactgcgtgacgagctggtgccgatgaacaagcgtttcaacaccacgcaggtgttggatgccgcgcacgattattggctggcctccaagcgccgcgtcagtatcgaatacgcgctgatgcgcggcatcaacgaccaggccgagcatgcgcagttgctggccaagaggcttaaccattacggcgacaactgggcccacgtcaacccgattccgctcaaccccatcgagggctcgaagtggaccgcctccaagccgggagacgaacagcggttcctggagatcctgcaccgcgcgggcatcaccgccacactgcgtgacacccgcggccaggacattgacggtgcctgcgggcagttggccgctaaggagcggtagttacttcagcgcatccttgattgcgtccacgaagtagtccaaatcagcgggcttgcgggacgtgatgagcttgaagccgttggcgtcgtccacgtgcagctgctcgtcgacgtaatggccgcccgcgttctcgatatcggcggcgatataacggcagggcgcggcggccttgagatcgcgcagcgggcgcgtcagctcggattctcatattccagaaacgggtgcggcgcatgtaacgggcggtaggtagtctgaaggactgtaatgcaaagccgaacaggggagtgaagcatgtcgttggcggtacgagtcatcccgtgcctggacgttgacgccggtcgcgtggtgaagggtgtgcatttcgaaaacctcaaggatgcgggcgacccggtggagctggcggccgaatactatcgtcagggcgccgacgagatcaccttcctggatgtgaccgcatccagctcccaccgcaacacgatgattgacgtggtctcccgcaccgccgaacaggtgttcattccgatgaccgtgggcggcggcgtacgcacgcccgaggacgtcgactcgctgctgcgctgcggtgcagacaaggtcggtgtcaacacggcggccatcaatgacccgtcgcttatcagccgcgtggccgaccgtttcggcaaccaggtgctggtgctctccgtggacgcccgccgcgaaaagggcgagcaacacacgcaatccggcttcgaggtcaccacgatgggcggccgcaaatccaccggcattgatgccatctggtgggtcaagcgcgccgagcagcttggcgccggcgagattctgcttaactcgatggacgccgacggtaccaaggaaggctttgatctcgagatgattcgcgccgtgcgcaaggaagtcaagattccgatcatcgcctccggcggtgccggcaaggtcgaggacttcccgcccgccatcgaagcaggtgccgacgcggtgctggccgcatccgtattccattacggcatcctgaccatcgccgatgtcaaggcggaactcaagaagcacggctacaccgttcgctaaacgaatacaccttgctcccgctggacgaacaatccagtggattgttcgtagcagtgcgctatgcacatgtcgcacataatccgggagctgtcagcgaagctgactgagggtggtccacataaggaagataggtatgacagacactacatacgacaattccactgaactcgatccccgtattgccgcacgcctgaagcgtgacgccaagggtctggtcgctgccgtcatccagcagtacgacacacacgaggtgctgatggtcggctacatgaacgacgaggcattacgccgcacgctgaccaccggccgcgtgaccttctggtcccggtcccgtcaggaatactggcgcaagggtgatacctccggccatgtgcaatacgtcaagggcgtgtccctggattgcgacggagacgcactgctcgtcgaagtagaccaagtcggtgccgcctgccacaccggcaagcgcagctgcttcctcgaaggcggccccctgtccgtggtcgaaggccatcgcccggccgagcagtagaacgggcttccctgactgggggaagccgaacgaccgcgtactacgaaacaagacatcgagttgtaagtaaaggagcgaatatgagcgaatgcagcgtcaaacacctgaagtggggcgccacctggcccagtcgcggccagttccacgaactggccgacgccggctaccgtgtgattccgatcgtgcgccgtctgctcgccgactcgctcaccccggtcggtttctacgagcgtctcgccggcggccgatccggcaccttcatcctcgaatcggcggaatacggcggcacgtggagccgttacagcttcatcggcgtcaactcgatggcccagctgcgctccaacaacggtcaggccgactggctgggcaaggtcccggttggtgtgccagtcaccggtgacgtggtcgaagtcgctcacgccacgttgaagactctgaaggccccgcatgtggaaggcctgccgaacctgaccagcggtctggtcggcacggtcggctgggatgccatccgccactgggaaccgaccctgcgcgccgaagctccggacgagaccggccagcctgagaccgtgctcgccctggccaccgatatcgccgtggtcgaccacgtatccggttcggtgtggctcatcgccaacgcggtgaacgtggatgataaatccacccgcgccgacgtcgcctacaacgaggccgtcgctcgactcgaccagatgcagcacgatgccgccaccccggctccgggcgagtcccgcgtcaacatcttggacgaaacggtcgcccagcctgagctgcgcttccgcaccgagaaaagccactacgagcaggccgtcgaacgcgccaagcagcacatcgtcgacggcgacgtgttccaggtggtcatctcccagcgtctcgacatcgattcgcctgccgacccgttcgacgtgtaccgtgtgttgcgcacgctgaacccgagcccgtacatgtatttcatggcgttgaccgatgctcggggccgcgacttcaacgtgatcggctccagcccggaaaccctcatcaaggtggacaacggccacgcgatgaccttcccgattgccggatcccgccctcgcggcgccacccctgaggaagacgaaaaattcgccaaggaattgcttgccgatccgaaggaacgcagcgagcacatcatgctcgtcgacctgtcccgcaacgacctgagcaaggtgtgcgtgccgcagtccgtggaagtcgtgcagctcatggacatcaagcgtttcagccacatcatgcacatctgctcgacggtcaccggcaaggtcgacccctcgctgaccgcattcgatgtgttcaagtccgcgttcccggccggcacgctttccggcgcgccaaagccgcgcgcagtcgaaatcatcgacgagttggaaccggccgaccgcggcatctacggcggcaccgtcggctacttcgatctctctggcaacatggacatggccatcgccatccgcaccgcgttcctgcgcgaccatgaggcgagcgtgcaggccggtgccggcattgtgctcgactccgtgcccgctaccgaatggcaggagacgcgcaacaaggccgaggccagcgtcgaatccatccagatcgccgcccagctgcgcgaactgtaacgttcaacgcatagcgatgcccctgctgacaactgctgtcagcaggggcataacaatatgcgtatcagtgggtttcgcccatgatgtcggtggcgtcggttccggtgctcacagcggcctcgatggcggcttcgatgccgcgcgccatggtcgcgatttccatggtcggcgtgccgttcggcttgcccacgccctgcgcggtcgcatacggcacatgaatgaagccgcccttgacgccggggaatttgcggtcaatcagatacaacacgttatacatgatgctgttgcacacatacgtgcctgccgtatacgacatgaatgcgggaatcccgtggtcattgatgttcctgaccatggccttgaccggcaacgtggcgaaatacgcggtgtcgccgtcctcacgcaacggcgtatcgaacggctgctcgccatcattatcgggaatacgcgcctcggccaaattaatggccactttctccacggtcagagccgaacggccaccagcctgaccaatgcacagcacatagtcaggctgctcgcgcaccatggcttcctcaaccacggtcgcactgcgcgtgaacaccgtcggaatctccagtttcaccactgtcgcaccggcgatttcatccggcaacagcttgactgcctcgaatgcggggttaaccggctcgccgccgaacggatcgaatccggtcaccagaatcttgctcatcattagctccttatttcacggattgttgtggtatttggacaacgaggttattgcgcgatcagcatatagacgatctgcaccacaatcatcaccaatgcgggcagcacctgcttcttaatcacacccatgcggtccttcatatcgagcatcgcgacgggcacgatgttgaagttggcggccatcggcgtgcacagcgtgccgcagtagccacaggtcagcgccagaatgccaatcaccgccgggtccgcaccgaaggcgagcacgaatggcgcgccaatgcccacggtcattacggtaatcgcggcgaaggcattgcccatgatcatcgtgaacagcatcatgcccacaccgaatacgatgatgcccagcgtgacgttgcccttcggaataatgccgccgaccagcgtggcgatcacgtcgccgacacctgcggctgtgaaaatcgcgccgagactggccagcagcatcggcagcatgcagagcgcacccatggcagacaacaggcgttccgaatcgttgaggaatacgaccggcttgttgtcatgcgagaacgcgaacagaatcacggcggcaatcatcacaccgatgcagcagccggtcagggcgctgacgctgggaatcagggcgccgataatggcgaacacgcccagacacagggcgggaatgaagatgcgcatgccgatgcgctggaagttcgcggccacttcggcggtgctgggagcgctcgaatcggatgccgagcccttacgcacttggcggaagatggcgggaatgaccatgatgataatgagcacgccgtccgcaatggccggaatccaacggccgaacgcgatgacgataccgagcgccgtccagaacacgaaagtgccgtagcgggccttgttggttttatcgagtaggttgcgtacgcccgcatacacggacatgaaacccatgaaaatatagaagaactcgaggattttcgtgccaacggtcacgctggggtccatgaagaacgacatatcaggcctccttgccggtggtggtagcggtggcggcctgagcggcggcttcggcaccgtagtacttcttgcgcagtcgtgtgtccttgatgatgtaatagacggcggtgaccgccacggcaatcaccgcgacaggaatctcgataatggccatgcgcaacagttcgacgtcataacccagcggcttcaacgtggactgtacgagcagcgcaccggccgtacccacgaacagcacctggccaaagaaccatgcgacgttctccatgccggaagccatgcccttgagctcttccacatactcgtcgttcggctcgtgaccggacgctgcaatcgcacccaccgccatcggcatgatgaccggacgcacgaacccggccacgccaccaaaactcacgttgaacgcggcgaacacgagacgcatcacaccatacagggcgatcaccataccgggcgtcgcattcttcactttgccgatcagctgcgcggctgcggttttcagaccgttgcgctccaatgtaccggtgaccagcaacacgatgatgaaaatcgccatgctgcggttcgagacgaacgacgtacccaacgtggtcaggaagccgtcgacgccaatgccgccgaccagcgcagtcaccacagccgccacgataatgatcagaatcgcatcaagtttgagggcgaaacccacaatcacgatcacgattcccaataacacgagataatttggttccatgtgggaaatccttcctatactgcacacgcattgcgccgcaagcgtgcccggatatggatagtgtacgacggaaatcacgattcaactgtcttatcgcgcacattgcaggtattacatgagcctacgggcatataagcgtatggacgcatgagcgtcggctgagcccggtcggcatagtgttcgctatgatggacagtcggactttggtaagagacagtattcgtaacagacaagtaggttattcatggctattgaggtgcagggacttgaaattcagatcggcgcgcgcacgctgcttcaccccaccaacttccatgtggccaagggagacaagatcggtctggtgggccgcaacggcgccggcaagaccacgctgacccgcgtgatcaccggcgacatgttgcccaccgccggcaaggtgcgcgtctccggcaagctcggctacctgccgcaggacacgcacgcctctgatcccacgcagaccgctctcgaccgcatgatgagcgcgcgtgacatcgccaccatcatcaaccgcatccgcaaggccgaaaaggatatgaccgacccggatccggacgtgatgagcaaggccatgacccggtacgacaaggccatgcaggacttcgacaaggctggcggctacgcggcccagtccgaggcgatttccatggccgcctcgctcggcctgccgcaggaggtcatggagcagcagctcggcacgctctccggtggccagcgccgccgcatcgagctggcgcgcatcctgttctccaacgccgacaccctgatcctcgacgagccgaccaaccacttggatgccgattccatcgaatggctgcgcggctacttgaagaagtacgagggcggcttcctggtcatctcccactccaccgaactgctggacgaagtggtgaacaaggtctggcatctggacgcgcagctcggccagatcgacatgtattcgctcggctggaaggcctacctgcaccagcgcgtggtggacgaggagcgccgccgccgcgaacgcgaagtggccgagaagaaggccgaccgtctcatgaagcaaggcattcggctgcacgccaaggccaccaaggccgtggcagcgcagaacatgatgcgccgcgccgaaaagctgctggaaaacacctccgaggcgcagaaggccgagaaggtggcggacatccgtttccccgagcccgcgccctgcggccgcacgccgatcatggccaaggacatctccaaggcctacggttccaacatcgtgttcgccggcgtgaacctggccatcgacaagggctcgcgtgtggtgatcctcggttacaacggtgccggcaagaccaccacgctgcgcctgctggcccacatcgaggagccggacaccggttccgtggaatacggtcacggctgcaagatcggctacttcgcgcaggagcacgacaccttggatctgaacgccaccgtgttggagaacctgcagcatgtggcgcccgagctcgataacacgcaggcccgttcgattctcggctcgttcctgttctccggtgacgacgcgatgaaaccggctcacgtgctttccggcggtgagaagacccgtctggctctggccacgctggtcacctcgcgggccaatgtgctgctgctcgacgagcccaccaacaacctcgaccccgcttcccgtgaggagattctgaaggccattgccaagtatgagggcgccatcgtgctcgtcacccacgatgagggcgccgtcgaggcgctcaaccccgagcgcgtgctcctcatgcccgacggcgacgaagacctctggaatgattcgtacctcgaactcgtagccgaagaatagtcctaccgtggccccctaccgggagctgtcagcaaagaacgggttaaccctaggctcccctcgctgaggggagtctcgcaagcatgcaaaggaatcaaccatgccaaccacaacaggccagaagatcgccatcgtcaccggcagcgcgctgggtttgggctacgagctcgccagccaactcatcgccaagggctggctggtggccggcatcgacttcaacgccgaacgtcaggccgagctgagcgcgcagtggccagccgaatcctaccgcgccttcgtaggcgacatcaccgacgaagcgttcgtcaaggaatccgtggcgagcatcgccgcgcttggccacatcgacctgctcatcaacaacgccggccagccctcgttcaaggtgcccaccgcctatgaagccgctgacattgacaaatgcctcaaaggtctcaaaggcatgatcctgtggacggtggaaaccctcaaggcctgtggcgagcgcgacgtgaaaatcgcccagatcatgagcaccgccgccacgcgcggcaacgcgaacgaaagcgtgtactgcgccaccaagtggggcgagaagggctacaccaagagcctgcaggccgcatacaagggcaccagcgtcaaggtggtcgccgtctatccgggcggcatcgacaccgccttctaccgtgatagccacgattacgtgtccgaagccaagcagcacaccttcatgcagcccggtccgctggccgaagtcatcctcttcaacctgatcaacgaggccaacctcaccgtcaccgacatcgagatcaaccgcaacagctgagctggcaggttatacacatatccaccgattcggccgagctggttgcgcgcagaagttggttatgccatcgtgagttgtatccgtgaataacgcggttcacggatacaaccattggggggatggcatggagtcctatgcatacaacacgttcttcacacttgatgaggcgcgagacctcgcccagaaaacactggaacaatgccgtgccagatcgatgcgcacttcacaggagctttgcttcagccatggcaccaggctacagcttgctggtatgacggccacgctgaattacaagcccaactatgacctcaacaaactgcacgttacggtgtccggggctgaaagattgtcgaatctcaccgaaacgcaatgccattattggggtcatggcattgaccagacgatgattgatgatcttatcgccgtggtttcagtggaacaggcgctgtgtcagatcgcacagttcgtcgatgtggaaagtatggtcattgccttggattgggccacctgccgtaatgagcatctgaaacagacaacgaaagacaagatatcgttgttcctcgccgatataggtaggttcccaggtatcagattatttcgcaaagcgctctcgttgtgcagagagaacaccgattcgccgcaggaaagtatccttcgccttgaatcggtaaaacgtggattacccgaattggaggtgaatgctccgatatacctcccgttgcagaacaaagaggtggttgtggacatggtgtatccgaatgatcatgtgattctggaatacgacggacggtaccactatgaccgaaaccgatgggaaggagatatcgagaaaaggaacaacctctccttcgcgggctataagacttttcccgccacaagaagaacgttcgctaccacgcagaatctggatgaatacttcagaatcgttggaagtgcaattgcggaataccgcaataccgggtcattttcacaatgagatatgaccggacgcattcattaggtcgattcttcattcattaggtcggtgagctctgacagtcaccactggaatggtgccattccaacaccgacaatcgcagcctcatgacctaatgaatgaagaatcgacctaatgaatgattggaagcgttccgcgcaacgttatggcacccgcaagaagccggaacccggaatatgtctgttatcgtgggagccaagcaacaggtgaaggattgagtatgcacatcggtgacgatgagtttgaacgggccattgaacaggtgttggatgatttgcctgaacggtttgcgcgggtgctggagaatgtcggcatcgtcgttgcggacgagcccaatgagcgcgaactggccacaatgagcaatccgtgcggtgagctgctcggactgtatgagggcatacccatcacaaagcgaaccacgggctacagcggcgtgatgccgggacgccatcaccctgttcaagggaccgcatgaacgcgtatgctcaacacgggccgagctgcgccaacagatccgcaaaaccgtgttgcacgagatcggccattattccggcttcgatgacgagtatctgcactcgcatggctactgaagcgatgctgtttcactagcggggagccgtcataccgccgtatgttgccagatctactgcaagtggtgcaacgcacggatgatggcgcaacggtcctcggtggttccctcgttggagcacatggtgtgcgtaccaacgcggattgcgcaaggtctcggcgccggtggcctcatccgtggcgacgagcgtgtgcagatcgttggcgtactggaaatgcaggtggctgggcagcccgccctcggcgaacgccttgcgcgaaggcagagggttgatggccagcagccagcggaacgggctgtcttcggcggccgggcttgaagccagggccgcaatccggtgccgatacggttccaagtcaaacgcccgcaatcccatggcggtcacgcagccgggggagagggacaggaattcatcggcctcgtaatcctgcacgatatgtccgccgtcgaataccacgtaccggtcggccacgccgttgagccatgcgagtcggtgatgaaacagggcagcatcatcgtgacgcccacggccagcgcggagaccacatgcagccacggcagtcccagggcatcggggtcgagcattcccagcgcggtgagtacggcataggtcacgccgaagttcaacgcggttcgccatcgggcggccgccagcaggagcaacaggaacagcacgaccatgacgatttgcgtggcgagccctacatggaagaacagcatgaggttcgccaccagcagaaggaagagtctcgcgcgcggatcgagcgtccggcgggcaggaagatggagccgaagccgctggtgaacagggtgctcaccagtgtggcgatgcacaccatcacgaagtacagggccgcaaacacgccgatggtgatgaggtcggagacctccagtttgccggatttggcgggcttgttgagctggtcagaggtttcggcgggcgtgttcggtgcggtcacgatgttttccgtttcgtatgcattgacaatattcctctcgccaatctaacgatgatttcccgcaaggcaatagtctgtctgtgatttttgcgtgcgaaacaatagagctcccctctttgaaggggagcctgagtgttccatcaaaaccgaatgctcacccggaactcgccttcggccggttggccgagttccagcctggctcccatcgcctcgcatgccgcactggcgatggacaggccgagccccacgccgggcacggcgctgatacgcgagttctcgccgcgatggaacggttgggtcagctcgttcagatcgtccggcagcatctcatccgtggtgttcgtgacggtcagacggggtccgcttccatcctcatccgatacgacggttacgtcgatcgacccatcatccgtgttgtgcacgacggcattgcgcagcaggttgccgaccgccagttccagcaacgccgggtcggcggcgatgagaaacatgtccgcgtcgccgccggccttgttcacggttatggtgatgcgacgcttggtggcggcatcgtcgatatccgcaagggagttgccgacgcatccgtacaaatctgtggatgtgcgtgccgttgatgcgggactcatctgtgtcacatcgcccgcctgcttgccgccgatggtcccgctttgaatacgggacaaggtcagcagcgcctgcaccagttgcgcgccgcgccgattggcatccagtgcgcgctgtaccgacggtcgcacatcctcggggaaccgcccctgggccaacggcgcgtccagattggtctccaccgcggcaatcggcgtgcgcagctcgtgcgaggcattggacacgaaccgccgctccgcttcggatgcggcctgaatccggtcgagcatgccgttgatggcgtcaccgagctgcgtgacttcggaggattggccggcagctcgaccgtccgtgcggctgtccgtgctatgatcccaatcctcggtcccgcgtctgcccgcacgccggaactggggcctacggcgagatggcggcccattcacgtcgatgcgcgtatcaagtttggccgggtccaatgccgccgcctgcgcgctgatggaggtcagttgccgggacatgcgcgaggtgaccagccagatgatcagaatgctggtgatcccgaagaacacgaagatgatggccgcgctgatgcgcaatccggtggcgatgttgtcctggttccacacggagacgccatacggggtgttgatggtatacgatccgtccttgccccattccacctgatagtcaccgtcgcccatatcgccgccgacgctggatgttccagtgatatcgttcagacctgtgccgcttccccgggaaaacattcgcgggtcggaatccgggcgtttgccggtgccggaaccgctgtgctggctttcgacctgcatctcagggtttttggcggtgaccgtcgtggcgtacgtgaacatgctgttgaccacaatggtctgcacgagggtcgccgatcccatggcgatgaggaacacgagactgatggacaacgtcagtttggcgcggaatgatttgggccgcagtttgccggcaagcgcctgtatacgacctgatgctttcgccgtgttcgtcgccttcattgcagccggtatccttccccgcgtgtcgagacgatggcctcgcgatcggcgagtttgcgccgtagcgaatagatggtggttttgatcacgtcggtcgggtcggcggcggtcggctcatcccaaaccgcatcgtagagttcgtgcgcggtcacgtatccgccttccgcacgcatgagctccagcaatatgccgtactccttgggtgtgagtttgacgagcgtgcgcccgtggtcgcggaacacgagccggcgtgtggaatcgagggtgatgtcgccgcgcgtgagcacggctgcggtcgcgttgctggtcccgctgcgccgttgcagggcgcggatacgggccagcagttcgggataggcgaacggtttggtcaggtaatcgtcggcccctaggtccagcccgctcacgcggtcgctgacctcggcggcggccgtcagcatgattacggccacgggaatgcggttcgcggcgacggtggccatcaccgcgtcaccggacaataccggcagatcacggtcgagcagcatgatgtccacgttcgtgccggcaaggatcttcaacgcttcgacgccggtggttgccagactggtcgcgtacccctcgtagcgcagcgcgtcgtccaacgcggcggccaattcgcggtcgtcctcgacgatcagaatccgcatcatgtccccttccgagccttcccgaaccaatggcatcacccaacattttcccgattctacggtaaggcgaaagtaatccgtccgcttaccgacgctccacggtgagggcgattggatggaagtcgtcacaatcgactcacggaatggagacggtaatgtccactactcatacgcgcctggtacggcgaatcgcaatgcttacgtccgcactctcgctggcttcggtgctgggcgcctgctcgtcaccgctggcggcagtcggaacaggctcaggtgccgacgatcggtccgatgcgacgaccaccaccgacgccacggcgaagcgattcgccgcctgcctgaccggcaaaggattcgacgcacgtacggctgctggcgtgtcgtccggctccggctcgggcaaacaagccccgaccaaaaacgcggtcgcactgcgcatgatcggcaccgacggcaagccggtcacctcccaaggcaacagcctcagcgcatccgacgacggcccgcaactctacccgaacgctgcctacacgtcgatggaagacgacagcacctgggtggtgttcaaggacgccaaggcgctcgccggctcaccctacgaatccaaacagcgggaatacgccgactgcgaggccaagaaccccgacttcacccagcccattccggacatggggccgcaacaccagtattccggggaagacaagcaggcggcgctcgcctacgcccaggccgcgcgtaagaagggcttcgactgggtcaaggacccggacgccgatacgcccacctcaatcacgattcccggcaccgtaagcgaatccgaactgcgccgattcctcaaggaatgcccgaccgatggcgcgaacatctcctatgccttcgctggcaccaccgaggaattcggctatgactacaacaaagtcctctccgaattcacctccggcagcgcgtccaccgaagccgcgccccagcaatgagacggccatccgataacggacaaaggagcaatcatgacacggacggaagcgcgcagattcgggaaacaccgcagaatcgtgacgatgattatcgcggcgatcgccgtgatcggactggccgcggtgtgcgtggcggtgaggccgtggacgttggccgggcacgtcaccgcgaccgggcagactggccgatcgcagcaggtggatgtgtccacgctgcgcacgcaggaggtgaccaagggcgtactcaacgccgagacccggctcggcgcgagtctgcaatacgatgacgcctccgatttcgcggccgcttccggcacaatcacccaactgccggtggccggcaaacagatcaacaccggcgaacaggtgtacgagatggacggcgcgcccgtgccgctgttccatggcgaccgcccgttctggcggacgatcggcgatggcgtctccgacggcccggacgtcacgcaactggagcagaacctgcaggaactcggattctacggcggcgaggtcggaccgcatttcaactggctgacccgcgaggcgatccggcaatggcagcgctcgctcggcctgaccggcgacgcggtcaccggcacattcgacccgaatacggtggctctggccgcggccgcaccaatccgcatcacggcggtgaacgcgaaactcggccaatcacaggtcagcccggcaagctatacgggcgtcaccctgcatgcgcaggccacgttgaccgccacgcaggcggcgatgttcaaagccggagacaaggcgcaggtcgtgctgccggacaacaccgccgtcgaaacgacgctcgcctcggtcgatcagggcgggcagaagaccggcgacaacgggcaagccacacagccatcggcgcgcatcgacttcccggaccagtcgcaggtggcggctttcgggccgacggccgtgcaagtcatcatcccgaacgccgatgcctcgaccggggaggcgctgatcgtgccggtgaccgcactgatcgccagcgccggcagcgcgtatgcggtcgaagcggtacgcggcggcaagttggtgcgtgtgccggtgtcaatcgggctggtgtccgacgcgcaagtgcaaatcaccaagtccgacggcctcaaggcgggagacaaggtggtggtctcatgaacgacatcgagtttgcccccgctggcccagagcatggggcattgctgacgttggagcatgtgacgaaggcgtttccaggcaaggacgggagcgtgctggagatattgcatgatacgtcactggccatcgatcgcagcgagctcgtggccatcgtcgggccgtccggctcgggcaaaagcacgctgctgtcgttactgggcacgctggacatgccgacctcgggaatattgcgatacgacggcggtgatgtgaatgcgatgggtgagcggcagcgcagcgtcctgcgggccgcgcgcatcggcttcgtgttccagcagttccatctgatcgccaccgtatccgccttggagaacgtgatgacaggcctgcaatacacaaccctgccgcgcggcgaacgtcggcaacgggccgccgaggcgttggaacaggtcggattggggaaccgcctgcatcaccggccggcccagttgtcgggcggcgaacagcagcgtgtggccatcgcccgcgccctggccaaacggccggacatcatcttcgccgacgagccgaccggcgcgctggactgcgaaaccggccacaccatcgtcgacctgctgctcacggcggccgattccggcgcaagcctggtcatggtcacccacgaccagaccatcgccgcacgtttccccaggcgtctgcacatccaagacggcctagtcaccgaactcgacaagccgaatcaagccccctctgacgaggggctgtcagccaaaggctgactgggggagagatatgagtgaacgtactcctatgagtaaaccaatacgcacgcgaattgcggatttgatgcatgcggcttgggttggggccgccgggcgggcgtcccgcacggtgctggcatcactgggcatcgcgcttggcgtggccgcatatgtggcgttgtccggcatcgccgcatcgaaccaggcagcgctcctcgcccaactcgacgcgcttggcgcgaatctgtcggtggtcgcccccggcgtggacgccgcccagcagaaggttccgctgccggattacgcgcccacaaccatcgcccgtcagccgcaggtcgaacgggtcggtgtcttcgacaccgcgccagagaaggtgcagatcttcaagaacgggctgtgccccaaaaccaacggcaacgcgctggccctcgccatcatgcggcccggcgcactcgacgccgtcggagcaagcctcgcccaaggtcatggcatcgacgcgaacaacgagcacctgcccgtcgccgtgctcggctcggacgccgcctaccggctcggcgtcaacgagcccggcgaccgcatcctcatcgacaacgcatggtacggcgtcatcggcatcctgaaccccacgccgcaggctgaaaacctgaacgccgccgtcatcatcggcgagcaatgggcgctcggccggtaccccgaccaggccgacaccatcggacggatcagcgccatctacgtgcgcaccacgcccggcgacgccgaaggcacccgccgcacgctcgcccacgccgccaacccggccggcggcaacgtgtccgtcaccgcgtccgccgacctatccaaagcgcgaaacaccaccaacgattcactgaccacgctcggcctgatgatcggcgtgatcgcgctggccgtgggcggcatgagcatcgccaacatgatgattgtcaccgtgatggaacgccgcggcgaaatcggcctgagacgcgcgctcggcgccacgcccggcaacatccgcatgcaattcgtcaccgaagcggccctcctgtccacactcggcggattcgccggcatcgcgctcggcgccggcgctgccatcggcgtcgccgccagtgccggccagccgatcgccctcgactggacctccctgccgctcgcctgggccgccgccatcctggtcggcatcctcgccggcctctacccggcctcccgcgccgcccgtctcaccccgaccgaggccctgcgcggcgaataggggcgacggctggagtgaacgatcaccatgagtgcgcagcctcaatgtcacttttactgcacatgatgacatgtgcagtaaaagtgacatattggtgctgggcgggagagagcacgcgtggcgcgggcggggtgtggttcgcggctatcggctagtatggtgcggtcacgacagagggaggcatgctgtggccgatgtgatgcgggagctggaacggctgcgaccggtgtatgagacgggcgtcctgcggttgctgttgcgccagaacgcgatgctgtacgtgtcgctgctgcgttccacgttcgacccgctcaccggcgagctgccgcgcgagaccgtggaggagcggttcgcgcaaagtctgaacgctctggccgacgccggcgaatatgcgccgcgcgaggaccagaccttcgccgaggccgcccatcagatcctcgccgacctgacccgtgaaggcgaaggcgactacgcctggctcgccaactcgcatgatgcggccacacaccgattcctctaccgtttgacggcccgcgcccaccgcgccatcgaggcactgagcaggctcgaagacgaatcacgcgccctgtccggcgcgcaggccaacagcatcatcatggaaatcgaacacgcgcgcatgcagctgaccgccgaccccggcgagcgcatcaaactcctcaaccgtgaaatcaaggaacgcaagcacgagatcaaacgcatccaacagggcaagcagcacgccacgctgagcgaagcccaagtggaggacgtgatcgccgtgatccacaacacgctgcgcggcgtacccatcgacctgcgcgaactcgtgctcgacgagcgggacaacggcgacgccttgcgccggcgcatgcagaccggcgacatcagcgtggacgagaacctgacccgctaccacgacgaataccgccgctcgttcagcgaatcggacagcggccgccgcttcgaggacgccttccaggtgatcatcaccgacgagggccgccagcaaatcgacgaagccctgcgcgccatcgccaaaaccccgtatctggccggcgaatccggcgtgctgctcggccagatccgcgacgaactggcccgcatctacgacggcatcgaagccgtgcgccgccagatgcgcgtctccgacgaggcgatcagccggctcgtgcgccagcaaaccgacactcgctaccgtacgatgctcactcgcttgaaccgactgtacgcgcgcctcaacgcggatgcgaaaacccatatgggagacgcctcgcgcccgtacgacacggccaccgcggacgcgctgttcgcgccattgccgatgcgcccggccaaatccatgacccgcgccaccgcacccggcctgagcgacctcgccgccgaagccccgcaggcgactccggtggccgatctgcgggatatggtcaacagcggcggcccccgactcctgcgcatggtcagcctcatccggcgcaacccggtgaccgttgacaggtccgatgacaggtccaacgcaaccctcgtggacatcgccgccagcttcaaccggctgcccgaaagcgaacgccgcgaaagcgagatcgtcggcttcctgggcgggctgggagccgtaagcggcagcgccatcgccgacgagccgtccactgacggcgtcggcatcgacagagacatcgccaccgagccggccccggcgcagcgcggcgataccgcgacttggcattgcgtatcgatcgacggcgagccccggcactggatcactagaccggtgctggccgacatggacgagctgaacatcattgtggaggaaggatgaccgtggccgaggaacacgaggagcacatggacaacgccaacccgtacgccctgttcgaaggcgacaccggcgacatgccggccgaggcacgcatggccgccatcgccctcaaacgcgaccgctatatcagcgggcccacctacgacaccgtgctcgacaaccgcgacgtcgtcgtacgctccctgaacaacgacctgctcgacttggtgatcaacgaacgctaccgcatcatgtacgccacgcccgtggccggcgacgacgtgaccctgcgctcgctcaaaacccgtgtcagcctcaaacgcgaggaggccgcgctgctcgccttcctgcgcatccgcgtcctcgaatacgagaacgtgcacgccgaccccgccgactggctcgtcagctttgaggagatccgcgccgcgctcgccaccggcgccggttacctggcagcccgcaatgacgaggaaggcgtggcaaagcagatcggcgccatcgtctccgcgatgatcacctacgggtatttggcgcgcctggacgacgaagccatgtaccagatcacgccgctcgtgcccgtggtgctcgaccgcgaactggccgacacctggctcgacgtcgcggaacacggcgacggcgacacggaagatgacgatgacgacgagaagggagccgaatgatgcaggcgacagacgtgcagatgatcgcggaccggtggatgctggaatcccgccgactcatcaactggggctcctatgagggctaccacgaattccgcccctccacggaccacaagctgccggtgaccctgctcgccggcgccagcgaatccggcaaatccacgctggtcgacgcgcagatctccctgctgtacccgaccggcacgccgttcaacaaggcctcgaactccggccgctccgaacgcagcgactacacctacctgcgcggcatggtcggcgtgggcagcaccgaaaccggcgacgagccgctctacctgcgcggtcgcgacgagaacggcgcgccgcaacccgtgtggggcgccatcgtggacacctatcgcaaccagaccaccggccaggtgctttcctgcgccaaattcctctacctgatgcccggcgacggccgcggcgacgtgcgccgccagtacgtggtctggggcaagcccgtggaccccaggcgcatggaccaataccgtgacgccccgttcacaccagcccagctcaaagccacctaccccgactgcctcacattccccagcgccgaagcgttccacacacacatctggagcgcaatgggcctgagcgaggccgcctgccgactgctgcacaagatccagtccgccgacgcgccctcccggctcgacgacatcttcaaacaaggcgtgctcggcgtgcccgaagccctggacctggcccgcaccacggtcgaggactacgaacgttacgacgagaacttccacgccatggacgagaagacccgccgcatggacacgctgcgcggcatccaacaggcctacggcgaatacgccgccgcacgcggcaaggcccgcgccttcgaaccggtcaagccggccgtcgacggcacggtgccggccgtgctgcgcgactgggcattggcccgcatgcgcggcgaagtcgccgcccaactgcccgccgaccgcgccgaacaacagaacagcgaggcggaagccaagctgctgcgccgccgaaccgaagacctgcgcacccgcctcgacatgatccgaggccagatgcagggtctggacggcggcaacctgacccgactcgaactcgaactcgaccaggcccgccgcaccctcgaagacatgcaagccaaccgaacacgaatcgaacaaacgttcgcatccatcggcgagacactgcccggcaacgaacagtcctggaacgaacgccgcatcaacgccgtgaacttcaaacgcgaatacaacaaacgagacggcgaatgcgaggaagccctcaccgccgccatcaacgcacgggccggcgcacgcggcgacctcgaacgactgcaacgcgacttcgaccggcaacgctcccagcgcacccgcatctcccagcagatggacgaaacccgcgccatgctctgccgcgccaccggactcgcccccgccgaactgccgtacgtggccgaactcatggacgtgaacgaacacgaggaagactggcgtctcgccatgaacgtcgcctacgcgcccatcgcccagaccatcctcgtcgacaagcgccacgaacagggcttcgccgccaaagtcagcaccatcgacccgcgcaccatgccccgacgcacctggcagttcgtggacaccgcacgccactacgacgacaccggcgcgcacgcgaacatactcaccggagaacaggacggcgactggctgtccggcaaactgcgctaccgcgacgactcgcccttcgccgactggctgcgctcgcagacccaggacgaacgattcgacgccctatgcgtcaccgccatcgacgacaccgaccgcaccaaccgtcaggtgcaggccgacggtcagatcaaatccggcgcacgcggccagcacggcaccaaagaccgcgcccaggtcatcggattcgtcaacgaaacctacctcaacgcgctcgcagcgcaggtcgacgccgcccgcaacgcgctcagccaagccgacaccgactacacggccgccaaaacacagtccgataacctccaccgcgaactcgaactagccaaccagctcgcctacacgtcatgggaacgcatcgacatcgccggcgcgcaacggaccatcacggacacgcaggacgccatcgcatccatcaaaaacgatcccaaactcgccgaactcgccaaacagcgcgacgaactgaacgccgaactcgaccgtgcggaacgccagcgcatcgaatccgaccaggccgcggcccgcgccggcagcgccgtcgaagcggcgctcatctggctgcgcgaccatgccgacaccggcacgacggacgccgccggtgccaccgccgacaatgacgatgacgccgcttccggcccgctgccggacgaagtcacggcggcgctcgccgaatcctacgacaaccgattcgccggattggcggacgcggccatgcgcgcgcacatgatcatcggcgcgggcgcggcaggaacgcaggcgccgggggagagcttccccgaacgcaccatcgccggcatcggcaaggacatggcctcccgcatcaatctgctgaacggccaggccgacgccgcgcgcaccggcgtcgaatcgaaaatgagcacctacatcgcgctctacgcggccgacgatgattcgctgaccgccagcgtggaggactaccggtactatctcgacgaactcgccagcctcacccagctggccgcggttgccgccaccgacgccgaataccggcgctgcctcgaacagctgctcaggagcttcctgaccatcaaacgcgccatcgacacggatgccagcgacatccacgaccagcttgaccgcatcaacgccatgctcaagggccaacagttcggccccaagcacggcagcctgtccctgcacgcggacgtgcgccgtcccgagcgcaccttctgggcgcagctcatccgcgtcatcggcaccctgaacgattggaaatccgccgacgtcaacgattccgacgcctcgcgcaaggctttcgcggcctgcgcgccgatggtcgggctgctgcgcgccgaactcgcgcaggtcaaggacacgaacggcgtgaaaagctacggcgcccgcaacctcgacccgcgctgccgctcgtccttctacgccatcgtgcatcatgccgacggtccggacgaacgcatcacctccaccggcggccgttcgggcggcgccttgcaggagctcacctcgttcgtatacggcgcggcgctcatctacctgctcggcggcggcctgaccagcgagccctcgtacaccacgctgttcctcgacgaggcgctcatcaaggccgacggccgttacacgcagcgcgccctcacggtgctgccgcgcctcggattccaggtcatcgtctccgccccggaaagcaagaccggtgaaatcctcgaggtctccaccaaggcctacgtgacctacaaggaccccgacaccggcctcacctccctgcgcgaggccgtgctgcatcagaatgacatggacgatgaatcatcgtcggatatattgaaggatgacggggttgccgaatgagcaatcccggcgtcgccggtattaagacgattcggttcgactcgacgatgttcgaaagcaggtgatgggaactatggccggcatgaaagacatcgctgcgatcaccacatgcgtgaagaaacatatgcgttcacatatgtacgacatcgaaccggcatggccatttcccgtgccggtgggattgccggaccaagcatttttggaaaccaatgcgattgcagtgcatgacaacaacaatgagatacggcaatgggcaagcaagaatggttgcgaaatcataaccaagcatcgcaccataggcacctctgtcgagctgatctccaaagtcgtcgttcctgacgaatcaatagccatgcgtgtggttggtcgtacgctggcggcggaatatcgcgaagcgcaccgtcgcacagattccactgacaggattcagcggcaaatggctgaatgagtcaaaaaccaatcgtcgtaaggccatttgccgactgctcggtgtcgaaacgttgggtctgtcgaaacggccgaccgaactgcggttccgttatctcgatccgggacacgacgattttggtaccgatcgtactgaacgcagcgcgaagattgctatgcgggagcctaagccgacgcccggccttcaatcggcggagcgacgtctttatgaacgactgtgtgctgacaaaaccatcgcttatcggcgtatcgaacaggaacgcattcccatgcgtgatgcagttgacgaattacgcaagcttggcatccccgtggagtccattgaagattttgtcccggttcgaacatcaatcgtttgacggacgtaccggggcagaatccgttgtcccggtttgtgatttcgggtgtttttcgcgaaccgggacatgttgtgttgccccggtatgggcgtcaatcgtttgatgcgagaatcgggacaacatggcgattctgagattggctttattccgccgtttccgttcgcgttttatgtggttcgtggaaactggaatgtcctggttctcgaaaacaggccaaaatcacgaaccgggacagcgggttttgccccgatgcggacgtcaaacgattgacatgtgaaccggggcaaatcagaggaggagaggtcttcgggatagagcttgggcgcacggttgatgtcgcgtgggccggctcttgcgtttcggtccactgatggtccggaattttgcatactatggttcggttttccggcctgacacgccatcgaacaagcgttcgaatttggtcgtgtgttcgggtatccttgggacagattcggcgcgcgcataaccgtgcgcgcgggaacggtgagatggaaggtggggtgtggctgtggcggcaacgcggactggcgcaaggcgcgcaacaagcgcaaagggcgcgaaaaccagcaagggcaagaacggtgaggtcatcgtcgaaaaggtgatgaccagcgactccttcctgagccgggaaatcaaaaaggcgccgctgatcgaacacgatggttcgctggtagctgatatctcgcacatcccgaacgatctcaagatcacgattcagggtgcgcgcgaacacaacctcaagaatgtcgacctggcgattccacgcaaccgtatggtcgtgttcaccggcctgtccggttccggcaaatcctcgctcgcatttgacaccctgttcgccgaaggccagcgacgctacgtcgaatccctgtccgcctacgcccgccagttcctgggtcagatggacaagcccgatgttgacttcatcgagggcctgagcccggccgtctccatcgatcagaagaccaccaaccgcaacccgcgttcgaccgtcggcaccatcaccgaaatctacgattacctgcgactcctcttcgcccgcaccggcatcccgcactgccccgaatgcggcgagcccgtcgcctcccagaccccgcagcagatcgtcgacacgctgctcggctacccggagcgcactcgattccagattctctcgcccgtggtcaagggccgcaagggcgagttcgtggacatgatcgagctgctgcgctccgacggctacgcccgcgcgctcatcgacggcgagatgacacagctgtccgacgacatcaaactcaccaagcagaagaagcacaccatcgaggtcgtggtcgaccgactcgtggtcaaggacggtatccgccaacgtttgactgattcggtggaaaccgccctcaagctcgccaacggcagcatcgtcatcgacttcgtggacgaggaggaaggcagcccggcccgccgccagccgttctccgaacaccgcagctgcccgaacgggcacacgctcgaactcgatgaggtcgagccgcgcaccttctccttcaacgccccctacggtgcctgccccgcctgcaccggtctcggcttcaaactggaaatcgacccggacctcatcatctccgacccggacaagtcactggccgacggcgtcatcgaaccgtggagcggcaccaagatgacctcccagtactacggccacatcctcgaaggcttggccaaggaaatgggcttctccatgaagaccccttggaaggacctgccggacgacgtcaagcacgacatcctctacggccacgacttcaaggtcaacgtctcctaccgcaatcgctggggacgcctgcgtgaatactccaccggtttcgaaggcgtgatccgcacgctcatgcgacgccacgacgaaaccgattcgcagtccatgcgcgaatactacgagtcgtacatgcgcgaagtgccctgccaggtctgccacggacgtcgtctgaagcccgaggtgctctctgtcaccgtggacggcaaatccatcttcgacgtatgtgacatgcccgtcgtacgcgaactcgcctggatcaacggcctgaaactcgaaggctcggcacagctgatcgccggcgaagtgctcaaggagatcaaggcccgactcggcttcctgaacgacgtcggcctcgactacctgaccctctcgcgcgcggccgccaccctgtccggcggagaagcgcagcgcatccgactcgccacgcagatcggctccggcctggtcggcgtcatgtacgtgctcgacgagccgtccatcggcctgcaccagcgtgacaacgaacgcctcatcgaaaccctgcaccacctgcgcgatctcggcaacacgctgatcgtcgtcgaacacgacgaggacacgatacgccgcgccgactgggtggtcgacatcggccccggcgccggcgaacacggcggcgaagtcatctactccggccccgccaagcacctcatcgaagccaagcgctccatcaccggcgactacatcgcccaccggcgagagatcgccgtgcccgccaagcgccgcaagatccacaagacccaggtgctcaaagtcgtgggtgcccgcgagaacaacctcaagaacatcgacgtgagcttcccgctcggcgtgctcaccgtggtcaccggcgtctccggctccggcaaatcctcgctggtcaacacgatcctctacccggtgctcgccgacaagctcaacggtgcacgcatcgtacccggccgccacaggcgcgtggaaggcgtggaccaggtgcgcaaggtgatccacgtcgaccagaacccgatcggccgcacgccgcgatccaaccccgccacctacaccggtgtgtgggacaagatccgcacccttttcgccaagactcccgaagcccaggtgcgcggctacggccccggccgcttcagtttcaacgtcaaaggcggccgatgcgaggcctgccacggcgacggcacgctgaagatcgaaatgaacttcctgcccgacgtctacgtggactgcgaggtctgccacggcaaacgatacaaccgcgagacccttgaagtcacgtacaacggcaagaccgtggccgacatcctcaacatgcccatcgaggaggccgccgacttcttcaaggcgtacaccggcatctcccgatacctgaagaccctcgtggacgtcggcctcggctacatccgactcggccagcccgcacccaccctgtccggcggcgaatcgcagcgcgtcaagcttgccaccgagctgcagcgccgatccgacggcaaaaccgtgtacatcctcgacgagccgaccactggcctgcacttcgaagacgtgaacaagctgctcaaggtgctgcagtccctggtggacaagggcaatacggtcatcgtcatcgaacataatctggatgtgatcaaggaggccgactggctgatcgatctcggtccggagggtggcgacggaggcggcaccatcgtcacgcagggcacgcccgaacaggttgccgaatgcgaatcctcatggaccggcaagttcctgaaatccatgctttagccttccattgcagctgacctcgggtgggttggggtggtatgttgctggacacgctccgggccgctcaggccaagtctttacggtccagcagcacataccaacccgcccaatccctgatgattggttttgcttaatagcgaggaggattatgacgaacgatattgagcggcatagtccggatgagtggcggaagaccgcggcggcgttaatgccggaaagcgtagctgtgggcgccggggaaacgacggcgaaggtgaatgcgaatggggcacctttgctgggggattctcgcgacctgttccgacccaagacctcggatattcccgccaaacccggtgtgtacaaatggcgcgacggggaagggcgcgtcatttatgtgggcaaggcgaagaacctgcgcaacaggctcaccaattatttccagccgctgtatctgctgcatccgcgcacgcagaccatggtgctgaccgcacgcagtctggagtggacggttgtcgccaccgaactggaatcactgacgttggaatacacgtggatcaaggaattcgacccacggttcaacgtgcagttccgcgacgacaagacctatccgtatctcgcggtcagcacgggggagcgaattccgcgcgtgtgggtcacgcggtcgcgcaaacggcgggatacccggtatttcggcccctatgccaaagtgtgggaattgcggcacagtcttgaccggttgctgcgcacgttcccggtacgcacctgcaccaccaacgtattccacaaggcgcaactgaccggacggccatgcctgttcgcctccatcggcaaatgctccgcaccctgcgtgaaccgtatcgaagcggacgaacaccggcggctgtgcgaacagctggtcggcgtgatgaccggacgactcggacggccatacatcgcccagttgacccgcgacatgaaagaggccagcgccgaactcgaattcgagaaagccgcccgactgcgcgaccagatccaaatgctggaaaccgtggtgcaacagaacgccgtcgtcttcgaccaggatgtggacgcggacgtgttcggcttcgccagcgacgagctcgaagcctcggtgcacgccttttatgtgcgcgccggctctattcgcggcgaacgcaactggagcgtcgaacgagttgaggacatcgatgacgccgacttgatggccgaccttctggtgcaggtgtattcggacgccgccggggacaatcacccccagtcggccgcgaccatctccaccaatcgcgaggccatcggctccacacagaccatcacggccacggacgctgtggcacgcgcccaggccacccgagaacgcaacacccgtcaggagaccaccggacgcgcggacctgctggcacccatcgcaccggtaccgcgcgaaatcatcgtgcccgtcgaaccggcccgccgcgaggaactcgaaggctggctgaccaatctgcgcgggggcgcggtgaccatccgcgtggcctcgcgaggcgacaagaagcagcttatggaccgcgccaacgagaacgccagccaagcactgcaacgcagcaagatgagccgcatctccgacatgggcgcacgcacccaggccatgaacgatgtggccaaggcattgggactcgcgcaagccccgctgcgcatcgaatgctacgacatttcgaacactgtgggcggtgccttccaagtggcctccatggtggtgttcgaagacgcgatcgccaagaaatccgaataccgacgcttcgccgtccgaggcaaggacggcaaaggcgcggtggatgatctgtccgcgctttacgagacgctcacccgccgcttcaggcacggcaacatcgccggcgactccggcgaaagcatcgacgcggaacagcgcgcggcctcggccgccggcaagatgaccactgccgtggcggcggagacaatcgttgcgaacggtaacgacaatggtgagggcggttccgacatcagtggcaaggggcacgcggtgccggtcggagtgcagaacgatgcacgggagtcctcgcccgacatcgtccagcagaacacaaaccggcatcactttgcctacacgccgaacctggtggtggtcgacggcggtaagccacaggtcatggccgccgccaaggcgcttgaggactgtggcgtgatcgacgtggccgtctgcggactggccaaacgcttggaagaggtgtgggtgccggacgacgactatccgatcatcctcaaacgccagtccgaaggcatgtatctgctgcagcgtgtacgcgacgaatcccaccgcttcgccatcacctaccaccgccaacagcggcgcaaaggcgccctgcgcagcgcgctcgacgagattcccggcatcggcgaaagctaccagaagcggctgctcaaccacttcggctcggtcaaagccatgcgcgaagccagtgtcgaggacttcgagaaggtcaaaggcatcggccacgccaaagccaaagcgctgtacaacgcgctgcacgagcagtgagccggcccggtccagcagcccagagtgaattttcggttgcggggcctgtggttgacatattcgaagcaaagtgtcggctagcatggaaacagacatcaaggaggggatatggccaatcatcgttgcgctgtactcggcaaacccgtcgcgcactcattgtcacccgtgctccacaacgcggcttatcgttcgctgaaactcgacgattggctgtacgacaagcacgaggtgggggaagacgacctcgacgctttcctcaaaggccttggctcgacgtgggctggcctgagcctgaccatgccgttgaagaagaccatccaaccgtacggtgttccggaaaatctgtgggccaaggaactgaaggtggcgaataccgcggtattcgactggagtgtggctaccgatgatcccgcttggccgaacggcaagccgggcatcaagctgtacaacaccgatgtcatcggcatccaactcgccttcgaccacgccaatcgcgaactcggcgaacaccacaccgcatcgagaagcggcgccgcgctgatcctcggcaatggcaacaccgccacttcgacgttggccgcatgctgcatgatgcccgaaatcggccatatcatcgtcgccgcccgccaccctgggaaaaacaccgggcttaaaccagtggccgaaaagttcgtcaacgtgcataacccgtacagcgaaatcgaattaggcgacgatcaggccctgctcgaggcagcccgcaacgccacctatgtcatcaacacgattcccggacatgcggccgacaacgtcgtggatgccctcaccaatgccggaaccgagccattctccggactgctgctggacgtggtctacgatccacgccccaccaagctcatggaagcctggcgcgctcatggcggtcacgccatcggcggcgaagaaatgctgctgtaccaagctctcgtacaggtattgctgatgaccggtatctgggatgacgacccgcccagcgatgccgaccagcgtctgcaggacaccaccaccgaagacgaccagctggagatcgcgatgcgcaaagctcttgaggaggcgttgtaatgagtcaacagacaacaatccgcgataccggcgaggcggccgccacgaatgcgccggcgaattctgcgacatccacatcgactccggacaaccagccgaccccgcttgatgccttcgaggtgctgctcatcaccggtatgtccggcgcaggccgctctcatgccgctgactgcgtggaagacatgggatggtatgtggtcgacaacctgcctcccaaactgcttatcccgcttgtcgacatgatgaccacctccggttccggatcgggatcgggcgtccacaagcttgccgccgtcatcgacgtgcgctccagctatttcgacgagctggccgccgtgctcggccatctggatgatctcggcgtcaaaacccatattctgttcctcgacgccagcaacgaagtgctcatcaagcgctatgaatccgtgcgccgcccgcacccgctgcagcacggcaaccgactgatcgacggcatccttgaggaacgtcacctgctggaagacctcaaggagcgagccgactgggtcattgacaccagctccctgagcatccaccagctgtccaccaaactctacgagacgatgctcggttccggccccaccaccgtggcggtacacatcttcagcttcggcttcaaatacggcatgcccatcgacgccgatttcgtggccgatgtgcgttttctgcccaacccgttctgggttcccaacctgcgcgagcttaccgggcacgacaagccggtcgccgactacgtgctttccagcaagggagccaaggaatttctcgacgcttatgagaaagctatcgagattgcgttggaaggatacgcccaggaagacaagcactatgtaaccatcgccgtcggctgcaccggtggtcagcaccggtcggtggcgatgagcgaagagctggctcgccgcttacgcgcacatgggctcaacgtaaccgtttccgcgagagaacagcataagcgtcactcatcgtaagcaggcgtcgagcggtcatcgggcaagcgttcggtgaccacactgcgagaaagcaaagcccataatacgtatcaaacgggttcgcttgtccaccagattaggtatcacagaaagccgatggcttccgaccgtatgacagcagataacggcacgaagcgcctgaagcattgagaagaacgggactgtaggaggtagatcttggctcttctggacgatgtcaaaagcgagttggcggcctttgaaggcgattcaccagccgcgatcaaggcccaagctgcggccatgatccgttttggcggcggtcttcgaccggtacagaatacatacgttatccaagccgtattcacctcgcttgacgttgcagaatggctgaagaacacgttgaggaacacgttcgggcatgaagccgaggtcaaccacctcacccgtcagaccccgaacggccctgtcgagacctacgtggtgctcgtcacccgcaacgtagtggccttggctttgcagaccggactggtcgaccgccgcaagcagcaggtccgtggactgccgtctgaagtggtcaacggatccatcgcccaaatcaaagcagcatggcgcggcgccttcatggcccgtggcttcctatccgatcccggtaaggccagcttcctggaaatcgcttgccccacggaagaggccgccatggccctgtgtggcgtggcccgtcgtctcggcatccaggccaagcatcgcacgctgcgcagctccgagcgcgtgaccctcaaggatcccgacgccatcgaacgcatgctcaagctcatgggcgccacccgttcggcccgcgaatggaccggcaagcgctccgacggcgaggcccgcggcaaggccaaccgtctggccaacttcgatgacgccaatatgcgccgttccgccaaggctgccgccgaagccagcgaaaaagtgcagcatgccttcgaagtgctcggcgataacattccggacaacctccgtcaggccggccagctgcgcatcgatcacgtggacaagagcctcgaggagcttggcaagatcgccgaaccgcaaatcaccaaggatgcgattgccggccgaattcgccgactgcttcagcttgccgagaaaacggagaaggctcgcgcagccgaaggcaagtaacccgacaatccgatttgctgtgcctattcggcaaaacgcgacaacgacgtaacgaaacaccgcattcagtcagtaggcgaatgcggtgttttgttccggaatgcctgtaatatgcaaagtggcaaaattggccactttgacgtgcgattcgtcaaggaaaggatattcatgaagacactcaaggaccttggagatctcaagggcaagcgcgttctggttcgcgctgatttcaatgttccgctggacggcaccaccatcaccgatgacggtcgaatcaaggctgctctgccgaccatcaagaccctgcgcgaagaaggcgccaaggtcatcctcatggcccaccttggccgcccgaagggcaaggtcgttcctgagctgagcctggccccggttgccgcccgtctcggcgagctgctcggcaccaacgtgccgctggccaaggacacctacggcgaggacgctcaggccaaggtcgccgccatgaacgatggcgatgttgtgctgcttgagaacgttcgcttcaacccggaggagacctctaaggacgccgacgaacgcgccgcttacgccaagaagatcgccgccctcggcgaggccttcgtttccgatggcttcggcgtggtccaccgcgcccagggctccaactacgacgttgccgccgatctgccggccgccgcaggcctgctggtcgagaaggaagtcaaggccctgtccaaggccaccgagaacccggagcgtccgttcaccgtggtgctcggcggttccaaggtctccgacaagctcggcgtcatcgagaacctgctcgacaaggccaaccgtctggtcatcggcggcggcatggtgttcaccttcctcaaggccaagggctacgaggtcggcacctccctgcttgaagaggaccagcttgagaaggtcaagggctacatcgagaccgccgagaagaacggcgttgagctcgtgctgccgaccgacgtcgccgtgaacgccggcttcccggccggtgacaccccggttgctccggaagtcgttgccgccgacgccatcccggccgacaagatgggtctggacattggcccggagtcccagaagctcttccacgacaagatcgtcgactccaagaccgtcgtgtggaacggcccgatgggcgtgttcgaggttcctgagttcgcctccggcaccaaggccgtggcccagggtctggtcgacgccaccgcagccggtgcgttcaccatcgtcggtggcggcgactccgcctccgccgtgcgtaacctcggcttcccggaggacggcttctcccacatctccaccggtggcggcgcttccctcgagttcctcgaaggcaaggagctccctggtctgaaggtgcttgagtaatccattttctagctcccctccttgaggggagctacgtattttttagaggggaaacatatggcgtccaaacgcattccgttggtggccggcaactggaagatgaatttcgaccatcttgaagccacttacttcgtgcagaagctggtatggctgttgcgtgacgctcgctttgacttcaaacgctgcgaagtcgcgcttttcccctcgttcacgtcattgcgcagcgtacaggtgctggtcgaagccgacaagctccatgtcgcctacggcgcacaatccgtttccgtgaccacccaaggtgccttcaccggcgatgtgtccgcggacatgatcgcccatctcggctgctcgtacgtcatcgtcggccactccgaacgccgcaaataccatcctgaagatgacgccaatatcgtcgatcaggtacgtgccgtgctcgccgccggcatgcagccgattttgtgcgtcggcgaaagcttcgaggaacgacgtcaaggcattgaactcgatttcgccgtgggccaggtacgagacgtcacccgcgatctcaacgaagaacaagccgccgaactcatcgtggcctacgaacctgtctgggccattggcaccggcatggtggccactccgcaatccgcccaggatgccgcaaatgccatccgcaacgatttgaagaccacttttggcacgaaggtatccgatagcgtacgtatcctgtacggcggatcggtcacctcgaaaaacgcggcggaactcatttcccaacccgacgtcgacggcttcctgatcggaggggcggccctggatgttgaggaactcgccaaaatcgctcgactggcactgaaatccacgaaatcacggaactaataccacggttttcccgtgtgtgcgctatgctggtcaacagtccaatcaatccggaggtaccctgtgaccgctcttaagatcacgctgcaagtcatcgtcgtgctgctcagcttcgtgctgaccctgctcatccttatgcacaagggcaagggcggcggtttgtccgacatgttcggcggcggtctgacccagaacgccggtacttccggtgtcgccgaaaagaacctgaaccgttggaccgttatcatcgctctggtgtgggtggcattgatcatcggcctcgacatgatgaccaagttcaacctcggctgatcggcttgcacgccatatagacttgtcgctcgcgacccatgaccgttaccgtcggtcatgggtcgtatgcgttctatcgagtattacgaaaggacatcaccatggtcactatgaaccgcaacaaagtcgttatcgtcggcactggccaggtcggtgccaccgccgccttcggcatcgtcacgcacggcctgtgcaatgagctcgtgctcatcgaccgctccgccgccaaagccctgggggaggcccgcgacctcgatgacggcagcgaattccaggaccgccacgtcaaggtgcgcgccggcgactacgccgactgcaaggacgcggacatcgtcgtcatcaccgtgggccgcaagccgccggccaactccaaccgcatggccgaactcggcttcaccgtgggccttgtgggcgaagtggtcgacaacgtcatggcctccggcttcgacggcgtgatcgtcatggtctccaacccggtcgatgtgatggcctggtatgcctggaaacgttccggcctgccgcgcacccaggtgctgggcaccggcaccgcgctcgacacctcgcgtctcaagaccatcatcggcgaagagaccggcctcgacccgcgtaacgtgggcggcttcgtgatgggcgagcacggcgactcccagttcaccgcatggtccaccgtctcgctcggcggcaagccattcgcccgcttcctggccgacaaccaagaccgtttcgcctccgtgtccaccaccgaaatcgaagagaagacccgcacccgtggcgatgagatcgtcgcggccaagggcggtaccaacttcggcatcgcctccaccgtggccggcatcgtgcagaccatcctgtgggacgaacgccgcatcgtacccgtctccaccctgctgaacggcgaatacggcgaacatgacgtgttcctcggcgtccccactgaactgcgcgccaatggtgccaacgagatcgtcgaactcgatctgagcgaggacgagcaggccaaattgcaccattccgccgaactcgtgcgtgaacactgcgaggggctgctgtgattctcgacgccatcacaccgaaacaaccccgactgctggtcgccgacctcgacggtacgttgctgcacgacgccgaggtattcgaggaccggttcatcacccagcgcagcatcgacaccatcaaccgcgcgcacgatgccggactgaaattcgccatcgccaccgcgcggccggtgagtaccggcctccagttcgccgaaaaactgccggtggacgccgtaatctatctgaacggtgccctcatcgatttcgacccggcccactccgacttcgacctgctcacctcaggtgccacgccggccgatgagaaccatttgatcaagattggcttctcctcacggcgtgcctgcgaagtctgtctgttcctgctcgatcgcatgcccggcctgaagctcggcatcgtgatgaacgacgtgcgctacaccaacttcgatgtgcgcgtgtattggaaaacacaggccttccaatacacgaacttccacgacgtgcccgaaggcgtggcggataagatcaccatcttccccgagcctgaacagtggaacgagctgcgtgcgctgattccgccggacttcgacatctccattagcgaaggcgtgatgtggatgctcatgaacccgcaggccaacaaggagcacgcgctgcacctgctgtgcgaacgactggacgtgccgctcgaacagaccgccgccttcggcgacgacctcatcgatatcaacatgatgagcgaatccggccggggtgtggccgtggccaacgcgaaccccaaggtgttgtctatcgccgacgagatctgcccgcccaacaacgaggacggcgtcgcccaatggattgaagcgcagttgggctgaaccggccgagactcgagaacacgccaaaattgaacttgtgttgaaccgggagtatgctttgaactgttgttcaaaagataaattgaactcccggttggaggcataaggatatgagcgtatcggtgtttgcggaacgtctgcgcaatgcgatgaacagtaggggattgaagcaggtcgatttggtgcacgccgccgaacatcgtggcgtaaagatgggcaagagccatatcagccaatacgtggccggcaagaccatgccccgcgaagacgtgctcgaattcctggccagcgaactggacgtcgacgcgaactggctgcgcggcgaggaatccaccccgcaattgaactcggacgcttccaacagcgtcacggacggcgaacacaccgccacgccgcttgccacgggcaccgccaagcccctgacggacagcgagattcccgtgggccgccgccgtaccttcggcaaatcgcacaagctcgacaacgtgctctacgacgtgcgcggcccggtcgccgacgaggcgatgcgcatggaggccaacggcacccacatcctgaaattgaacatcggcaatccagcacccttcggcttccgcacgccggacgaagtcgtctatgacatggcccaccagctcaccgacaccgaaggctactcgccgtccaagggcctgttctccgcgcgcaaggccatcatgcagtacgcgcagctgaagaacatcccgaacgtcaccatcgacgacatctacaccggcaacggcgtcagcgagctcatcaacctgtccatgtccgcgctgctcgacaccggcgacgaagtgctcgtgccctccccggactacccgctgtggaccgcctgcgtgaacctggccggcggcaccgccgtgcactacctgtgcgacgaacagtccgaatggtatccggacatcgatgacatccgctccaagatcaccagcaacaccaaggcgattgtcatcatcaacccgaacaaccccaccggcgcactttacccaaaggaagtgctccagcagatcgtcgacatcgcgcgtgaacaccagctcatcatcttctccgacgaaatctacgatcgcctcgtcatggacggcctgcagcacatctccatcgcctcgatggccccggacctgttctgcgtgaccttctccggcctgtcgaaatcgcacatgatcgccggctaccgcatcggctggatgatcctgtccggcaacaagcgtatcgccaaggactacatcgagggcctcaacatgctcgccaacatgcgcatgtgctcgaacgtgcccgcccagtccgtggtgcagaccgcgctcggcggccaccagagcgtcaacgactacatcgtgccgggcggccgcgtgcacgaccagcgtgacctcgtttacgacatgctcaaccagattcccggcatcaccgccgtcaagccgaaggccgcgttctacatcttcccgaagatcgacgtcaaacgcttcaacatccactcggacgagcagttcgcgctcgacctgctgcatgacaagcacatcctcatcagccacggcggcgcgttcaactggcatcgccccgaccacttccgcgtggtgtacctgccgcgcatgggcatgctgcacgaaaccatgggggagctcgccgacttcttcagctactactggcagagctgatccttggtacaggcgaacacgatcgatgccgggctgggcaccaaaccggtgccccgtcttggccctgaccatgtcggtccccaccatcgtggcgcaggcggcgaacgcctcgtacacgatcatcgaccgactgttcatcgggcacatccccgaagtgggcaacgcggcgatgaccggcgtgggcatctgcttcccgattctgccggccgtcaccgccttcgcctcgctgatcggcgcaggcggcgcgccgcgcgcctccattgaacttgggcgcggcaacttcaagaaagccgaacgcatcctcggcaccagcgccgcgttcctcatcgccatagccctgaccctcaccgtgctgctgcagttggcgaaaccactgtggccatggtctccgtactcatcggcaccggcatatccatccttcttgaccccgtgttcattttcgtgttcggatggggcgtcaggggagcggccgccgcgaacgtgctcgccacattccccggcttcttcgcctcatggttcacctcggaacagacggtcatcgacatcgtgacccgcatgatgccgattttcgtctgcggctggggtatcttcggcatccagatgggcgcgcaatgcgcactcgtcggcatgggccaggccaaacagtcggtgttcttggccgtcttccgcaagatcatcctgctcgtgccgctcgcgctgctgctgccgcactggatcggcgtcaacggcatcttcatcgccgaacccatctccgacgccacctccggcatcgtggccggcttcctgttctatgccacctaccgcaagattcggcgagatatggtctagactcctgattcaatggatgtgccgtctcatgcgttgcgaaacacgggacggatagaatgcctcgcaaaacgggtgcccgttgtttcgtgatatgaaggagattttatgccggtggtgtcgcgtcgtgcgcagccaacgtgatggccataatcgccgaaagcagggagaacaatggcagcacgcacaacacgacggtcagcagttccaaagcttcacggccgatgcaataagcgacaagacctgcattgtcagttaccgatagcgctgggcagaaatcggtgtgtctaccagtgttgtagctgtaggtaaagaacgtgagacctgaccagaacagggcaacgggaacagagccgatggcgcgaaaagccctgtactcccgcaacggtcagacagagaatcgcgacaacactcagcgcagtcaccgtcataaaccacagtggtgaggtgacgcagactccataatcgtcagttgcttggcccgagagatagtaggtcattctgccaatcgccggacagttcggatgcagcatcatgccgccccaaatgcgctcatatagtggtgcgaacgatacaccggcaccgctgagcgtcgcaacaaccgccatcaccgaccgaccgccagactccggcacagaccgggaagaactaccgtcgcggagcatcggcgataccaatggcaacaccgaggatagccgggatcacccagccgagctggtattgctgcaagggcagcatggccagcgtcgtgtccagccagccgatggagccgccgaagacggtgatcaggctggagatgcaggtggcgaaggagtcgatgcccaccagcagcacggtccagaagtagacatgcgggaatcgcgcgccgagcgacttgtgggtcagcgccagcagcaccagcacgatggcgatcggatacagtgcggacaacaccggcacggaaaccttgatgatcgcgcttagcccggcgttggacacgatgaaactgaacacggtgaagatgacctgccaggtgcggtaactcaacgttctccctgcaacggtctggaaccgagtgtggaagtaggtggcgcaggtaccgatcagtccggtgcatacgttgaggcaggcgatgacgaagacgataccgaggaacgcggtaccgaacgcgccgaacagggacgaggtgagattggtgagcacggtcgcgcccgtgtctttggcgggatcgatggtggcgatggcaccggacaccaagcccacgtagctcagtgcgccgtagatcacgatcagcagcacaccggtgccgagtccggcatacgcggtctccttctgcacttgcgattcgtcatcgacctgctgggtgcggatattcgcggaaatcacgatgccgaaatagagcgcggcgagcagatccatggtctggtagccgtcgaggaagccacgtgcaatctggtttgtggagtagtcgcccatcggtttggccggggtaccgataccgtggattaggcaggcgatgaacaggacggcaatcagcaccagcagcaacggtcccatgaatcggccgagcactttggagagtttttcgggatgctgggcgaacaggaacgccagtgtgaagaacacgagcgagtagatgagttgggccagccagccgtaggaggacggcacgaaaggcgccaccatcatttcgaacgaggtggtcgccgtacgcggaatcgcaaagcaggggccgatggtgagcatgatcgccaagccgaggaacagggcgaatttgggggagacccggccggcgagtttgtcgaagccaccggcgaaggtgaccgccagcacgccgagaatcggcaggccgaccgcggagacgatgaagccgatggccgccggtatggtcgcggaaccggcctgagctccgacaaacggcgggaagatcaggttgcccgctccgaagaacatcgaaaagaaggtaaaggtcatcaccaaccgctggcgtgcaacaagtttgttcattacggttcggcctttctctcatgtgctcgtactactgtagcaacaaacgtaagaagccccgaccggttggggtcggagcttctgtgagctaatcagttaatgcgcgaaatgcgcatcagctaataatctcaggcgttcacgcggtcgatgccggactggacgtcagccagcacggaatcccaggacttgatgaaggcggcgacaccgtcggcctccagcttgtcagtgacgtccttgaggttgatacccagctcagccagcttgttgatgacggcgtgggactcctcgtaggtgccctcgatggacggagcgccgttgccgtggtcggccagagcgttcagggtcttctccggcatggtgttgacgatgtgcttggcaacgagctcgtcaacgtacttgcagtcggagtaggcggcgttcttggtaccggtggaggcccacagcggacgctgaaccttggcacccttggcagccaggtcggcccaacgcggatcctcggcaaacttcttctcgaagagctcgtaagccaggcgagcgttggccacagcggccttgccctccagagccttggcctcgtcggagccgttggcttccagcagcttgtcgacagcggtgtccacgcgggagacgaagaaggaagcgacggagccgatgtgcttcaggtcgtggccgttggcgtcagcctgggcgatgccctcgatgaaggcgtcgatgacctgctcgtagcgctcgagcgagaagatcagggtgacgttgacggagatacccttggccagggtggcggtgatggccggcaggccttcgagggttgccggaatcttgatcatggcgttcggacggttgaccttctcccagagttccacagcctgcttggcggtgttctcggtgtcgtgggccagacgcgggtcgacctcgatggagacgcggccgtcgacgaagtcggtagtctcagcgatctcgcggaagatgtcggtggcgttgcgcacgtcggtggtggtgagctcgcggacagcggtctcaacgtcaaccttgccgagctccttgagctgagcgtcgtacgggccgacctggctcagggccttctggaagatggacgggttggtggtaacgccgaccacgttcttgttggcgatgaggtcctgcagggagccggactcaatgcgggagcgggacaggtcgtccagccagatggaaacgccgttgtcggacgtgcgctgagttgcttcagtcatttattttctccttggattcaagccctaggctcccctctcctgggagaggggagctgtccgcaacgcggactgaggggagtgggctcaagcattgctcccctcagtcaagctttcgcctgacagctcccctcagggaggggagccaacaattattgaattattgcttagttgctcacttggcggcttcgacttcggcgatggaggccttggcggcttccaccacgtgctcggcggtgatgccgaggtcgatcatgttctgagcgccgtcaccctgcaggccgaactgctcgatggagacaggcttgccgtaggaaccgaggtacttgtaccacggcatggcaacgccggcctcgacggagacacgagccttgacagcggccggaagcacagcctccttgtactcggcgtcctgctcctcgaaccattccatggacggcacggacacgacgcgagccttgacgccctcgccggccagggtcttggcggcagccacagcccactggacctcggaaccggaagccatgaggatgacgtccggagtaccctcggtgtcgaccaggatgtaagcgcccttcttgacaccgtccttggccttggcagcggtctcggcaagaaccgggacaccctgacgggtcagaaccatggcgccaggcagggtgttcttcttctcgaagaagtaacggtaagcctcggcggtctcgaaggcgtcggccgggcgaatgacctcaagctgaggaatcgcgcggaaggaagcaaggtgctcaaccggctggtgggtcgggccgtcctcgccgacggcgacggagtcgtgggaccagatgtacaggttcgggatctgcatgagggcggccagacgaacggcggaacgctcgtagtcggagaacatgaagaaggtgccgccgaacggacgggtgtgggaacccagcaggatgccgttggtgatgcagcccatggtgaactcgcgcacgccgaagtgcagctggcgaccgaactcgttgcagttcggccactgcttggtggcgcactcggccggggcgaaggtggcagcgcccttgaggtcggtcttgttggagccaccgaggtcggcggagccgccccagagttccggcatgacggcggcgatggcgttgagcacggagccggaggcgccacgagtggcgacacccttgccgacttcgaaggtggcctcaaggtcgtcaagggccttgtcgaagccttccggcagttcgccggccttcagacggtcgtacagggcggccttgtccgggttggccttgcgccaggcgtcgaacttctcgtcccaggccttgtgggcctccaggccgcgatcggcgaccttgcgggcgtgggccagggcttcttcgtcgacgtggaaggactcctccggatcgtagccgaggagtttcttgaggccggcgacggcctcggcgcccagcttggagccgtgggaggacgggtcgttggtcttgcccggggtcggccaggcgatcagggagtggaccttgatgagcttcggctggtccggggcggcggcttcggccttggcgatgacgtcggccagaccctcgatgtcctccttgtaggagccgtcgggctggatgaagctgaactcgtcggtgtaccagccgtaggcctggaagcgcttgagcacgtcctcggccagcaccaggttggtgtcgccttcgatctggatgcggttggcgtcgaagatcacggtcaggttgccgagcttctggttggcggccagggaagcggcctcgccggagatgccctcctcgatgtcgccttcaccacagatggcccaaatcttgtggtagaacggggaatcttccttcggggtctccgggtcaagcagaccgcgctggaaacgctcgccgtaggcaaagccgatggcggaggcgaagccctggcccagagggccggtggtcatttcgatgcccggggtcaggccgtactccgggtggcccggggtgcgggtggcagcgccgccacggaagttcttaaggtcgtccagggtcacgccgtagccggagaagtacagctggacgtactgggtgagggaggcatggccaccggaaaggatgaagcgatcgcggccttcccagttgggatcattcggatcgtgcttgatgaagtgctggtacagcgtgtaggcgacgggcgccagggagacgggggagccggggtggccggagcctgccttctcaaccgcgtcagccgaaaggaccttcgccatcttgatggcgcgctcgtcgagctcggtctccttgaattcggtcatggattactttccttccaattggtcgggccgcgtatccggcttgtgccgggcgcttgacgccctcacattgcgattaccatgctagcgtcggtttgcgacgttgcggtgcaattttggcgtgttttggtagtttgtgttctgttagcgttcacagtgaacattgctacgctgcaaacgaacgcattagcactcaagcctaaggagtgctaatacaatgttctaaggtgaagtgcgccacctgcacgtggcggagccaagaaagaggcaatatttctgggttcccgcgtgtcgcggcgtggcgaaccgaccgtcggggtacgccctgagtgaaccgtgactgatatgaatatgtatgcatatataaggaggcgcgcatgacgcaatcaagacgcatgctggtgctgcgcgccgtggtggaggattacatccgttctcaggagcccgtgggctccacttcgctgacgcgcgaccatgatctcggcgtcagttcggccaccatccgtaacgacatgtccgctctggaggatgaaggatatctgattcagccgcacacttcggccggtcgtgtgcccaccgaaaagggctatcgatactttgtggaccgacttgctaccgtggtgccgctcagcgaggcgcagcgccgcggcatcaacagcttcctgtccggatcggtgagtctcaaggacgcgctgcagcgttcggcacgactgttgtccgaaatcaccggtcaagtggccatagtcacctcgccatcgctggccaaggccacattgcggcacgtggagatggtgcccgttgccatgaccacgttgctcgcggtggtgattaccgacaccggccgcgtggcccagcacggcctgaccatcgcatccatgcccgccgtggacgagatcaaccggctctccaacaccgtcaacgaacaatgtgtcggactgtccctatcgaaatccgcggagaccgtgcgatccatcgccgccagcgccggctacgagtcggtgcgcggcgtggccgacgcgctggccgacgccttcgaatcgatggcattggacgaacgcgcggacgaactgtacatgtccggcacctcgcacctggcccactcccggtccctggccgatctggccccgctcttcgacgcgctggaagaacaggtcgtgctgatgaagctcatgagcaacctgggcgaggagacgaatgcatccggcgtgggcgtggccatcggctccgaaatgcacacccccggcctactgcatgcctccgtggtcagcagtggctatgggcgcagcggtgcggcgggcgaaccggcggggaacgatcccgtaggcgaacccgaaaccgaatccgagacggagagccagacgaacgacacggaacccatcgccttcgtcggctccatagggccgacccacatggactatgcggccactatggccgccgtcagggccgtagccagatatttgaccgccttcctctccgagggccggacccaagactgaccgccgtctgtggcacaatgacccgcagaccaaacgaacacaaaggatcaatcaagtggcagattattacgagacgctgggtgtggaacgcggcgccagtgacgacgagatcaagaaggcataccgcaagctcagccgtaagtaccaccccgacatcgcgggccctgaattcgaggacaagttcaaggaagtgaacaacgcctacgatgtgctgtccaatccggacaagcgccgtatgtatgattcgggcgtcgacccgaacgatccgaacgccggtgccggcggcttctccggggcgggcttcggcgatatgagcgacgtgttctccacgttcttcggttccgcgttcggtggtggctcacagggcccggtgccgcgtacccagcccggccgcgacgccctggcctccgcgtccatcgacctgaagaccgccgtgttcggcggcaccgcgcacgtcaagatcagcacgttctccctgtgccaggagtgcggcggctccggcgcccagggcggcgcacagccggtcacctgccccgactgccacggccagggattcatgcagaaggtcgtgcgcaccatgctcggccagatgatgacctccgccccctgcgaacgttgcgagggccacggtaccatcatcaagaacccgtgccccagctgcatgggccacggccgtgtgcgtaccacacgtaccgtgggcgtcaccgtgcccgccggcatcaacgacaacgcgcgtctacgtttggccaaccagggcgaagtgggtgagggcggcggcgctgccggcgacctgtacatcgacattcgcatcaaggcggataagcagttcacccgcgatggcgacgacctgcactgctggattcaggtgccgatgagctgggccgtgctcggccacgatctgtccattgacacgttcgatggtgagaagaccgtgtccatcccggccggctgccagcctgaggacactgtgacgcttaagggactgggcgtcacgaacatccgcaacaaggacgagcgcggcaacctcatcgcccacgtcaatgtgctgattcctaccaagctcaacgaaaccgagcgcggcctcatcgaacagttcgccgcctcgcatgattcaggcgccacgcacgtctcccaggcatcccgtccacaggctggccaaaagaaaggcttcttcagcaagttgaaggacgcgctgagctgagagtggatgcgttcttggctcccctcagagaggggagccaagtctgttacttcagcagggagcggcacatggagcggtattcgttgacgtagccgccgccgaagaagacacagtggccggcgatggggtagagctgccagagcgtgatacgctcctgccatccggccttcaacggatgcacggactggtagccctcggtgatttcgctcagatagctcatgccgaacaggtgcagcatagccagatcctcctcgcgatgaccgccatgtgccgccgggtcgatgagcacagcctcgggctgcccggaatcggcggtccacatcacattgccgctccacagatcaccgtggatgcgcgccggcttgtcggacgcggctcggcccatcagatccggcaacgcttcaatcacgcgctcggtcagttcgacatcgcgcttatccagctcgccacgcctcacaccaaggttgaccatcgggcgcagacgtccatcagcgaaatagctgatcgggtcggtccactcgccggtatccattttcactgggtcctgcaatggtccgaaatagcatgtgccgttatatccgtcaggcgcagacccgaaatattcggcacccacatcatgcatatgggccagagccgcaccaaaagttcgtgccgcctgaggcgtgggggacgcgctgcccacacgttcgatatccagataatccttgccccagccgtatacctgcaccacgcgcgggccgccctgcgcatgagccgctcccaaccattcgagtcctcgaccctcgcattcgaagaatccttccggtgcgaatgccctgcttttgcgatacgtggccataatgctcccttcgtcgcttacgtactatatccactttcattgtagaagccgtggatgttaccgattcttagtgttgttctacacccccttgggtagggtgttcatcgtcataacacatcaaatacttagaaatcacgaggggttatgaattttttccaagcgatcattctcggcatcgttcaggcgctgaccgagtatctcccggtatcctccagcgcacatatccgtattttcggcgatttgatgctgggctctgatcccggtgcggcgtttaccgccatcatccaaatcggcaccgaacttgcggtgattctgtatttccgtcacgacatcatcaatatccttactcactggttcagctgcctgttcggcaagaacggcaaggattggaaggcccgcatgggccgcggcgacaattacgccacactcggctggaacattatcgtcggctcgattccgattatcatcctcggcttcactctgcagaacgtcatcgagacctcgttgcgcaacctgtggattacggtaaccgtgctgttggtattcggcattctgctgtggatggtggatgccaaggctcgccagaacaaaaccatgaatgatatgacgtatcgtgatgcgttcctcttcggtttgggccagtccatggcgctgattcctggtgtgtcccgctccggcggcaccatcaccgtcggtcgcgcactgggctacacgcgtgaggccgctgtacgtctgagcttcctgatggccatccccgcggtgttcggctcaggtttgctcgaagccatcaaggccgtgaagaactacaaaaccgatgcgatgttccccggctgggggccgaccctcgtagccatggtcatcagcttcgtactcggctacatcgtgatcatcggattcctgaagttcgtatcgaacttctcctataaggccttcgccatctaccgcatcggtttggctgtggtcgtcgccttgctgctgattgtgggcgtgctgccggccatcgatccctccgtggcggctgcggcataagacgggtcgatagacgactccaatataatggtgctcccgctggcgggagccgtcagcgaagctgactgggggtggtcactggaatatgccagcagaaccaccctcagtctcgctacgcgagccagctcccgacattttgtgcgacgtgcacatggtgcactgctatgaattgtccacagggctgttcatccagcgggagcacgccatatatgggctaattgcccatctggcgcagaaacgcttctgcttctttgactagttgttcggcctggggcgctcccaaggaagcctccgcctcggctttctgctgcaagtcgtagtcgtgctccaaatgctccacgtaatcgtgaagctggtcattacaacgaaccagtatcgaggcttgcgccttccactgttcggctttctgcttcagatctgccgtatcgaaggtgaagccgatatgcttgcccaacgcatccagcaatcgcatagtgccggcagaacattcgtcgctgcccaaatattgggggatggacacccacatcgaggaatgagcaaaaccttgctgcgcggcggccacatccaaaacggtaggaatgcctaccgggccgttatacgaccggtctccttcgcattgacagtctccgtcgctgacggcgatgggcaacggacgggtatgcgggcaatcggagaacatcgaacctaacgtaatgatccgattgacatccagctcatcggcaatggccagactctggctacagtattccttccaccgatagttcggttcgggggcgatctgcgcatagatatgcttgcctgcgtccaacgtgatgtcgtagaacgtggtctgcggccagataagattggtgcgtcccgcaacatggcacagcataggacgggcaacctgatagtcatagaaatcatcacatctaatatgacgaatctcgcgggactcatatcgcttgaccagatggcgcaccgcgttcgtcgccgcctgacaggcatcattccatccctcgaatgcggcgatcaatactgcgccggtgtccttcgctgcttcactcatacctctagagtaactggaattcattgcccgaagcgcacgctttagccataagcgagagtatgcaattacaggcgacacgccgcagctggacgaactacacgcatgtgagtatagtaaacactcgtgcttcggcagggagacctcgccaaggaaacacacgcggacatagcttagttggtaaagcgcaaccttgccaaggttgagaccgcgggttcgagtcccgttgtccgctctaggtccgtgagttgacagaccttacggtgggttagccaagcggttaggcagcggcctgcaaagccgtatagacgagttcgactctcgtacccacctctcagaccagcgaagcaattcaatgggatgaaatatgacccgggcggttggcgcagtggtagcgcacttccctgacacggaaggggtcacaagttcgaatcttgtatcgcccacgaaagtcgaagcaattcgactggatataactgaagaaccgagtattcgggcgattggcgcagcggctagcgcacttcgttcacaccgaaggggtcgtaggttcgattcctacatcgcccactggattccgcttctcacggcggattcctttgcggacatagcttagttggtaaagcgcaaccttgccaaggttgagaccgcgggttcgagtcccgttgtccgctccacaacgaaacctcgcctcggcgaggtttttttcgtattggttcagatgctggtggtatttgtcgcacgtccaacctatcgtgtcctacgttgattaaccagtccaggcctgcacattagtaccgtgggccccgatagcaaaggacaaatcatggcgcaagctaccatctccataaccgtcaacggcgaagcgaaggaggtggaagcaaccaccaccggcgtagaactgttcgcggaagacaagaacatcatcgcggtcaagatcaacggcgagaaccgtgacctgtacacgccgctgaacgatggcgataccgtcgaccccatcgccctcgactccgaagacggcctcgcaatcatgcgtcactcggccacccacgtcatggcccaggccgtgcaggaagtctacccgaacgccaagctcggcgtcggccccgtcatcaaggacggcttctactacgacttccaggtcgaccagcccttcaccccggacgacctcaaggacatcgagaagcgcatgcagcgcatcatcaagtcctcccagtccttccgccgccgttccgtgactgaggaagaggctctgaaggaagaggccgaccagccctttaagatcgaactgatcgaagacaaggaagcacacctcgacccggccgccgccaccgagatctccgaaaaggagctcagcttctacgacaacgtagaccgtgatggcaatgtggtttggaaggacctgtgccgcggtccgcacctgccgaacacccgctacatcaaggccttcaagatcgagcgttccgccgccgcctactggcgtggttccgagaagaacccgaccatgcagcgcatctacggcaccgcgtgggccaccaaggaagacctcaaggcctaccagacccgtctcgaggaggccgccaagcgcgatcaccgcaagctcggcgccgagatggacctgttctccttcccggatgaaattggccccggcctggccgtgttccacccgaagggcgccgccgtgatcaacgcgatggaggactactcccgtgagatgcaccgcaagcaccactacagcttcgtgcagaccccgcacatcaccaagggcggcctgtacgagacctccggccacctgcactggtacaaggacggcatgtacccgcccatgcacctcgacgaggaaaaggacgcggacggcaacatcaccaagccgggcgccgactactacctgaagccgatgaactgcccgatgcacaacctgatcttcaagtcccgtcagcgctcctaccgcgagctgccgctgcgcctcttcgagttcggcaccgtgtaccgctacgagaagtccggcgaggtccacggcctgacccgcgtgcgcggcctcacccaggacgactcccacatctactgcacccgcgagcagatgaaagacgagctcaccagcctgctgaccttcgtgctgaacctgctcaaggactttggcctgaccgacttctacctcgagctgtccaccaaggacccgaacaagtacgtcggctccgacgagatctgggaggaggccaccaacacgctcgccgaggtcgccaaggaatccaacctcgagctcgtcgacgatccgtgcggcgccgccttctacggcccgaagatctccgtgcaggcccgcgacgccatcggccgcacctggcaggtctcgaccatccagctcgacttcaacctgcccgagcgtttccagctcgagtacatcgcgcaggacggtacccaccagcgtccggtgatgattcaccgcgccctgttcggctccatcgaacgcttcttcgccgtgctgctcgagcactacgcaggcgccttcccggcgtggctggcccccgtgcaggtgctcggcgtgccggttgccgacgagttcgccccgcatctggccggtttcgtcaagtcccttgaggacgagatggtccgttgcgagatcgactactccgacgatcgcttcggcaagaagattcgcaacgcctccaagtccaaggtgccgttcatcctcatcgtcggtgaggaagacatgaacaacaacgcggtcagcttccgcttccgtgacggcagccagctcaacggcgttccggtggacaaggcccgcgagcagatcctcaccgtcatcaagaagcgcgtccaggtgaactccgccgacgacttcaacgccgctgtggctgagtgatgtgaatggtactggctcccctctctgaggggagctggctccgtaggcgactgaggggagtcctgcatggctcgcactcccctcagtccgtttcacggacagctcccctcagagaggggagccaagaaagggtgcgaaaatgactgacgtgcgtgtcgataatccggcggactttccgcctcaggaggacacggtcgaacgactgtggactccgcagcgcatgacctatgtgctgcgcaacagcgaggatcgcccaaccaagcccaagacgaaggaatgcccgttctgcgccggacccaagaaatccgacgaagacggcctcatcgcctggcgtggcacgcacgtgttcgccatcatgaacctctacccatacaatgtcgggcatctcatgatctgcccgtaccgtcacgtcggattcatcaccgaactcgacgatgccgaactgttcgaattcgagaaggccaccaccctcgccatgaaggtgatggaaaccgtctcccgtccgcacggttacaatatcggcattaatcagggcgaagtagcaggcgcaggagtcgccgctcacctccatcagcatgtagtgcctcgctggaatggtgacgcgaacttcatgcccatcgtcgcccagacacgcaccatgcctattctgctgtccgaccagcgagaagcctatgcccaggcattcgaacagctggctccgcagtatcatctgccgcttgcctaacacaggtgcggcaccccgcgtgaccggtcttatcggtacgcataacaagacaatcatcggaaacatcacgggtatgtctgattaacggcctacaatcgtttcgtttgacatcatccgtttcaataattgctaggagcattatgtcaggtcattccaagtgggcgaccaccaagcacaagaaggccgccatcgacgccaagcgcggcaagctcttcgccaagctcatcaagaacatcgaaatcgccgcccgcctcggcggtggcgaccc

SEQ ID NO: 1049 - DNA, 36706 bp, Unknown
  R13_10m  MAG No. k141_1641
gacaccattctgtcgacccgtacttgttcgggcgcttcgacggtgacgatatggtcgaatcgcatgggcatggcgtccaggacttccgccaacagcggaacatcatgcacgaccacggcatccggattgtccgcgaccgcctgccgctcccgcgacagcgcaagatcatagatcaacggatgctcgatatcgtccagtttcctccgcatccgttccgagtcgggcccggcgaacacgtgctcggcgatccatcgccggttgagccgcccctgatcggtcagcgcgtcggggccgaaacattccgctatacgacgaagaccgacgccgcccggttccaccactcggcgcgcgagctcgtcatagtcgataagcgccgcgccgagctcccgcagtcttgtggacaccgtgcttttgcccgccgcaataccaccggtcaatcctattcgaatcatgctccccccatcatgccatgtttcgaggttcatgcacacaacggcaaaacccggcccgccgaagcgagaccgggttttgactatacgtcaggcgtcagtcgcccgatggcgaactcacttgccgagcagctggtcgcgcagggcggcgagctgatcggagtcggcgagggtaccggtagccggagcagcggaagagtagttggaggtctcctcgaccggcttctcttccttcgggccctggccgtcggcggctgcggattcggcagcgttctccagctccttggccacgaactccttgtgctcctcccacagctcgtgggcggcggcgtactgggactcccactcctcgcgctgcttctcgtaaccggcgatccactcgttggtgttcgggtcgaagccttcggggtacttgtagttgccctgctcgtcgtactcggccggcatgccgtagatggccggatcgaagtcctcggaagccgggtcgacggagtcgttggcctgcttgagggacagggagatacggcgacgatcgaggtcgacgtcgatcaccttgacgaacacggcctcgcccggcttgaccacggtctccgggttctcgacgtgacggttggcgagctcggagatgtgcaccaggccctcgatgccgtcctcgacggagatgaagacaccgaactggacgatcttggtgaccttgcccttgacgatctggccgggaacgtgggtgcgagcgaagcgctgccacggatcctcctgagtcgccttcagggacagggagatacgctcacggtcgagatcgacgtcgagcacctcgacggtgaccttgtcgccgaccttgacgacctcggacgggtggtcgatgtgcttccaggacagctcggaaacgtggatcaggccgtcaacaccgcccagatcgacgaaagcgccgaagttgacgatggaggacaccacaccctcacgaatctggcccttcttgagctgggacaggaaggtctcgcggacctcggactgggtctcctcgaggtactggcggcgggacaggaccacgttgttgcggttcttgtcgagctcaaggatcttggccttgatcttctggccgatgtacggggagaggtcgcggacgcgacgcatctcgacgagggaggcaggcaggaagccacgcagaccgatgtcgacgatgaggccgcccttgacggcttcgatgacggtgccctcaacgacgccgtcagcttccttgatcttctcgatgtcgccccaggcgcgctcgtactgggcacgcttcttggacagaatcagacggccttccttgtcttccttggtgacgacaagggcctcgatggtgtcgccgacctcgacgacttcgtcaggatcaacgtccttcttgatggaaagctcgcgggaggggatgacaccctcggtcttgtagccgatgtccaggaggacttcgtcgtgatcgatcttgacgacggtgccctcaaccagatcaccatcatcgaagttcttgatggtggaatcgactgccttgatgaagtcctcttcggtgccgatgtcgttgatggcgaccttggtgacttcagtgttgttctctgccatgtaaatatatggtttctaatagtggatggataatttctcgatattcagttatacgcacacccttacaggcatacagatattcacaatacaagcaactctgcccaaatttcctaggaaactctaggcgtgtcgttcggccatttccacgacgttggccaggagcatggctcgggtcatggggcccacgcctccggggttgggggtgtaggcggaggccttgtcgtagcaggccttgtccacgtcgcccttgatgcggtagcgaccggcttcttcgtcgtagacgcggctgacgcccacgtcgaccagcacggcgccgtccttgatcttgtcgggcgtcacgaatccggccgaacccattgcggcgacgatcacgtcggcgcggcgcatgtggtcggccacatcccgggtaccggtgtggcacagggtgacggtggcgttgacggcgttgcgcgtgagcatcaggccaatcgtgcggccaatggtgatgccgcggccaagcacgcacacttccttgccgttcagatcaatgtcataggcgtcgagcagctcgagcaccccgcgcggagtgcaaggcagcggtgtcgaaatgtcgccgcgcacatgcagcaccagttcgccgaggttgtacgggtgcatgccgtcggcatccttggccgggtcgatcatgtcgatgatcgcgttctcgttgatgcccttgggcaacggcaactggacgatgaacccggtgcaggccggatcttcgttgagttcgcgtacggcagcggcgatgtcgtcgaagctggcgtccgccggcagttccttcttgactgaggtaatgcccacttcctgacaatcggcgtgcttgccggccacgtacttcatcgacccggggtcctcgcccaccagcagcgtgcccagccctggttggatgccctgcgccttgagcttgttcactcgctcggcaaggttggtcttgatttcggccgcgattcgtttgccgtcgatttttgtggacatcaacgccctcccctgtggtttcggtgcattctatcgaaacgataggctatcgttggaacaagtcaggattatatatcgttcgctctcacgaagaaggcgtgccatggggactcaaatcacacgacttacgcgactcgccgcagccggcctgagcgccgtcctgttgttcgcgaccgccgcatgcgcagccacctcccccactgaaaccgagccggacaacaagaccagtgttcccgcaccgaccgggccgatcaatgtggtcgcctccctcaatcaatggggctcgctggccgccgagctgggcggcgatgatgtggaagtcacgtccatcgtgaactccaccaatgtggatgcccacgatttcgagccaaagacctcggacgtcgccaagctgtccaaggcccagatcatcgtggccaacggtgcgggctacgattcctgggccaccaaatcgatgaccaagaccacgaatatcgtatccgccgcttccgtcatgggtgccatggaaggcgataacccgcatctgtggttctccaaagacgctcgatccagcatggccacggccatcaccgatgcatatgtaaaggcgctccccagcaagaagaaggccttccagaagcggctcaaggcatggcaggcggatgagaaatcgctggaaacatgggcgtccgagttcaccagatcccactccgacctcacctatgcagccaccgaacccgtggtctattatctgatggccgatctcgggttcaagaatcagacgcccaaggggtatacgcaatcgaccgcttccggcggcgaaccggcccccgcggacctgcagtctttccagaaactcatcgaagacaagggcgtggatgtgctggttaacaacacgcaggaagccagtgacgcgaccaatatgatcactggcgctgccggtcgtgccgatgtgccggtagtcgacgtctccgaacaaatgcccaaggataccgacacgctgaacgcctggatcaaccagctcatcaacaccatcatcgacgcggtggatccgagctatggctgcgaagacgccacggacggcaacgcgaattccgatgattccagcgccgacggcgccgccacggatgatgccaatgcgcacgattccaaggccagcaccggttccagcacggagcccaagtacatccgtcagtgcaaggcggccacatccagtgattcgtctcaggattcggcaaaggccgatgcctccaatggcgattccggcgatgcctccggcaacgaccagaccgactccggcaaatagttagaagcaaaggacagcggcatcggattcatgcaatgccgatagacgccttgcacgagaagggttgtgcgaccattgtcgagatggccgcacaacccttttctttggttgtcaccatccgtacacgatattgagaacgattgtcagcatcgtttgccacaatcgggcgttatgagtgaaacttccgattgcatcgtgttcagcgatgccgccatcaagcgtggtgaccatatcatctggcagcatggcacctttgccattcccaccggttcggtcacggccatcgtcggcaccaacggcaccggcaaaaccacgatgatgagggccgagctgggacttttgccgctttgccatggcagcctgaccgtactgggcaagcctgcgggcgagatgaacaaacgcatcggatatgtgccgcagagctatgtggcgaatgtcgattccaatctcaccgccgaacaatccgtgttgctgggcctgaccggcacccgattcggcatccaccccatcaccaaggcccagaaagccaaagcgctcgaggcgatggagttcaccggcatcgccgacaaggcgcagtaccgtctgtccgaactgtccggcggtttgcgccagcgtgtggccatcgcccaggcgttggtgtgcgatccacaactgctgatgcttgacgagccgttggccaacctcgatctggccagtcaacgcgccaccgtacacgtgctggccaagctgaaccgtgaactgaacatgaccatccaggtggttgcgcacgatctcaatatgctcttgccgattctgaccggtgccgtctacttgctcgacgggcacccgcactacgccgatatgcacaaagtgctcgactccgacctactcacccacctctacggcacacaggtgcaggtggtcaccactccgcagggtgacatgttcgtgaccccgacgccggatgagccccaggaccagccgcaggatatgcacacggcagccgaagtggcgcaattgcaccatcacgagcacggcaacgccaccaatggcagtgccgccaacagcgccgagaatcgataacatcaagctagccgatccacagcccgtcaacgggctgcagctcaggcatggagaaaatacagggacatgagcaccatcaacttttcgtatgatcccgaatggctggacacactgtccgctccattcatgaccaacgccttcatcgccggcctgtgcattgccctggccgccggtgtcatgggatacttcaccatcgcccgtcgttccaccttcgcggcccatgcgctggcccatatcggtctgccgggcgcgaccggcgcggtgttgctcggcctgcccgtatcactgggcatgggcgtgttcgcactgggcggcgcactggtgatcggtgctttgggcaagcgcgtttccgagcgtgaaatcgcaaccggcaccgtactggccttcgccaccggcttgggtctgttcttcgcgcgattgtcgagttccgcctcccagcagatgcagtcgatcctcttcggctcgatcctgaccatcaccaccggccagatcatcggcttcgccgtgttcgacgtattgctgctggcattgttggccatcatctaccgcccgctgctgttcagctcgttggatgagcaggtggcacaggccaagggtgtgccgatcgggctgatgaacgtggcgtttatggcgattatggccggtgtaatcaccattgccgtgccggcagtgggcaccttgctgattttcgcgctggtgatcacgcctgcggccaccgccaatattctggccggctccccattcaaggcgatggtgatcgccagcgtgctgtgcctggtgtcgatttgggccggactcgtgctgtcggcgatgttccccgcccccccgagcttcattatcgtgacgctttccaccctgttctgggctatcgccaaggccgtggagacagtgcggaagtaatctcattcatttttcttgccccccgctggcaaattcatagcgggggctttgttatatcttctccaccaaggcattggcgatggcggcgatgccttcgccgcggccagtgaatcccatatggtcggtggtggtggcggtaaccgataccgggcaaccaaccgccgcagacagggcggcttcggcttcagcacggcgtgtgccgattttcgggcggttgccgatgatcgccaccgaggccgatgccggcgtatacccgttggatgccagatgcgccacaacttcttgcagcatatcgatgccatgccttccggcaccatgcgcgtccgcaccgacaccgaacagtgaaccaatgtctcccaatcgggcggcggcaagcaacgcgtcaatcagggcgtgcgcggccacatcgccatcggaatcgccttcgataccctcgtatttggcggcatcggcctcgctgcatgaatcagacgccggccagtaaagcccggcaatccacagttcacggcctgagccggcaggcgcaaaacggtgagcgtcaaaaccctgccctatcaacactcctgcagaccccatgcagtccccttcgatggcgctacccagacgaacggcagcaaacgattatgaatcacgaagccccggcgtatcgcataaggacacgaccggggcctcaacaatcaaatcacttcttcttggacttcttctcggcttcgacacgagccaaagtatcggccgcggcctcttcgggctcggcggtgtgatgcttgtcgtcaccgggttgagcgggctcgtagcccaggttcacgtcgagcagacgctgggcttccgcctcgtcgatcttctcggacaaggcgatctcagaagtcagaatggcgcgggccttggtgagcatacgcttctcgcctgcggacaggccgtgctcgtcgacatcgcgctgggcgagatcgcgaaccacttcggcgatcttgttgacgtcaccggtggcgatcttttcgacgttcagcttgtaacggcgagaccagttcatctctttctcgatgatcggggtccgcaggatgccgaacaccttggccacttcggatgcggagacgatgtcacgcacgccgaccttcctggcattgtccacgggaacgttgatgaccaaaccatcggaagagagtacggacagctgcagatattcgcgcgtcactcccttgaccgtccgctcggtaatggcctccaccttcgctgcaccatgacgcggatagacgaccatatcgccgactttgtaagacatgtaccctccgagaactgacggcttacacacaaaaactcgaataattatgccatgcggtctggaccgcccctatgagagcgctcacaaccacggagacacaccgaaaagggcaagaattcgccattttcgacgcgccaatgtagcgttttcgactccaacgcacgtagactttgggtcatggctaaagaaacgaagatcaaggaagataccgtcaccgtgcctgtcgcccaaggcgacctcgatgcggtgagcaatgctgaattctacaacccccacggagttctcggcgggcatctcggcatcggcaagcatgccgacaccgccacaatccgtgtgctgcgtccgcttgccaagtccgtgaccatcctcacccaggatggcgaatacccgatgacccacgaatacaacggcgtgttcgtggctaccgtgccggcctccggcaccaagaagcagcccacgattcccgactaccgcgtcaggaccgagtgggaaagcggcgcagtgctcattgaggacgacccataccgttatatgcccacagtcggtgacatggacacctatctgttcggcgagggccgtcacgagaagctctgggaggcgcttggcgcgcacgtgctgcgctatgacgatccgatgggcggcgtggacggcacgcctggcgaacaggtggtaggcaccgcgttctccgtgtgggccccgaacgcccatgccgtgcgcgtggtcggtaacttcaacgcctgggatggccgtcgtcatgccatgcgcgagctcggctcctccggcgtgtgggagatcttcattcccggcatcggcgcgggcgagacctacaagttccagatcctgaacgccaattacacgtgggagatgaaggctgacccgatggagcgtcagcacgaggttccgccgcacaccgcctccatcgtcaccgaatccacctacgagtggaacgatgacgcctggatgcagcaccgccgcaccaccaacccgcatgatggcccggtctccatctatgaggttcacgccggcagctggaagcagggactgacctaccgcgacctggccaagcagctcgtggactatgtcaagcaggaaggcttcacccacgtggagttcatgccactggcacagcacccgttctccggctcctggggctatcaggtcaccggctactatgcggtggattcccgcctcggctcccccgacgacttccgttacctggtcgatcggttccatcaggccggcatcggcgtgatcatggactgggtgcccgcccacttcccgaaggatgccttcgcactcggccgtttcgacggcaccccgctgtacgaggacccggacccgctgcgcggcgaacaccccgaatggggcacctatgtgttcaacttcggacgccgcgaagtacgcaacttcctggtggccaacgccctgttctggctcgaggacctgcatgtcgatgcgctgcgcgtggatgccgtcagctccatgctctacctcgactacagccgcgaacccggccattggcgtccgaacatctacggcggacgcgaaaacctggaggccatcgacttcctcaaggaagccaccgccaccgcgtacaagaacaaccccggcgtcatgatgatcgccgaggagtccaccgcatggccgggcatcaccgcccccacctccgccggcggcatcggcttcggtatgaagtggaacatgggatggatgcacgacaccctcgagtatctgcacgaggagcccatcaatcgcaagtggcaccacaacgaaatcaccttctccatggtgtacgcctactccgaacactacgtattgcccatcagccacgacgaagtcgtgtacggcaagggctccctgtacggcaagatgccgggcgatggctggcagaagctagccggcgtgcgttcgatgttcgcctatcagtgggctcacccgggcaagaagctctccttcatgggcaacgagctggcccagtggggcgagtgggatcacgacgcctccatcgattgggattgcctgaactggcaggagcaccgtcaggtccagaccatggtcgccgacctcaacgccttctacaaggcgcatccggcactttggagccaggacttcgatccggccggcttccagtggctgaccagcgacgatgccgaccacaacacgctgagcttcctgcgcatcggcaccaagggcgagaccttggccgtggtggtcaacttctccggtgaagcctggcccgattaccaggtggcgctgcccaccggcggcaagtggaccgaagtgttcaccaccgatgacgccaagtacggcggctccgacatccacaacggcaccttcgaagcggtcgagggcgaatatcattcgcgtccgttctcggcgaagatcaccgttccggctctgggagttgtattcttgaagccggaagactgaactggtcaacaggctgaaaggtaaccggtttatttatgctcaataccacagcgcgtcagaatacgacaccgcgcatggtgctggtggtcgaggacgagcccacactcgccacggccattgcccagcgcatcaccgctgaaggatggaccgctcgcgtggccggggacggcgcttccgccgtccaggccgcgtcccagctacgccccgatctggtaatcatggacatcatgctgccggtcatggatggtcttgaggccaccaaacgcatcgtcgccgaacgtccggtgccggtgctgatcctcaccgcacgtgatgacgaggccgacaaggtcatcggtctgggagcgggcgccgatgattacatgaccaaaccgttctccatgcgcgagctcatcgcccgctgcaaggcgctgctacgccgcgtggagcgtgcgaaggtcatcgccaagaattcggagaacgagaagctgctcgacttcggttcgatggtcatagacccggcccagcgcatcgtcaccgtgaacggcgagcaggtgcatctgacccccaccgagttcgatctgctggccacgctggcccgccgcccgaagtcggtgctcacccgcgaaaagctgctcgaagaggtctgggactgggtcgacgcatccggcacccgcaccgtcgacagccacgtcaaggcgctgcgccataagctcggcgccgataccatccgcaccgtgcacggcgtaggctacgctttcgagccgccgaccgcgtgatggcatccaaaaaacaacagcaatcccggcttgatgcgatgaaacctcgcgtcaagccggttgatttgttctcctctctgaagctggaactcagcgtactgatcgttatcgccactgccatcgcgtttgccatgtgctggttcctcctgaaattcggctggtccggttggatcgccatgccgctgactttggtggtggccttgggcatcacctatttcttctcccgcggcatcaccgctcccttacgccagatgcgcgatgtggccgaagccatggcggatggcgattacacggtccgcgtggatatcgatcaggatcgtcatgacgaggtcggccagctggctcgctcgttcaacgagatggccggcgaactcgaacatgccgataaaatgcgccgcgacatgatagccaatgtgagccatgagctgcgtacgcccgtttccgctttgcaggcgatggtcgagaacatggccgacggcgtcaccgagcccactcccgccaatctggagagcatcctcacccaaacgcagcgtctctccgacctcatcgccttcctgttggatttgagccgtatggaggccggtgcggcgagtctgaatatcgaaaagttcaacttcgccgactttcttgacgagaccatcgagccgttggaaatcgccgatggcggccacgcccacgacatccgcgtcaccgtgccggccgacatctcgatggaaggcgatcaggaccgcctgcgccagctgttcaccaacatcatcgccaacgcactgaagcattcggccgacggcaccaccgtgctggtcgatgcccatgaggatgacagccaaggcaccatcgtgaccaatgtggtgaatttcggctcccagattgcaccgtccgaccgttcggatatcttccggcgctttgtcaaaggcaagacgggtcccggcaccgagtcgggcggcaccggccttggcctgtccatcgcacgttgggcggcccaattgcacggcggcaccgtcaaagtggtcgatgacacgcgaggcgccgatttcgaaatcatcctgcctaaatatcacgtcgccgaacgctgatattgtccgccgtcctaccgtatactgtattcgaacagatgttcgaatacagggtgggaggcacagcatgacacagcaatccaagtcacgaaccatgccgcacgacaccacgctgtttgtcatgcagatggccggcgattccatgatcaatgccggtattcataacggcgatctgctgattgtcgatcgttcgttggcaccagtccccggagatgtggttgcggctgtcatggacgatgaaatcgccatcaagcggctggtttcacgggccggcatcaccatattgcacgccgagaatcctcgatatcccgattacatgccgagcaacggcgcttcgcctgctatctggggcatcgtcaccgatgtcattcacccgttgatatcgtcatcggaccgtcgcgccacggcatccgccaataccagcacgcccaccaccttggtgccggcctgctgaaacacctgaacgcattgccgcacggtggcacctgtggtgacgatgtcatcaatgagaagcaccgcgtcgccatggcctatgagatcacgcttcaccctgacatgaccggtgatacgacgggcacgctgtaccgaagaggtctgctgcacggagcgtgccttggtggaggagctcagggcattgcatggtcgcgcattgacaccgtacccacgcaatgcccctgccaccgatttggccaacggtgccgtatgggcacgccctcttcggcgcattgacgcccgcgatgacggcaccggaaccaccaatacgcgatgccccaagcatgatgatgatattggcgtcttgttcagcagcgacaccatgatgcggccgaaagggccgtcaagctcggtatcgtcgtggtccttccagtcgagaatggcacgacgcgccgctccctggtaaatcgatgcggaccatatacgggctccgccaccaccgtctgtatcccgctcccggcattgtgcgaacaaggcccgacatgccgcacacaatacctcatccggcgcgtcacacccagcgcagccgcgtggaaacagcagattgcaggcctgtgcccacatcgcatgccaccacttgtatacgctcggcctgtccataacgcgtcaccatcaagctggagtatcgaatcgcgcaagcagtgcatccagcagttgtaccgtgtcttgcggattctccacacgaacaccgatcgcaccggcctcaaccgcaggatagtcattacccgtaggcgtcatgcgatcgcccacgaacaccatttcatcggcctgtatgccaagtgtctgcgtcagcttgcgcacggcataggccttatcgatgccgcattcgctgacatccacactggtgtagccgccggccctgacccgcatgtgcggcagatcggccttgaccgcttcgaccagcgcctgtttcttcgtgttatcgcgatcccatgcctgtttggccgctacgggtgcgaactgtcccagagcggagaaggtgatctggctgcccctgttctcgattcgaggcccccatacctgctgttcccacaatcccagttcccgggcatgtcgctcaagactttccgagacagcggccacggtggcttcggacagatcatgcgcatacaccaaggcccattgcgtgccatcccaccggtaataccgggagccggaggcaggcatgacatgcagattgccgcgcctggcattcggggtgagtacatccagcacctgtgaggtgaccaccgccatgccgccccctgagatcagggccaccaccgtatggtcgagcagcgcacagaaccgttcgatcatcgcgggcctcatcggctgttttgagctggccagcgtgttgtccaaatcgaaaccgaacaccttggcgttggagcagacattatcgaaatcaagttcggaccacgaacgtaccaccatttgtcgcgcctccctcgttgacgaatgttcacagccaatgaaccaatcctaacgcatgttgcctccgccatgtcctatggtgggaaccatgcttcagccaccttggaacgcacgaatctaccgcaaccgccacggtcgcggcacacgaaccccgatgttcggcacccgtctgccccgttaccgcactcgcaccggcatgttcgacgatatggtggcggcccaggttcgcaggctcggccaagcgtggccggaactgatacgtccgctccagttcgcggtggaggatgtgccgccttcggatccgacgccttggcagaccgagccgaatatgacgtcccagtgcttccccgccagccacggcattcccgcacgagtcgtgctctaccgtatgccgttgcagaccgaggcacctaccaagctcgaattgcagttggccgtcagggatgagctggtggctcgcatagcggaattgtatgggcgcaggcccgaggaaatcgaccccgattggggcctgtgacagtattgcgggggccgtgccacttcaagtaagacagtggcacggcccccgcagctatatcggcgccgaaacatcatcagaccgatgcttcggcgagcgcgctctacttgacgatggaggaatcgttccgagcccagacatggaccgtggcgggcatcagcgttgaagcgtcgatggcggacaatccggcgatgtccttgtcttgcaacgaatcgtgactgaaacgcgctccccagctcactttcttggatgagtcctccaacatcagcacgaccgcggtgccatgatcgccggaaagtttgccggtctcaatcgtttgcgccgcgttcgcatccagcgtgatttcctcggaggtcaccgaagcaccggcatcatcgtaggcgtgcaaggtgaccgtcctgcgcgcattggacgtattggccagcgtgatggaggcctttactccgtcgggaagggccaaccccgagaattcggatggctcgccggcattgaccaatgcgaaatcggcttggccggagtcaccggagcgtgtggccttgacggagaacgacacggcatcctctgcggtggacatcacgcccaacgccccatcaggagcctctcccaagtcgatcgccgtcaccttatcggcagtgacggtggcatctttggcgggaaccaatcctttgtcggtaatccatgacagcccggtgctggtgtctgccttggcgaacagataagcggtgaccgcatcgccggcagtgatggacggcgccaccgacgcattggaggcggtcggcagcggcagcgcgaaatcagaacccttcggtgtcagaccatccatggtcaccgtacgtaccacggacgcgataggagtctccttgctggaaacggtcacgaacagaccatgctgcccatcgaccgcggcggacagttccatcgaggactccccctcggccggcacagacagcgtggattgtgtggacaatgccattttcccggctgtctcggaaccccagacggcaatgtcgacggtggtcggcttggtggagggattcgagacgatgagctgctgtgtggtaccggtcgtgccgccggagagcaagaacgactggctgagcgaggtcgatacgcaggatgccgccgatacgcctctcacatcgccgtcatcggcccatgatgcgatggtgccgacggtgccggtgccagctgcggcctgcaacatacgggtattgatcaggcgagctccctgatcgatcttctgagcaccggttttcaccgaggaatcgtcggtcggatcggcgtctttcaaagtcacgtcatctgaactggacttttgcccgatcgccgagacagtggcgctgtagacggagccgaacgccgcgtagcgcgcctgtgtgctcagattgccgacagtggcctggaaggcgctgtcgccgtacgtgccggtatcggccaatcctataggtgccgggcagtaggtttcggactgggtcggactaactgtctggtcgatggcattatcggaagcggccaccttgtccacccagatattggggatgggggccatgacgagaacgacgaacagcgcaatcaacaccagcatggtgatcacaccgagcacgatgccgatcgcacgtttgaaaccagaagttgtgttgctcatgcctgctcctccaatccgtaggacggtcgtctgcgaggcatggcgaccaagcagtacaacgccgtgatcacacctaggcatatcagccaggcgtgcctccagacactatgctgtgcacgttgctgccatgaggtatccacctgctgtgaggtgctgctacgcagcgtcagacgatagtagctgccgctatccgtggagaccagggactgggtgccgttcgatgcggcgatattcgcgctcaactgttcatacggcatgtcgttcgaggaatcgccggtctcgggaaccacgtagatgccgccgaatccaagcgcgctgatggccgcgatggcctcttcgtcgggattggacagcagcgaggcacaggcctgggccagctgttcgtcaaccgcatcatgcttgccggacagcaggcgcgcccgctggaccggagagctgtcgatcagatcgccgcgcgaggtgcgcatcaccgcatagttgacgatgttgcgggtctccgcgctcacggcaagcacacgatgatcggcactggcctccagataatcggtggtgaccatgggcaggccgttttcggacacgcccagtcccgcatccttatgacgttcgatgccatacatgcattggatgccgatgcagcacaccagtatcagagcaagcaccacacggccagacacgatgagcgcatgcagacggtcccttttcggtgcgggatcgctgccggacgcatgcaacggttggaatcgcttcaccgccccaccggcgacgaggcacacgcaggcaaggaagcccaatatcatcatcgcgatgccaggctgtgcggaaccggccacgacgccatcggcatccacggctatggccacacggctggaaatcagggcgagcgcgcctccgcaaacgattaccacccacatcagccgcgaggtccgcaacgcgaacggcagcaccagcgaagcaagagcgagcagcgtgatgacgccgaacagcacagtgaccgccaaatcggcataatcggtcgatcccattcgccatcccagcgcacgctgtacggcctcaagcaggctcagcgacgccggcgacccgttggcggatgacgttggcactgtgatgtcgccgaacagttgacgccacatgcccaaatcggcgtaacgcaccgcattgacgagcgtaggggccaccgcaaaggcggcaggaaccggaataagcaacagcatggcgcgcttgcggcgcacgaacagcaggaacatcaggaacacgacgatcagcgcgaacagcagctgcggttcggcggccaccacagggatgaagcacagtgcggcgatggccgcggcctgaacggatgtgcgcggcttgagcgggtcttcggtatggtacatgcccacggcacggaacacgaatgcgaacgcggccggcaggaacaccattacggtgagcatcggcatattggcctgcgcataccagccgaacataatgccggtggatgcccacaacagtcctcccagcacacgaaccacgtccgagcgggtgaatacgcccgccagcgcccagaacgacaatgcgctcagcggcgcggccacaaacagtatcatcgccagagcggcggtcacatggccgagcgtgaccagcgaggccagcatcagcaccagcagccacggcgtgggcggcgcaggaatgccggtgccgctgccaaacacccatggcgtggtggcggactgcaccagttgagtgaagctggcaccggtggaaagcaacacatcggaatacaacgatccaccggagaatatcgaacggaacaccggccaatacatcaccacgatggccgcaaagcacaccagcgccatcaccacggctgcgctccagcgatatatggtgcgtgtccgcagatgggcacgttccagcggactgagcagcactctgccctgctgggattggaatgcatcccgacgatcatggaactgcttgatctgccgactgtcggcgaacaaaacctgcagggacgatgcggcgaccttcgactgtctggccaccagcctgcgcgatttcatgtttcccgcgatatcggccaaagccaaccatggcaggcacaattgcacccatgcttcatacggcttcttgccgaacatcatggctatggccatgccaaaactgcgaatcagcctccacagccagacgataatccaggacgacatggccaggtcagtgtacagatagcgctgttgggagcgatgcaccgtcatcgcatgattgaccgtgtgatcttccttaagcggctccccgcctcgcgtacgaatgccctcataccgtgcgcgacgatgtgatatctccgcttgcgggactaccaccacgcgtccgccgctcaggcagacacggcggcagaaatcgaccgattcgctgtaggtggtcagccaggcattgatgccccgcagtcgcgtgaattgcgacatggacaccagcgcgcccgccagcgacaccgcgaacacatcctgtcgcccgtcatactgctcctgatcgggttctccatcgaccaccagggaatgcacggcgtgtcggcctgcatacataccgacatcatgcaggtgggatccttcccaatcacactgtttgcacccgagcacgctggcccccggcgtattgcgccacgcctcaagcaatcgttcaaggcatgaggcatccgaggggcgggaatcatcatggagcaaccacaatgcgcggggagcgtcatccaaatcggcccgatccaacgcccggctgaccgcatcgccgaaggaacgcgcgcccttggccgaaacgatgtgaatggtcacatgcttggactgcggcacctccactaccggccccgatggcgagggaatgacctcgaacgaagtggttatcctcgaaccggcgcgcccggtcgcgtcggcgatgatgacgactcccggaagaacattctgcgtcaataccgaacgcaatgtagaccggaggaaacgcatatcctcctcaacggtgatcacagccgtaatgccggtatccacatcctgcctatgcgtatacggtcgagaagacatggcgtcggccaacgcctcatgaatatcgctattacctgtcggactcataaactcccagtgtacgcaccagacttgaagggggtgtgtgtggaactacgcctgctcccggtgctctcgcttatatcgacggcgttcgcgctcgctcataccgccccaaataccgaatcgctcatcatggtcgatggcccatttcaggcattgttcacgcacttcgcatttggcgcacacacgcttggcatcacgggtcgagcctcccttttccgggaagaacgcctccggatcggtttgcgcgcacaacgccttgtgctgccaagatacatcgccatcaggtcggaatagtccccacaattcatgccatggctcttcggctgaatcgtcgaccacaccccacatacgattctccttgcctattgagcttttcatacggactaaattacacacatgcaatttcgtttttgtcaaattctttctcgtgtcattacatcatttttatggaactgtgtgctatggcgcggacacgatgccctgatgccgttgcacatgatattgtgccgttcctgcgcaggaacaccatagcgcaggaacacccggcggatgctgtgtcaaagtgtcattcagacaatcgacagtttcaggaggggttatgacgcaggaatcaggtggggcggatccgcatatcaacccgccaagcttcattcctgcgggaaatcgacgcacccgaccttccgggcaggtgccacgctccttcgcccctgcccgcgcctcacgtcagtcaggtcaggctccatcggcccgtccgtccgtcacgggaaatgacatcgaagagcctcaaccgaacgccaacgccacggcaagcgccaacgtcacggcaagcgccaacgtcacggacaacggcaggcggactccgcccagtttttctccgaaaaccggacgtgccacccgcagcacggctccggatgccgccgcaccgcgcagcattccgccgtcgcgagcgcggatgtcttccggctcatcccgcaacgccgtgcgcaatccgtcggatatgtcggtttcccggccctcatcgccagcagcaaacgtgtccacgaagttcagccatcttggccggccggcggcggcaacggcgaaaacggtaacggcacaccggccgcgcgccttgcgcatcatcttatgcgcgattgcggtactggtggcggcgttgattctttctgttttcggtgcctggcaatgggtggacagcaaactgaaccggagcgactggctgaccgacacccccaacacgccggcctcgacctggctgattcttggctccgacgagcgagacggttccaccgattacggcggcgtggacaatatctcaggcttcagaaccgatacgattctggtgctgatcaagcctaaaagcgggccgagttcgctgatttccattccccgcgattcgcttatgaacgtcgatgaccagtacatgaaaatcaatgcggtggcgcagattgccggcaagaaagccttggtaagcaacgtcgagcagattaccggccagaaaatcgaccatgtggcgcagatcaagttcggcggtctgcagaacgtggtgaacgccttgggcggtatcgaactgtgctatgacgaggatgttcaggattcctattccggactgaactggaaggcgggatgccatacgacggatggttccactgcattgtccttctctcgtatgcgatacgccgacgcgcgaggagacttcggacgcaacgaacgccagcggcaggtcatctcggccatcgtcaaaaaggcttccagcagtgggaccctgaccaatccgtccaaagtcgtggcagtgtccaatgccgcgatgagcgcactcaccgtggatgaaaaaaccaacccttacacgttgctcaccatggcgttggcgttcaaaagcgccaccggctcgaatggcatctccggcagcgtgtactggtccgacccagattattacgttgatggcgttggctcctcggtgctgctcgatgacgccaggaacaccgaactgttcaatcagcttgccgacggcacgcataaggccggcgccgtgggcaatctggcggaaggctgaccgacgctttcccggagcccatcggcttcatcgtcggcgcatgatcgccgccgttgcccacgcagccaatcatgcacgggcaaaatgtcatgtggataactcggcaagctagaaccacataccttgattcggcttgcgctttcggcatgcgctcccccacgctggaagcatgacatcacagcagaacgattcgaagcgacattccgcccatacggcatccgccgtatcccgggcgaagcaccgtttgggcgcgccgccattgcgcgcccgcctgaccatgcttgccgcggcgtgcccgatgatcgcgcaggcactgatgatggtcatactgctgttgcacgggcaatggctgttcgccgccatgatcacgccaggcatattcgcctgtctcgtgtccctgctgctgacgctccccccacctccgggcccggagaagacccccgccccgcaacaggcaacgatcgatatcggtatcacggacgatgccgatgcccgcgccgcagacctccgtcatgcgccgtcgcagccgatagaatcgctgctgcacttcgcacgcctgccatggcgcaccattgtgggccattggcttgaaccccttgaccttgcggtgccgatcggcatgaccggaagcgagccgctgaggctcgatctgaaccgtcaggggccgcatgctctggtggccggcaccactggttccggcaaatccgtgttgctgcaaagctggtgtctggcgctcgcctcgatgaacgggcctgagcatctgaatttcgtgtttttggatttcaaaggcggttccgcgttccgcaaactcgaacggttgccgcataccgtgggcagcgtatgcgatctggatctggcgcatgccgtacgcgcgttgcgtgcgctggaagccgaactgacacgccgtgaacagctgtccgccgctgtccatgcttccgatatccgtgatatggtcaatccgccaccgcgcctgatcgtggtcattgacgaattccatgccctgaaggaccagctcccggattatgtgaatcgtctggtgcgtattgcctcgctcggcaggtcactgggcatgtatctgatcgcctgtacgcagaatccgatgggtcaggtcagtgccgatatgaaggcgaatatgtccgtcagcatttgtttacgggttcgggaccgtctgcaatcatgcgagctgcttggtgatggtcgtgccgccgacctcagtccggcaatgcccggtgcggcgttctgcaacgattccgaacaggtgacggcattccgctgtgcaacggcgcgcgatatcgatgcggtatgccgccagatcgcgttcgcatcgcggttcgtcgggagcccgccgcagccgtccctgtttaccgcgccacttccccggcacgtaaaagaccggactgtggccaatcacgcaccgcaacgcattcgatttggacttgccgacgatggcatcaacctgcgagaagcgacggtatccctcaccggtggcaatatcggtgtcatcggcccgcaggggcgcggcaaaaccacgttgctgaaaacattggctcgacacgccagcatggctgatggcttggcggtacgtgtcagttccccgcatcgccgggtatggggatcgcaatggcttcgcaacggccgctgcacgccgtatgccagctcggatgcaccaccgcctccgcatatcgtgtggttcgtcgacgacgccgatgagttgttcgacccattccgcaccgacgagcaggcgctgtctttcacacatgcgttggccgatgagtccgtcagcgtggtattcgccgtcagcacgattcgcccgatacgtataccagagcattgcaataccagaatcgtgttcccgtgcggggaacgaacgtctgaccttatggccggagtccccgctcgcctattggatacgatgagtcatatcgatgccgacaacgcgggccgggccgtgctcatcgagggcacatcggcatgtctggtgcagtgcgcttcgtgaaaacttcggttttttctcggcgaaacctcttgaaaatcaccacggttcgtggttaccttggtactggacttaaggaacaacaccagccacggggcttttaagggaggcaagcaatgagcagcgcttttgattggcgagccaaggccgcatgtcgtgacaaggatccggaactcttcttcccggtgggcaacaccggtgcagcctatcagcagattgaggaggccaaggccgtgtgccgcacctgcaaggtgattgatgcatgcctgaagtgcgctctggacaccaatcaggattacggcgtgtggggcggcttgagcgaagatgagcgtcgtgcgctgaagcgccgcgccatgcgcgcccgccgttctcaggccatgcagatgcaaatctgatgttttgattatcgcttcgtcatactaggaaaccctcccacttgggagggtttccttatttttgggcttcgcatcactcatcctgagcggccctgagcttcatatcaagcaccacgcgggtgccgcctccgcggcgcggctcccaatgcacggaaccaccgaaatcattggtcacaaaggtgttgatgatctgcgtgcccaaaccagaaccggaagaacgagccaatcctccctgttcttcggagccgagaccggaaccgtcatcctcgaccaccacattgaggttcgggccggagcggcccacggaaatcgtgatatggccatccttgcggccttcgaacccatgctccaccgaattggtgatgagctcggtcagcacgagggacagcggcgtggcatcctgagcgggcatcatgccgaacttgcccatgtagttgatatcgatgtgctggtctttcatcgtggctaggtccacggccatgcgcagcagattggcaatcaccttgtcgaagtcgacgacctcgtcggcggtctggctcaatccctcatgcaccatggcaatggtctgcacgcggcgttgcgcctcctgcaattccttcttgacctcatccgacttggtcttacgagcctgaagcctcagcaatgcggagacggcctgcaggttgttcttgacacgatggtgaatctcggaaatcgtagcgtccttggtctgcagctcctgctcacgacggcgcagctcggtgacgtcacggcatagcagaatcgctccgatacgaccgttgttgtcatataagggcagcgagcgtatcgagacggcggaacggttggcgttgagttcggagtcgaccgcggctttgcccgccagcaccaacggcagggtttccggaacggggtcgttctccttcaacagctgtgtgccgagttcgctgaggtaatggccaggcatggtggtcagcaggccgagacgcctaaagcagctgatggcgttcggggctgcgtatcgaaccacgccgtccatggtcaggatgatgaagccgtccgccacgcgagcgatatggcgctggctcatcaccgaatccttgtaggggaactggcctcgtggaatcatctcgtacagctgtttgcccgcgttaatgctttccgactcatatcgaccgttggattctcgtgtggccatattggtctcacgcacgaccaagcccaaggtcttgccattgtgccgaaccggcgcgtacacgttgcagacggtcgccttgcccacggttctcaataccgtggagcggaacaccacgctggagagcatggcggcgtccaattcgccgaccatgtcatccggcatgacgtttcccaccacgtcttccgcccgtagcgtcatcacggtggatgggcggcattgttcggccaccacgtatttgccgtcaccgttctgtaccagcaacagcaggtcggcaaagctcagatcggcgatcacctgccaatcggcaacgagatgatgcagccactcgcggtcctcgtcgtcgaagtcggggcgcgttgcaaggatgtgtgaaaaatcagccatgcccctatcatacgcagacacgtcgccgccattgcggcaagccacacgggcaagtatgacgactattacgacatcgcatcttcaataccgcaccaatcgcgttgcacggctgcccgccgttcaggcggtcatcgcctcatacacctgagaggacaatgcggcgatctgctgctgcgcggttcccgagaccactcccgaggtcataaccaccatcacataatcccgttctgttccgtccgcggccttgccccacaccacggcggcatcattttccacgccggccagttcaccggttttattggccacctgaatgccagacggtactccggcgggtattttggcgcgtcgcgtctgcccgagcaatacgtcaagcatggagcggctggcttcggcggaaaccagtttgcctcggtacaatgcagcgaggaatctgccgcaatcggaagccgacgtccagttctcggtgccggtcccgtctgtgccggcatcggacaacacccgcaactgcttggatgagctgaagccgtatcgggcggccgtaccagtcacccgttgcatgcctgtggccatgtcgccatcgccgaccatcaataccagctgattggtggcagcgttcgagctgacggtgatcatctggttgatcagcgaggtggtatcttgcccgcccgcggccaaggtgccggcatgttgcttatcgtacacggcaagcatcacgtacagtttgatatccgaagccgccaccatgggctggccgccgacgctcacggttttgcccgtggccagatcctcgacatacaccgaccaggtgcctccattgccggccacagctgccgtgaccgccgaggacacatctgacatccgcttctcttccgccaccgtggtcaggtcgggagcaggtgccgccttgcgctccaaggtgtcatgcacagggcgttgttcgtgtttcgatgacgccgttgacgacgatgccgacgctgttgccggtgagtccgatgccgaggcgacgggcgatgttttggcgtgcgatgcgccgagaccgttatgcgcgtacatccatccaccgacgccgattaccaaagcggcgatcagggcggcgatcaggatcaatcccacgacgctgcctgttgcacgcgtgtcgctactatgcttggtatgccgagccaccgtcactgccccaatgtcttgtcaacactggccagcacccggctcatcaggtccgcggccaccgactgcccctgatattgggtgacaacggccacggcggccttatgaccattggcttcgacgatggcgaagtaattccaggtgtcctggatgccttggcctcggtgggcatgcacgatcatgtcggacggaatggttacgccttcggaagcaatgtccgcgttcatcaatgacgcgcctcccttggcgtccactgcggcgagcatgcgggccgcatcgcgggaggaactgtaattctcataaccggcattgctggccgccacatcgccgaaatcgcggttgaacgaggtgcccttatacccatgcgaagatgcccacgaattgacgccgctccagccacctaccgccgcggccgccatattgccggcattgttgtccatggaacccatcatcgcgtttgcctgcgctttggcgttgtcatcgccattgtcctgggccgcaagatagaccggcagatagagaccggcagccacgaattgcttgccggactgcgacgtggtcgcgatggtggcgtcctctgaggaatcggcgtatgttccatcgatgaccatggcggagacggccacatcggaggacgagtatgaatccgcgatgtcagacaactggctggatgtgatcaccggagtggaaggcttcgacttctccgtcgagcttttcttggacgaatcgtcgctgttcttgtctttggcgctatcagacgtgttcttcttggccttggacttggcgtcagaggaatccgtcgtgccatcatcggcggaatccgacgcatcggacccggtcgactgtaccgatgtttgcgcctgcggctgagctccccacaatcccatgctatgggtgacgaacaagccgatgaccaacgccacgacgcaaatcagcgcgatgagcacaatcaccaccgctttggtgtgatcgccgccaggacgcccggcgggaggttcaggagaagcaggtgccgcagggccagcggtcatgggtcccggtgccatgggccccggcaccgcggaacccggcgccgttggcggcgcgacggcgggcaacggcgccgccggctgcttcaccagcgtcagcgtggtgtcgtcataggcaggggccgccggattggcctcgggctgctccaatgggcttccgcactgcgaacagaaggcatttccttgctcgttggcaaacccacactccgtgcaatacaccatcaccgaacccctttttgctgtgacgttctcatcttcggattccatagtatcgccaccattgggtgatagtgttcgtgtgagtcggtattgacaagcataaaagttacgctaacgtaggttacggcagcgtaagaagcgtatcgtcaactcgtgaaacgggggcatcaccatggcatcaacaaccgacgacgcggaaaagacgatgcatcacgacgctcataacagcgcgacgattgcagaggatgccaccatcgcatacaagcgtcaggcggctatcgaggcgcgcgaacaggcgttgcaggccaaggctgatgccgtacgggccaaggcccagttcaaggccgaggccattcgagccaaagccgaggagaaggcccggcacaagctcgccaaagcggagcaccgtgcgctgaaaatcgagggcattgcccctgcggaagtggaacgcaagattcgtctcgacgtgcacggacgaccaaagccgttgatgcgcggctggattcacgcgattgccgctcccctgtcattggcggcaggcatcgtgcttatatgcctggcacatggcgcgagtctgaagtgggcgtgtgccgtgttcatgacagcgtcgctgattctgttcaccaattcggcctgctaccatctgggcgattggagcccgcgcgtcaccgatgtgctgcggcgtatcgatcatgtcaacatcttcctgctcattgccggcacgtataccccggtctcgtttgcgctggaaccgttctggcgcaatgtgatcatcatatcaatgtgggcgtgcacggccatcgccatcgtgattcatgtgatctggatcaatgcaccacgctggctgtatacggtggtgtacatcatcttcggcatctacggcctggcttatatggtgatgttctggaattcgccgtatgcggggccagccgtggtggcgctgctgtgcgccggcggtgcctgctacatcctcggcgccatcgtctacgccttgcgcaagcccgacccttggcctcgcgtcttcggcttccatgagattttccactgcggaacggtggccggatatgcctgccatatggtggccatctacatggtgatcgtctcgctgtggcaataaacgctacgacatataagtatgcccccgcctacgggggcatactagtcacttataactcaggccagcggcttggcggccttgaccgtcacggacagctcgcggccgttcggtgcggtgtaggaaacgacgtcgcccaccttggcaccttcgatggccttgccaatcggggaatccggggtcatgatgtcgtagtcggtgccggccacgatgtcacggctgccgagcacgtaggtcatctcgttgccgttgagctcgatggtcaccacagagccctcgcccacggtgccttccggggcattctcgatgatcttggaatcgcgcagcttgacggtgagctcggtgatgcggccctcgttcttgctctgcgcctcacgggcggcctggtagccgccgttctcggacaagtcgccctcggcacgcgccacggcgatcttgtgcgcgatttcctcacgcagctcgccttcacgatgggcgagctcttccttcatcttgttgtatgcttcctgcgtcagcaggtagaccttgtcctcagccatatcgtcctcctgaaccgttgtcgatgctgaaacaattttcgttatttatgacaaaacgccggctatgaccccggcgttcgtcatgtgctgacctatggtcagcgggtggaaatgatgtcgatgacgaacaccagcgtgtcctcgccgccgatgccggcctgcgggatgccgcgggaaccgtagccgtattccggcggaatggaaaccaccagacgcgagcccacgttatggcccggcacggtctggtcccagcccttgatgacctgtcccacgccgatgccgaagctggcgggctgatgacggtcgaagctggagtcgaatggggtgtccttaccccacaccacgccgtggtagttcacggtgacggtgtcgccgcgacgcacgatcgggccgtcgccctcggtcagctccacaaccttgaggcccttcggggcttcgggcgccggaaactcgataacgggcgtggtgccgaattcggcattcacctgaggcatctgatctgccattagtcctccttcaaagacacaatgcgccctaccttagcaccatcggcgaattggcggtagtccttcatccctgtacgatacgacacgccggccgtatacgtcgattccggtcatcatgctggtgaataccagacatgtcaatcagcattcgacgacattgacggcaagcccgcccttggaggtctccttgtatttggccatcatgtcttcaccggtctgcttcatggtttcgatggcctgatcaagggtcacgatatgtgagccgtcgccgagcatggccatacgcacggcgttgatggcggtgttggcggccatggcgttgcgttcgatgcatggaatctgcaccagtccgcccaccggatcgcaagtcaggcccaagttgtgttcgatgccgatctcagcagcattctccacctgttccggcgtgccgcccatgactgcggcaagtccggccgccgccatcgaacaggccgagccgacttcgccctggcaaccgacttccgcaccggaaattgaggcgttgcgtttgaacaggtatccgatggcaccggcggtcagcagaaacgtgaccacgccctgttcattggcgttgtccacgaaatgccagtaatagtgaagcacggcgggaatgatgccggcggaaccgttggtcggagcggttacgatgcgcccgcctccggcgttctcctcagagacggccaaggcgaagagatccacccatgcggcgtcggaagactcgagcacggcgtctttgcgccggctgtcgcggcgcagcacatcggaattcgaagcgagacgccgatacatcttcggcgcgcggcggggtacgtcaaggccaccgggcaatgtgggctccgccgaggtgcatccgtggtccacgcaggcgcgcataacacgccagatggcatcaatatcggatcggacctggatgcctgagcgtgaagcggtttcgttggcccatacaagttcggcgatgctgagatgatgttcccggcacaacgacaccagttcggcgcatgatgagaacgggtagggtgcctcgacgccgaaatcagtggatgatgattcgtccgcgtcggcaaaggaggtgccttccggaggacgttcatgaatgccgatcatcgggtcttcgggagcgcctttgcgcacgaatccgccgccgatggaataccagacctgttcgtcgaccaagcttgcggcggcgtcgaaagcctggaatcgcatgccattggggtgcgcggccatgcgcttccattgttcgaacaccacgtcgcggtcgtagtcgaaatggatgcgtttgaggccggcgaggttcagagtatcgtccaacgcgcaggtctcgcggatgcgcatcatgtggtcggtatccacggtggccggcagattgccttcgagcccggccatcgcagcacgatcggtgccgtggccgagaccggtcagcgccagagaaccgtaaagcgtgattttgacacgtgcggtgcgatcgaccaaatggtcggccagcaacgaggaggcaaaggcatgtgccgcgaccatcgggcctacggtgtgcgaggatgaaggtccgacgccgatggtgaacatgtcaagcacactgaacatttggctccttctcccctgctggttcggcatgccggtgtcaccaggcgtcatgccatcacgatatcgtattccagcctagcgcccggaatctttcgctttgcgcgatgatggccgcgcgcgtcgtgccggcgagcgataagtcagtcagtgagatagtgcggagaacatcataaccagtacgatgataccgatgatggccaatacgatctgcaccaccatcagcccgatggtcagtcccttcttggtggcgattttgggcgcgtacgcctgtgccaacaggaaggcgatgaagccgaacaccgcgtagttgacggtcagggccatcacatcgctgttcgacaacaccacgccgttcagcggctggttcagcgtgttcatcatcgtgctcatcacgaacatgccccacacgccgtagccgattaatccgacgacgccgtacagccatggcttgagtttgtcgttggcacgcagggtcagggcttcggcacaccacaacagggcgaagccgacgatgtaggtgaacgccacggcgatcagtatcacgatagtcgcccacggcaggagtgcggccacattgccgatcatggacagatagaatcccgagcaggcgatggcaccaacggtgagtgcagtgcccgcaatgacggcttgggcaagcatggtgggcagggcgccttgttcgactcgttcgacatcggtccagcgtgaagccatgtggattcctcgtttcatcaggtacatcgtcacaacgccacatagcctaacggccttttgtttcggccttataagctctccacatagtaagctgcgagcccctctgacgaggggagctgtcggcgaagccgactgggggagagaccgcggcacagccgcaaaaaacggcatcggccacaggccgatttcaaggtgcctccggtgggactcgaacccgcaatcattcaacggtcaaaccccaccgattccaacgtcttctgaacattctcgacggtctgcgcccacattttgcccacatcctgagaaaacagcagaccgcccatgcgctcagacaggtcgtccagatcctcgtcgaacaggtcagcatacacgtcgagcgtcatggcggccgacttgtggccgagctgccgctgcacggtcttgacgttcgcgccggactgcaccatgaggctcgcggcggtatgccgcagatcgtgaatggtcatatgcccgcgctcgatgccggccctgcgcaacgcgaccgcgaaccagccatcgctccgagtcggattccaaccgttcgtcatgggctcgtccaaaggcttgcctggagcggtgaaaaggaaatccgacggactgcgcccctcgcattgcccggcaagcgatggtctgagaatctgcggaaacatgacgacgcgaacgcgagactcgaagccgaaacaccggaagactgacgacggcaatgaatatggcggcggtattcactcaggatgccgccgcctaccaatacgaagggaacaatgtcacgaatcaccatcgacgttttggaacagcaggccgagcacatgggtttgaaggttttggaatccgatattccaggcaccacctgcggattgtattgcgaccggctgcggacgatctggcttgccgactggttgaacgaccggcagaggctctgcgccctatgccatgagattgtgcacgcgaagtaccatgatcttggctgcggcacgcggttcggagtgaagtgcgagcgtagggcgcggcgcgagacggctttgatgctgataagcccgtccgagttcgccatggccgaacggatgtgggacggtgacacatggcatatggcagccgaattgaacgtgaccacgcaggtgcttgaggactaccggcgactgttggaggaacggtcgcgcatcgcatgattttccgttccggctctattgtaaaagaatgttatatatgtatatatgtttagtttcgcttatatctacagtgtcagaggcgataaaaataagtagacatatcgcttataagtagaacatttggtatagttaaagaaacaacagaaaaagccctccgaagctctagaccagcttcggagggcaaatggaaaaccacacacgattctccacgcaccagtctaaaccgaggcgtggagggaaagcgatggacttcgtgggataccgcaatacgaagctcgttgagcaactgacaaggcaaggccgcatcaccaagacattcaaaggcaagcgcacattcgactccgaccagttcgcactgctgcacatgatggcgtccgccacctacgactggcctttggatgacaagacgcaaggcttgggcaagatgccgcgcacctacacctacggctggctggagatggcacgcgccctcggcatgaccctccccgacggcatcgaagagatcgaggtcatcgggaacgagccaagagcaccgaaacttgaaaacgctgcctatcagcgcataagcaaggccgcgaagaagcttcaggcgaacggtcttatcaaatgcctgcgcaaaggaagcccacagaaacgcaacaacgcggtctggctgctcaccatcggcacgccggaggagaacgctgatgtcgaagcgtacgtgcgcgaacgtatgcgtctctgacccgtggcgcacgcgcagcggactggatgtgacaggcagattctcaaggatggcttgtttgagaaacgctcatgattcatcagccgtcgattggcgggataatccttgttgagacatattgcaggagagcaaggaggacgatatgagaagaatgagactgacggcaacgctcactgcggcgctattgctgcttgccggctgcggggcgcaacaaggagccaacgaaggcaatcagccgcacaagaagcccgagcaagcccagcaacagcccgaaccagagaccagcgagcgtgggaaccgcgtgaagcacatcggagacaccgcatacatctacgctgacgcctcaagaaagacggagtgggcacgatggacggtgacgaacatcacgctcgacgctccctgcaccgacgagtatgccgagcctccggagaacggtcacatggtcgtcatggacgtgactgcccagaccacgaaggacttgccaaccgaccagccgctgtatctgggcgtgacgggcgattggcagtacgtgctcaaggatggcacgatatcgaacgcacccgtgaatggttctgcggcgttgtgcctaccgcaggccgataggctgccggacgtaatcggacccgccagcaaggcccaaggaaagcttgtgttcgaccttccaaccacggacgggtatctggtctataaggacggcgacgtcaccggctgggaatacccgttgagctgaacgacacgaggcaagaggctcggagggttcggtaatgttaaattatgcaatatcgttgaagtgaaactcaaactcacgcccgaaactcaaactcgggtgcgaaaaatcgcatggaacacaatgcccctctctcagctatggctgggggaggggctctttcttatcggctcatcatcttggtcagcttgtagcgcaccgacctctccgcgtcgagaatggcattgcactcatgtcctacaagactcgctccggtcatcttgaacacgatgacatggtccctcatcggatcaccccagtaacgcatctccagcgggtctatcggcatgctgaaccggttgccgtggtttacggcgtagtcatggatggcctgcaatgcgtgttcggcgccttccctgtagccttccaagtaggcttcgtctggttcatcgttgctcatgcggtcaagtatagtgggtgtttttgtgttcatgcgtggtgcttgaatggcatcgttagctaaaagtgaaaggaatggtccaataccagtctaacgagtagtattcgagtggcgtaggaaataaaacctttaatattacattagttcgttcgattttacattagttggctcgattttacattagttggctttgtttgatgtggttttcagagaaaaagcactgaattcagagaaagatcactgaattcagagaaaaagagaccccggccacccgcataccgcgagcgccggggtgcgaatgtttcttcacgatctggctaatcctgacacattcattccggcgcaccgcgccatgtaaaaaagaatgttaaaacatgtattacttatatatgtgtaattgagattacatcattcttggggattctattactttaaatggtagtgcccgagtttttgcgcactttggtcttcgcccgtccccgtggcgatgatcagttcgctgactgtacgttctcaccgagccttgacatgtcgaggtagcgtcgcgtcgaccactcgctggaagttacgtagcggactctcgcgcagatgagcatcaacgcgctgcgcccgtccgggaagctgccgaccacgcgcgtgcgccggcggatctcgcggttcagccgttcgatcatgttgttcgttcggatgcggcggcgatgctcgcgggggtagtcgtcgagcaggtaggtcgtggtctcgccgatgccctccctgaggcatttggcggcctccctcagtttccgcgcctccatgtccttggcgacggattccgccttctccagcgccttgtccctcgattccatggagaatatggccttcagcgcgtcggcggcccagtccctgtttttggggttgaccttggcgaggatgttgcgttcgaagtggaccatgcaccgctggtagcgggcgccgggcagcaattcgttcacagccgccaccagtccggcgcaccggtcgcccgtcaccagcctcacgcccttgaggccgcgcgcgagcatgcctttgatgaattcgcgccagctttccgagtcctccttcatgccctcggccaccgaaagcacctcgcgccgcccgtccataccgacgccgacggccaccaggatgctcacgttctccacggacccgccccagcaccttttgtgccacacgccgtccatgaacaggtacgggtaatcctgttcgaggggcctgccacgccattcgtcgatgtcggcgtataccttcttgagcttgtcgctcagggtctgcgagggcatgcggtcgccccacagcagctggctgacatcgtcgacctgccgggtggagacgccggccaaatacatgtcgatcagcgcctcctcgacgctctcctcgcgccgacggtatcgttcgatcaccgccgactcgaacaccgcccctttcagtttcggcaccttgagactcatcttgccggccttgacggtcaggtcgcgctcgtagtggccggcccggtaggccttccgctccccgctgcgctcgtagcgcgcggcgccggtgatctcgtcggcctccgcgtcgagcatcgcgttcagggtctcctcgacgcttttgcggaccatccggtccagggtggtctccaacatggcctggtcgacctgtagaatctgctgtgacatggcttcgtgccctcgtttccaatcgcggtttgttttgtttggcgacagaaaatcgtacacaggacacgggccatgtctctatctcaggcc

SEQ ID NO: 1050 - DNA, 126723 bp, Unknown
  R13_10m  MAG No. k141_1941
acacggaccccaagggccggccctaccgttcatgacggctcagggaacccctccggacgatgcccaaacgaccggccgaccaggccgggaccgaactggaccgccgggtgttccgggcgtcccacagccgcatccccgagatcgtcgaactcgcccgaaagatccgccgtcatgggcccgacatcctcgggacaatcgaattgggctgttcaaacgccaggctcgaggcgtccgacaacacgatcaaggtcaccatccgcatggcctacggcttccaccacgcgaacaatcccatcgccctcgtcatgctccgccgcggcggactcgacatacgcccaccacaaccaagagcccaacccacgaaaacagcagaagcctcttttttgtgctatcccgtaaaactgcgggacggcagctctttttcgccgtttgagccgtgccgtcccacatcaccctttgcggaccgtgacaccataacaccgagaatggcggaatttcaacgattccgtaattcgtactgcgggacgccacgctagtcaatcgattgacactcgtgccatcccgcaacagtgtgggatacgacgtcaaaatccgcgaaaatcgcgtgccgtcccgcgcgtacggcaccgcacgaatacatgctgatgaaccgcatagaaaatggctccccgtgtggggagccatgagctagttactaactagcgatgcgtcacttctcgttctggccgtggcacatcttgtacttgcggccggaaccgcacgggcacggggcgttcttgccagtgccagggaaggtgcggccgtcggcccacggcgtcttgagctcttcgctcttcggacgcttggaaaccgggaccttgccttcggcgtggctgatcggagccggtccggcaacaggcagcgtggactcgccggccccggaggcggctgcggattcggcgatcgcctgcttggcgtccgtatcctcgtcctcttcctcgacttcgccctcggcggcctcgaccacggattcgccgttctcgtcggggccggaggccacggcgatggtgtcggcgctttcggcggtctcctcgacctcgtcaacggcctcgtcggtggtggcgacctgcttgatgtcgatgtggaacagcagctggacggtctcctccttaatggcctcgatcatggagttgtacatctggtagccttcgcgctggtattcgaccagcgggtcgcgctggcccatgccacgcaggccgatgccgtccttgaggtaatccatctcgtaaaggtgctcgcgccacttgcggtcgagcacggcgagcaccacgcggcgttcgagatcgcgcaagccggtctcgccgatggtctcctccatttcgccgtactgctgcctggcgtcctcgacgatcaggtcgcgcacggcctcgacggccttcgcacccttgaggccgccgacgatcttcctgacctcgtcttcgtcgaccttggtggggatcacggtgttgagcgccttgaacaggccctcccaatcccagtccttcggtttctcggatcccttgttggcacccttgatgtaggactcgacggtgtcggaaatgaaacgcaggatgtccttgtggatgtcttcgcccttgagcacggcctgacgctcggagtagatgacggtgcgctgcttgttcatcacgtcatcgtacttcaacacgttcttgcgaatctcatagttacgggattcgacggccttctgcgcggtgcgcacgcccttggtgacggacttggcctcgatcggctggccttcctccatgcccttggccatgacctgggccaccagctgggtgttgaacagacgcatcagatcgtcttccagcgacagatagaagcgggactcgcccggatcgccctggcggccggaacgaccgcgcaactggttgtcgattcgacgggactcgtggcgttcggtgccgagcacatacaggccgcccagctccttgacttcctcgtgctcgtccttgacctgggccttgatctcgttcagggtgcccggccaacgcttctcgtactcttccggggtgtcttccggagagtaaccttcggacttgagcttggcgtcggcaaggaactcgacgttgccgccgagcatgatgtcggtaccacggccggccatgttggtggccacggtgacggcgcccttgcggccggcgacggcgaccacggcggcttccttctcgtgctgcttggcgttcaggacctggtgtgggatcttcgccacgtcgagcagggcggagaccacttcggagctttccacggaggcggtaccgagcagcaccggctgtcccttggcgtgacgcttggccacatccttgacgatggcggccagcttctccttcttagtgcggtagatgaggtcgtcctggtccttgcggatcatcggcttgttggtcttgatcggcagtacgcccagcttgtaggtgttcatgaactcggcggcctcggtttcggctgtaccggtcatgcccgcgagcttgtcgtacatacggaagtagttctgcagggtgatggtggcgaaggtctggttctcggccttgacctccacgccttccttggcttcgatggcctgatgcaggccctcgttgtagcggcgacccggcaggatacgaccggtgtgctcgtcgacgatgagcacctcgccctgggtgacgacgtagtccttgtcacgcaggaacagttccttggccttgatggcgttgttgaggtagccgatcagggcggtgttggccggctcatacaggttgtcgatgccgaggaagtcctcgaccttggtgatgcccgggtccaggatgccgacgaccttcttcttctcgtcgacgtcgtagtcctcgtcgcgggtgagcttcagcaccagcttggcgaactgacggtaccagcgggtcacgtcgccttcggccgggccggagatgataagcggggtacgggcctcatcgatgaggatggagtcgacctcatcgacgatggcgtagtggtggccgcgttgcacgaggtcggccttctcccaggccatgttgtcacgcaggtagtcgaagccgaactcgttgttggtgccgtaggtgatgtcggcgttgtactgcttgcggcgctccggcggcttctgctcggtgatgatgcagccgacgttcatgccgaggaagcggtagatacggcccatcagctcgctctggtagctggcgaggtagtcgttgacggtgaccacgtgcacgcccttgccttcgagagcgttcaggtaggtaggcagggtggcgaccagggtcttgccttcaccggtcttcatttcggcgatgttgccccagtgcagggcggcaccgcccatgagctgcacgtcgaagtgacgctggccgagggtgcgcttggagacctcgcgcacggtggcgaacgcctcgggcatgatctcgtccagactcttgccgttttcgatttcctgcttgaacttcggggtttgggccttcaggtcctcgtcggagagggcggaaatctcgtcctccagggcgttcacggccttagccacgttctccagcttcttgagctggtggccttcacccattcgcagggctttgtcaacaatatcgaccactgggttctcccttgactgataagtggtggtgtccgcgtaccagaatagcgcctcgcaccgtcagcaatcgaatttttcgacctttttacgaaaaaatggaccgcttccatattggaagcgatccatgcggtatcagctgatcatgtcagcagcccttaccctcaggctttcttgacattctccggagtgtcgatttcgaacacgccgtagctccaaccgtgacggtgatagacgacggacgggcgtccggtctccttgttcacgaacaggaagaaatcgtgtccgatcagttccatctcgtacagcgcctcgtcgatgctcataggctcggcgatgtgcagcttgcgacggatgacaatcggcgtatccccaacctggacctccacggattcgccagggccaagatcggaggcgaccgcagcctgcgggctgttgttcggctcttcctccgacacctccggctcgggctccggggcgataacacccagatccaccgggaccgggttcgcgtaaccacgacggtgatccttgcgacggtcacgagtacgacgcagacgcagcgtcaacttatccaacgccatgtccagcgcactgaattcatcggtgctggaagcctccgcacgcaccacggtacgtccggcgataacggtgatttccacgcgcttggcagtatcggcctgacgcgggttgccctcatgggtcagcacgatctgcgcgcgctgagcatccggggcgatagcggtcacacgattcatcttggtctcgaccacatcacggaacctttgcttgacctgcgtgtggcgtccggtaacgacgatttccatgttgacctcctctaactcaagcggtgtaacccgctatatgtgttccgaacggcatcatcaccgaccgggtatgtttcattgtagacgaacaatgggtgaacggccggaaactcgcccagagaatatatgtttattcccgggcttttctctgcaatgaaacgatgtatatactggggttttggcagcagtctcctataagaagatttgataccggtttatcaggctggctcgtttgttcgtcatggtaaatactgcaatggataggcagcgtcttcttgctctttctcgcacataccaagctcttacagatttgattcgtctccatacgacacgccacaacacgcccgacacgccccatccgatattcggcgcgtcgttcacgaatcgcccaactatggagaaaacaggataaccgggcaacgtcatggcctcaccgcagggcgggatgctgccttttccgcaccttatgtataattgcaggcttgagacctcttgatggccgcggccgtgatcttcattgggatcggctgaggaacttccgggctccatagagcacgatggcggataacgtccgcccagggtgacctgagagatagcgcaacagagaacagaccgcccgtcctcgacgggtaagggtgaaacggcggtgtaagagaccaccgggcctctggtaacagtaggtcgcatggcaagcctcatcgggagcaaggccaagcagatggcggtaagggctgctcgcccgtgtcatcgggtaggctgctagagcctggcggcaacgtcaggtcgagatggatggccatccgtgccgtgcgttcgcgcacggcacgacagaacccggggtataagaggtctcatttttttcttggctacaccaacaattcggcggcgactcggcggagggtttcggggctgtgtcctttgcggccgcctgcggaccaaaaccgacgctgacggacctgacgatcgaggccatgggttttgcgggctatttggcggcccaattcccatgcggcatcttcaaagatgccattttgctcagcttcgccacacacctgttcagccagtttgcggtccacgcctttgcgagcaagttccaggaccgcaccacgacgacccatcatgcgaccggcacaatagcgtacggccgattcggcataagcgcggtcgtcaatcagttgcacgcgaatcagccgttcgatgacctcgtccacaatcgcctcgccatagcctttgctgagcaatcgttcgcgcaacgcgccggatgcacgcggggccgcgtccagcaaacgcaatgcagcctcgcggcaagcgtccaaatcattgggatcttcgacaacggcagcgtctctcccccgtcgagaaaaacgtcccggcggtttcggctgaacacgctgctcggcaatgggcatgtcttgcgacgcaacaggattgcgccgcaagaatgcttcggcactaatcatgttcaggccttagctgcgccggccttggcacgggtcgttttggcagcaggcgccgctgcggccttgctgtccttggccacgtcggcagcggcggcctcgctgacagcggccgctgctgcggcttcgccatcttccgcgaactggtcggcggaaccgatcagaccgaactcggccttgaccttattctcaatctcctcggtgatggccgggttgtccttaaggaactgacgaaccttctcgcgtccctgaccgagctgatcaccctcataggtgaaccacgaaccggacttcttgaccacgccaacctgctgagccatgtcgattaccgagccctcacgggaaatgccttcaccgtagagcatgtcgaattcggcggacttgaaaggcggggccatcttgttcttgaccaccttgacgcgcgtgcggttgcccaccgcttcgtcgccattcttcagggtttgaatacgacgaatgtcgagacgcacggaggcatagaacttcagggccttgccgccggtggtggtttcgggattgccgaagaacacgccgatcttttcacgcagctggttgatgaagatggcggtggtgccggcctgagccaacgcgccggtcatcttgcgcagcgcctggctcatgagtcgggcctgcaaaccaacatggctgtctcccatttcgccttcgatttcggccttcggcactagggcggcgaccgagtcgatgacgatgacgtcaagtgcaccggagcgaatcagcatgtcggcgatttcgagggcctgctcgccgttatccggctgggagacgatgagtgagtcggtgtccacgccgagcttgcgggcgtaggccgggtcgagtgcgtgttcggcatcgatgtaggccgccacgccgcccttcttctgggcattggccaccacatgcaatgcgagcgtggtcttaccggatgattcggggccgtagatctccacgatgcggcccttgggcaggccgccgatgccgagcgccatatcgagggccaacgaaccggtgggaatcacctcgacgttctgctcgggctggtcgcccagtcgcattgcggaacctttgccgaagctcttctcaacctgcgccagcgcggtgtccagcgccgccttgcgcttgggatcgagctcgtgcttgtcctcggctgccgggtccttggccggcttggtctcaagtgccatgatcttctccttgtcgaagtcgtgcgcgaatcggatgcctccaccgtatgacggacatgccatgtgaggcaatccaaaccaaccattgtggttccagcttgcccgagctcggccatctgacctccctaagacctactgcggtaaggcttatggcggatgacaagcaccctgtgcacacgtatgcggcttcttgtcactgtgaataactataaccacacacacgaacatttgttcgaatttggcgtgcaacacgccgaaatcgccaatttcacgattcagcgactccgtaatcccgcagtgtcagacggcgggcatgggcggcgcgttatgatcgtggccccaacgcttggagtccggaacctccatttggtcacagagcacattccagaccacgcgtggctcctcccccgcgtccagcgcctcgaccacggtcatattcgccaatttggacatccgttgatcacgcgacaacgaacgaccgtaggtccgaccgaacacctcttcaagtaattcccagaattcccgttcacgcatacacgccagtgtgccaccacccgcaggacagcaaaaacccgcatcgccacaagcgatacgggttcacagctagacatagattacgggatgcggcttcacaccgccaaccgatcagccctcgactgtgtcgagataatcggccaccatgcgcagcatgcgcgaagtggagactccgagcgcatcggcgatggagctcagcagttcggagctggcttccttctgcccacgttcgacttcggaaagatagcccagcgaaacgcccgccttctcggagacctcacgcaacgtgcggcgatcgcgcgtacgcagttcgcgcagcacgtagccgatagcaccacgcagcgaaacctcgcgaggctcctcctcaaccaccacgggctcggcggcggcagtcggcttgtacgacggcgaatcctcatcccacatacgttcacgaacggcttgacgctgatccttggccttcttggcagcctgcgccttgagcacctgctgctgggcgaacatcaccgcacggcgctgggccggagtcagttcacgcatacgggcgacacccggctgcacagccatcggcttcttggcggccacatccatctgttcgttcactcgggtcatcgtttccatcgccatcgccccttccaaggtcggttcagtgtttccactatgtacaacacgacggtcccgcggttttattccttaaaacttgctgtgaatagactcaagttttgcagaacgtggaatacggtgaggcgacgaacctcttcgcgcatgccatcaagatggagttcgacggctttgagcacttcggcatggtccgcggtgaggcttgcggggatgcgcaggcccacatacaccagtccggccggcttatcaccgtccggaccggggccggccacgccggtggtggaaaggccgatgattcggtcgccgtattccggctggctgtataggcgagcggcaccgatggccatctgccgggcgacttcggggtgtacggcgccttctcgatccaatagggccttgtccacgtgtaggatcgaggccttggcattgatgtcgtaggtgacagcggagcccagcaacacgttggaggcaccgggaatacgcacgaacgcatcggcgagcaggccaccggtcagggattcagcgcaggagattttcgtattgttcgcctcgcagatcttgaggatgccggccgcgagactgtcgcacaattcctgcattggaatatccgtcacttccgcttcggggcgacgaacgtgttgtacaggtacacggcacccgagtagaggcacaggaccaatgccacgtagatgatggcgtaggtcaggaagtagtaagcggtcatccagaacggcgtggcctgtccgttacccaatgaccagaacggcagcagcagcatggacagacccacgcactggaatacggtcttgagcttgccgggccatgcggcggcgatgaccttgccgcccggacgctccatgacgaagaagcgcataacggtgatgccgatttcgcgaatcaggaacaggatggtcacccaccagccgagctcgccaaacgcggagcatacaatcattgcgccgcaagtgagcagcttgtccgcgatcggatccatgagcttgcccatttcggtgacctgattgtatttgcgggccatccaaccgtcgattttatcggtggacgcggcgatgatgaacagtaccgcggcgacccaacgcatgatcaggttgttctcaccccaggaaccggcgagaatgtcgagtgtcaggaaaatcaccacgagtacgatgcgcgagtaggtgaccaggttcggcggcgcgttccatccgtcgaacagcgatgatttgggcgatgactgcttgtccattgtgttctcatccatagtgttcacgttacccccatactcctaccttgagtgagtggtggctggatattgactgctattattcgggaatcaggtttcgtgctgatgctgtccgcgcttctctccctccgccccttagggcacctccctcatcagagggaggtcgatgggtgaattattcgccgagttcgggttgttgcggggcgctggcttcgagcgagctggtttcgcctcggatgaaggcgagcacctgcggcaggtcctgcggctgaacaagcacctcgcgggccttcgagccttcggacggcccgaccacgccgcgcgattcgagcaagtccatgagtcggccggccttggcgaagccgaccctgagcttgcgctgcagcatggaggtggaaccgaactggctagtgaccacgagttcggcggcctgcagcagcacgtccatgtcgtcgccgatctcctcgtcaggctccatactgtctttcttctcagcttccttggccatctgttcgatgtcttcgcggtacttcggcttgcgctgggtgcgtacgaactccacggccttgcgaatctcggattcggacacccacgagccctgcacacgaatcggcttggcggaacccatcggcaggaacaacgcatcgccctggccaatcagggtctcggcaccgaccgtgtcgagaatgactcgcgaatcggtggcggacgaggtggcgaacgccagtcgggatggaatgttggccttgatcagaccggtgaccacgtccacggacggacgctgggtggcgagcaccagatgcacaccggcggctcgtgccagctgggtgatgcgctggatggagctttccacatcgttcttggccaccatcataaggtcggccatctcgtcgaccaccacgaggatgtacggatagggggccaccttgcgctgggagccggcgggcgcatgtaccttgccggcgcgcacggcctcgttgaagtccttgacgtggcggaatccgaagaattcgaggtcggagtagcgtgcatccatctccttgaccacccattcgagggcctgtgcggctttcttcggatcggtgatgatcggggtcagcaggtgcgggatgcctgcgtaggcggacagttccacgcgcttgggatccaccatgatcagacgcacctgttcgggcgtggcacgcatgatgatcgaagtgagcatcgagttgataaaactcgacttaccggaaccggtggcacctgccaccagcaggtgcggcatcttggtcaggtcagcggtcacgaagtggccttcgacgtccttgccgatgccggagagcatcgggttcgggtcgcccacggccttgtcggagcgcaatacgtcgcccaagtgcacgatttcgcgatcctcgttcgggatttcgatgccgatagcggacttgccgggaatcggtgaaaggatgcgcacatccgaactggccaccgcgtaggcgatgttgcgctgcaggttggtgactttctccaccttgacgccggggccaagctcgacctcatattgggtgaccgaagggccacgcaggaagccgacgactttggcgtccacgttgaactgttcgaaggtggaagtcagtgcccggatcacgcgatcgttggccggggtgcgcatcgcatggggctgacctttggtcagcaggttcaggtcgggcaactgatacggcctattggcgtcgtcatctgtaccgttgccggcggcggcattcggctgtccgtccgtattgggcacgccctggccgactccgctgccatccgcatcggcgcctgcgtaggctccggtcgcggctgccgcggccgcggcaccggcggccccggccgctcccatcgccccggctgcccctgcgagcgcgacagtaccggcctgggcggcactgggtgcccacggatcgtctaccgctcccccaccgggcatggcgatggtctggccactggtgatgacgcgggttcgtgaagcgtcgccatcatccgtatcggcagcaggcgcagggctggataggtgcggacgaccgtcgtacgaagacgatgcaatggttcgcgcaccggtaatctcgccggtcatcggatcgaccaccggggtttcggcggtggcaccatgctggctggcggcacggtcgaacggatcgtcggcagcatacttgtcaagggttttgtcgtcttcggtcttggatttgcggccgaacagtcgtgcgaacaggctgggccgtgcatcgccggcctgatcgttgtcgttgccgtcgtcgttgccgtcatgcgagggaacaccgtcggcaaaggcgagtgtggtatctcccacatggacctcgttggggaactggctggcgcttccgtcggcctcctggcccatcggcacatacggtttgcgttggattttagctgcgattttgcgcgcatcctccggcaaatcggtgacgtgggtgccggtaatcatcagcaaggagaacaggccgacgaccacgaaaatgatgatggcgaacacgttggaaaggccccaggcgagcggtgagccgaggaagaagccgaacaggccgccggcggattgcagaatcgtgatgtcgaatccggtgtggtcggcggcgatcgccacgtcgatgatcgaacaaatcgaccacatgaacagcacccaaccggtgaccacacgcgggttattggaccctttaccggaattgcgcatgagtcggaaggccacggcggcgagcaacaccggcagcacgacgctcatcagaccaagcacaccggccgcgatggcgtgaagcagctggccgaatggaccgctgacacggaaccattcggacgcgcagaacagtacggcgagcacgagcagcaggaaacacaaaccgtcacgacggtaggctgggtcgtattcgccgacgccggtgacggcgcgtacgccggagccgaacgcgcgcggaatcgcgagcaggatcttcttccacaacggctcaggttcgaggtcaagctcgggctggaccttggtttcgccatcatgggtagacccgttgtctttggatttacggggtttggtgctgttggaggatgctgttcgtgccatatcgggtctgattctactagtacgggggtgcatggttggtgacgacaccgtgacgatatggtcgattgacgaatcccgacagccgattcgccgcggttcgtcgaggttcgtccgagtcgattccccgctggagcgcgaatatgccttatcatgggttgcatgacacccgcagagcgtgcgagcgcagtcgcatttgcactcaagaactgcgcactggaagcgatgacgccgggcgaggcaacgatgcgcgccgcggttgcctacgaacgtggcttggagcccgtgacccatctcatcgacgtggcggacgagcagaccgccatgcgtctgcgcgccgccgccgaccctgccggaaaggatcgtctggctgccggcagtctggatgatcatgccacggatcgcgcggatgcggtgttcgcacgtaccgtgttgttggcggaacgtcggtggaatccgtctggcgacttggacgagttgaccgccattcataaggggctgttcgaaggcgtgttcgaggatgcgggcaagttgcgtacctcaaacaccacacgcgaggtgacgaacgaccgggctcgggccgcgaatccggaggcgttcttcccggctgggctcattgagaccggcgcgcacaacatcgcgatggagttggcggacaagcgcaacctgcatgcgttggatcgcgacgtgttcgttcacgcgttcgcttctatttatgatgagctcggttatctgcatccgttccgtggcggcaatgcgatggtgctgcgtatattcggttcacgcttggcgcatgacgccggctgggatctcgactggggctcagtgacgcgcgaggagtatcgctccgccaagcactcggcatatcggggcgacacgtctgcactggagacgatgttcgacgcgatactacgcccggcgaatccgacgcgcgtgttcttgatcgccggctggaatcaggggcctgcacactgattgcgggtgattgcaccggcctttggctgattcctacgccgtgatatcgcccagatgatgctgggtgtattcgtcggctcgggcgtcgatcgggtcgtagtcgccggcgtcggcgtgcgcgataatggccatcgcgttgtcgaccagtttcgggttcagggcctgcagccagtggatgcgcgggtcacggccgaaccatcccatctgtttgcgggcgagtcgcttggttttctgtgcgatgtccgcgaaggcgtcgttcacatcccagataccgtccagcaggtcgatgatctgctgatagccgagcgcgcgtacggcggtggcacccagatgcgggcgcagccgttcgacttcttcgatgaatccatcgtcatacatctgcttggtgcgcaggtcgatgcgatggtccaaatccgggcggtccaggtcgagtccgatctgtacggacggaatcacgtaccggtagcgcggcagactggccgaatacggtttgccggtaagctcgatgacttccagtgcacggatggtgcggcgtggattgcgcgggtccatgcgcgcggcggcctcggggtctttggcccgcagctcgtcgaacaaagcaccggcaccctcggttttctcgcgttcctcaagacgtgtgcgcacgtcgggatcggtgccggggaaggtgatgtcatcgatggccgctctggcgtacaagccggagccgccgacgagaatcggccggatgccacgtgattgcaggtcggcgatggtctcgcgcgcaagctgctggaatcgggccacgctcatcgtgtcttcggggtcgatgatgtcgatgagatgatgcggcacggccgcctgttcttcggcggtgggtttggcggtgccgatatccatgccacggtacatctggtaggcgtccgcgttcacgatttcggcccgctcccccgcttcggccagacgccgggcgatggcgatgcccaaccccgtcttgcctgacgcggtgggaccgacgatggagacgactcgttgcgtcatatacgccccctcagtgtcgcacggaataggtctgtccagcggccacatcggggtcggcaagcagattatggcggccggcgtgtgtgacggtgaccgtgacgaaatcgccgatttcaggtaccggttcgccttcaggcacgccgatgtgcaccagcacgccagttttctcgcggccggtgacacggtgggtgtcggtgtccttcttgccgagtttgccggtgatcatcacttcgacgtcgcggccctcgaatgtggcgaggttctcttcggtgatctgctcctgcaacgccaccagtcggtcgaaccggtcctgcaccacgtcgcgcggaatctgttccattgcggcggccggcgtgccggggcgtggcgagtagatgaacgtgaacgccgaggagaagcgcgcctggcgcaccacgtccatggtctgctggaagtcctcctcagtttcgccggggaatccaacgatgatatcggtggaaatttgggcgtcgggcatggcctcgcggatacgaccgaggatatcgaggaacttggcggacctgtaggagcggcgcatcgcgcgcaggatgcggtcggaaccggactgcagcgggaagtgcagttgatgcatgatattcggcgtttcggccatggctgcaatcacatcatcggtgaaggcggccgggtgcggcgaagtgaagcgcacacgttcgagaccgtcgatggttccgcaggcgcgcaacagcttgctgaaagcgtatcgatcgccaataccataaccaaacgagttcacgttctggccgagaagcgtgacctccttggcaccatcggccacacattggcgaatctcatcaagaatgtcaccggggcggcggtccttttccttgcctcgcgtggtgggcacaatacagaacgtgcaggtgttattgcagcccacggaaatcgccacccacgagctgatgcgggaggcgcgggcggcgggaagctggctcgggaactgccgcaattgttcagtgacctggacctgcgccttgccggtcgcacgattctgatccaatagcttgggcagatcttcgatgttcttggtaccgaacaccgcggaaacccatggcgcagtatccgcgatcttcttgcggtcaagctgggccatgcagccgccaacggcgatctgcaggttcggccgaaccagtttgacgcgattgaatcggccgatggtgccatacatgcgttcggctgcgttctcgcgtaccgcacaggtattgagcaccagcagatcgaggtcattgtcattgatctggtcctcggttgcagggacgtagccattggcctccagcacgccggcgatgcgctcggaatcgtgcacgttcatctggcagccgagcgtgtggatatggaatacgcccttgccgcgctcccccagcaagctatcggttccatcggctgcaatcgaggcacgctccgcctcggtcatcatgtcttcattcataacgaccgattctatcggcggggttcgtcatgctccggtcacgtatgccattggttgtcacgatcttaaatatgggttcttggaaagattccccgcgaacatccagattgtctggaatccgccgagtatattggtggacgtgatacttgaccgacatagccgactcaaaacctccgatctacaggcccgtctcaaagcgttggatcttccgggaggcacctttactcccgaacaggtcgttaaattcgttgacctcatgcaggtgtatgaaggcgcgatgtacgagatcagcaccaagctggagattctcgacgacgagttccaggtgcggttcagccatgacccgatacatcatatggaacgccgtctgaagtcggtgagttcgatcattggcaagctggagcgcaagaatctgccaatcagtgtcaattcgattaaggacaatctgttcgatgtggccggcatccgcgtgatctgtaattaccgcgacgacgtgtattccgtgtccaactatctgtcgtcgcagtccgatattcaggtgctgcgcgtcaaggattacatcaagaacccgaaacagaacgggtatcgttcattgcacgtaatctacgcggtgcccgtgtttctctcctcgggcgcgcattacacgccggtggaggtgcagttccgtaccatcgccatggattattgggcgtcgctggagcatgcgctgcgctacaagaccgatttgccggacaacaagctcagcgagcattcacagacactgctcgactgcgcccgttcgctgcagaacatcgaagtgcaaatgcagaacatccaccgcgacatcaacggcgcgccgcaagtgggtgaagcgcctaagaccacggactgaggtgctatggaatcggcctgcgtccgattcattcaccgttgcagccacttcggcagcctggccggcgcttgggccagcagggtgccgaggaagatgagggcgcagccgaggtaaccgcgcggggtcatcacttcaccgagaagcaacgcaccgcctaccgccgagaagaacgattcgaggctcatcagcaggctggctcgcgtcggcggcacccattgctggccgaccacctgcaaggtgtacgcgatgcccaccgagccgatgccggcgtacagaatcggaatccaggaatgagcagcgccggcccagtcgaccgagccttcgatcagcgaacccgcccagctcagcacggcggtggtgcagaactggccgaatgaaagcttgatggcgtccacggtgccgcccaaagtatcgatcaccagaatatgcacggcgaacagcacggccgtgaacacgagcaggatatccgccaggccgatcgaaccgaaaccatcggtgatgcacagcagatagaagccggcgatggacagcaccacggccacgaacaccagcatgccgatgcgccggcgcaggaacacgcaggccagcaacggcaccatcacgatgtacatggcggtcaggaatcccgcgcggccggccgatttgccgtacagaatgccatactgctgcagggtgctggcggtgaacagcacgatgccgcagatcacggaaatgaccaccgggttggcgagcaatcgcgccacggccgaatcgggcttgttcgcattcagcttggcaccggtgatggtaacgacgtcggatgcaccgttcgatgcggcatctgtggagacggccctggatgcctcggtcccaacgacatcgaccccggctgtatcgcccttatctgcgctcccccggccacgctgccacagcagaatcggcaccaaagacagtgctcccagcgtgaagcgcgtggcgttgaagaacatcggcgacatcaaatccatgccctggacctgcgccacgaacgcaaaaccccagatcagcgcggtcaacaacaggctcagcatgcctacgagttcttgtcttttcacggggagacagcctaacgtgcgaatgtgacagacatgaaaaagcccggccacaatgtggtcgggctgtgacgtttgacgagcaggctacatgccgcccaccaatcggctggcgaggctagtccctgttgccgagcagctgcaggatgtacaggaacatgttcacgaagtcgaggtacaggttcagggcacacaggatggagatcttcttgaccatttccgggccctgggcctcgtattcggtcagcagcgcgcgcgtggactgcgcgtcgtagatggccatgccggcgaacaggatcaggccgatggcgcagacgatcttggtcatgccgtcgacctgcacgaaggcgagcacgatctgcgagatgatgagcacgatcaggccgatcatcaggatcgggccggccttgagcatgtcgaacttggtagtcatgccgaacatggtcagcgcgaagaagaacgctgcggtgacaccgagtgccacgccgatcgagccgaggtcgtagaccatgaagatcgagctcaaggtgaagcccatcaatgcggcgtacacatagaacatgacgcgcgcagtggccgacttcatcttggtgacgcgcatgccgagcaccacggccagggcaatctgcaccacgcacaggccgatgaggcccaccatgccggtggccatgaggaagctgtagtaggctccggtgatctggccgagcacggcgaccacggcggtgacgaggatgccgatggtcatctcgccgtacaccttggctacggagacgcggcgggcctcctcgtagttgtaggtcatcgtcgtgttgatggtggcggcacccgcgccggcaccggccgcatcctgcggcgcgtactggtaggtgggggcgccctgcggctgggcatagtagttctggccgtaaccggactgtgcgtattgctggccatatccagactgttgggcggcgttgtaatcaggcgtgttgtattgcgggttgtattgcccgttgttctggggctgctgaccgaatgtcataatcgctcctttagcgtttgttccagtaccaatcttagaggaacaaagctgaacattccatgaataggatcgatcggctcgttctgctcatcgcaaagcgtaacgggcgtttccaccatgcgcgtgacatacaccgtaatcggcgaatcgtcttgcagcacatagcccaacgccgaaatcgcctcccgtatgtttatctcggagcgtacggccaaggcgcatctctcctacgcggcggacaagctcaatatgggccgcgtacagatggcgaggctggtggagcgggccgatttgccggcgcgactgtaacacgtccggttatcgagccatatcagtcataatggagaacatgagtgaagcgattattcgaacgttacgtaaagacgattatccggcgctgatcgacctggtgcgccgcacttggtacgccgaatatgatgagcggaccggcttgctggcagccgaggccgattgggagaactgtctggcacgtgtgaccacggcctttgtcgcggagctggaagataaacccgtcgcattgattgtggggcgtatcgacgagctcgaccatcgcagcccgctgaacatgcaccggcgtcattcgttgcgcaagctattgcaactggcgtttgcccacgacggcatggcagctgcgagcgagattctcgggacgcttcatgtcgataggcaactgcgtaagcaggcggcgaacattggccatgagtattcggctgaagtggtgctgttcgtacttgatccggcggcgcgcggtcacggtctgggccggcgcatgttcgagacgatgatgagcgcattccgcgcagccggcatacgtcagtacttcctattcacggataccacgtgcgatgtcggattctatgtacatcgcggcctgacgcaggtgtgcgagcagtcactgcccgcatccgtgccgggagaaaacccgtcttcgttctacttgtatgaggggtcggtgcccgagccggcgtgatgtgcccgccgtcgggcgaacactggtaggcttgagcacagtcggcacgtcggcataccgtccagaggccggcgacgaagggattgacatggcaatcagcgcgaaggaactaccactcgggaaagtgttcaccccggatttccggttcacaatcccctcattccagcgggcctacatatggaaggccgagaacatcctgcaactggtaagcgacttggacgacgcctgcaagtcacccggtaccccgtatttcctcggctcgctgattctggtgcgcgagggcgacaaccgttatgacgtgatcgacgggcagcagcggctggtatccctgtcgatcatcatcgccgtgctgcgcgatctggagcgagacccggacctcatgtgccaactcgacgcgctgctggtggagcccggcgacaagctgcgcggcatcgtcaccgagcctcgcctcacgttgcgcgagcgcgacgcggcgttcttccgcgaacacgtgcaggaggacaacctcgaatccgtgttcgacatgaacgacgacgatctggcgactgctgcgcaacgcaacatcgtcgccaacatccgcaagacgtacgacgagatctccaattggtcggcatccgaacgccagcaattcgcgcagtatctggtcaacgaggtgacgctcgtcatcgtgaccaccgacgatctcgacggcgcgcatcgcatcttcgacgtgatgaacatgcgcggcctgccgctcaccccgtccgacgtgttcaaggcgcgcgccacggccagcctgtcgaccgccgaacttgacgtgtacgccgcccgctgggatgacatcattgacccgcttggcgacgatccgcatgactgtgaggaattcttcgcctatctgcatctcgtgctcacgcacaagccggccaccgacaagctcatcgaggatttcctagccgacgtgctgcaaccgtacatcgacaaaggcacggtgcccacgttcatcaaccaggtgctggcaccctacgcgatggcgtggcggatcatcgcacgccccagcgataccgtactgcctgccgaggtgcgtagccggcttgagggattggacgattaccgcagccacgagtggaagcccgtggccatgtgggcgttggtcaattcgtatcgcgggctgggcgacgccgatttgtcgccgttcgtggttcgtgcctcgcgtatcgccagaaccacggccacgttggaatcgttgggtgcccatgacgagcgtcggctgctggaaattctgaccgcattggaacaggtgaccggcatccgcacgctgaatcgcgctggagcgttggagcggcgcggttatgcgaacgccgccatccgtgatcttgacaagggctatttggtccaacgcgtgaacgggttgcatgtctcggacggcgaccgtgaaggcgcattggtccgtttgcatggcgagatgcagggtgacggcgatttggtccgtctgctgctgattcgcgccaacgagcagaaggccggcatgcagttggatcgaccacgccggttcagtgcgctgccgattatgccgttggatatcgaacggtcgaaatcgtttgcggactggccgcaggatcagcatgatttctggatgtaccgactcggcaatatggcgctggtgcagggccctgaggatcagttggacaggttgagtgaatatccggcacgtcgcgaccgcatgctgttgcgcgcggattcacgtcgtttcccgctgaccaatcagttgaaggatttcgctgactgcacacctgccctgctggaggcgcggcaggaagagtcggtccgactcatcgtggaatactggggcatccggtatgacaaggacgcccgtgatctgaccaagcagaatgtcgatgagttgtcgaagacctctccacggccgtctcatagttcgcggcgcgtcacgatccggcaggtgattgacgctggtctgctagtgccgggcgagcgtctggtgtgggagcggccgcgcaagggcgagcgctggtttgccacggtcaccgaaaacggtcgtctccgtctggatgacggctccgaatatccgactccgaccgccgcggcccgtgccgccgccggaggacgtcgcggcggcggtctggacgtgtggaagcgcacacgcaacggtcagaagctcagcgacatctggaagcagttccgtctacaggcgaagtaggctacagtagccggcacatcattggtggctcccctccatgaggggagccacacgctcatttattccagcgccgccacgatttcagccggtgttttgcaatattcgggaaaatgactgattaattcggcatccgatgtgaccacacagttggcaccggattgttgcgcggcaacgatgatcagatcatcttcaaaatcccgatgccgtttttgcagggaaaaagccttatcacatgtcgactcatcgacagcgacaatgtcacacatctccttcacctgctcgatacaacgccatggcacccgtgacgacagaaagctgcgagtgaaattctccacttccgattcattcggtttgaattccctacgaattgccgatgatgataggtatgcgatatccttcagcgacaatgacgcgcacaacaacgtaacgttgttcttcgcgccaagttccataaccgcttccgccatcttggcgtgatcatcgcgatggaacaaatagtccaacagtacattggtatcaagcaaaatacgctgcatggaaacgtcggtcatcaatcggccctcttcatgttgtaatacgtatcaagttgctcgtcgtacattttgtcgcggaactgcttgtaggtaaggccttccatgaggtcggtgtcttctgagatcagtccggccttgaccagttccttgtgcacgtatccggcaccttctcgaatcagtttcagcttgcgctgcttttcctcctcgcgggcttgctcttcggcggtcgtttccaatgccggcacttccttgcggtcggcgatgtacaaccacagcgaccggattacgtcactcaccgatacgcctttgcccttgaggacttcttcgacctcgttcttcagtttcgcatcaatgcgaacgttcatttggaccatggtcatggcaacctccatttcgaagatgctatacagtatagcattttggcatgcatggaaaaggccggtatccgttggcggataccggccttgctcccctcagtcagcttcgctgacagctcccctcaagagaggggagccaagaaggtggttacttcatgaggttgcgcagcacgtactggaggatgccgccgttacggtagtagtcggcctcaccgggcgtgtcgatgcggaccaccgcgtcgaactcggtcttggagccgtcctcgtgggtggcggtgacgtggaccgtcttgggggtcacgccctcgttgagcttctcgacgccggcgatatcgtaggtctcggtgccgttgaggcccagggactcataggattcgcctgccgggaactgcagcggcagcacgcccatgccgatcaggttggagcggtggatgcgctcgaagctttcggtgatcacggccttgacgccgagcatcaccgtgcccttggcggcccagtcgcgcgaggagccggtgccgtattccttgccggcgagcaccacgagcggcaccttgttgtcgatgtagtcgcgggaggcttcgaagatcgtggtcggcttcttggcgaggaagtcgtaggtgaagccgccaggcgtcacctcctcgcccacggaggcgagcagctggttgcgcagacggatgttgccgaacgtgccgcgcaccatgatctcgtggttgcctcggcgagaaccgtaagagttgaagttcttcggctccacgccgcgctcggtcaggtacttgccggccgggctggaggccttgaacgcgcctgccggggagatgtggtcggtggtgaccgagtcgcccaggagggccagcacacgggcgccgtgaatatcggcgaccgggtccggcgtggccttcatgccgtcgaagaaggtctgcttgcgcacataggtggacttgtcgttccacgcgaacagctcgccttccggcacgtcgaggcccttccagcggtggtcgccgtcgaacacggaggcgtagtccttgaggaacatctcgcggctcacgctgccgtcgaccacggcggcgacctcggcattggtgggccagatgtccttcaagtacacgtcgttgccgtccgcgtcggtgccgagcggctgggtctcgaagtcgaagtccatcgtgccggcgagcgcgtaggcgatgaccagcggcggggaggccaggtagttcatcttgacgtccgggctgatgcggccttcgaagttgcggttgccggaaagcacggcggtgacggtcaggtcgttggcgttgatcgcctcggaaatctcgggcagcagcgggccggagttgccgatgcaggtggcgcagccgaagccgacaagctggtagccgagtgcatcgaggtcgtcctgcagccccgcggccttgaggtagtcggccacgacctgcgagccgggagccagcgaggtcttgacccagggcttgggcttaaggcccctggcatgtgcgttgcgggcgatcaggccggcggcgatcatcacggacgggttggaggtgttggtgcatgaggtgatcgaggcgatggccacgtcgccgttttcgatgtcgaaatcgccacggaagtcggtggacacggccaccggatccttgacggtcttctcggtctcgtaggcgggggcggtcttctcgaacatgctcttggcttcggacagcagaatgcggtcctgcgggcgcttcgggccagcgatggacggcaccacggtaccgaggtcgagttcctcgtattcggagtactgcggttccacgtaatccgggtcggaagcgtcgccccacagcttgttggccttggcgtaggcttcgaccagggcgacctgctcttcggagcggccggtcaggcgcaggtagtcgagcgtgacattgtcaatcgggaagatgccgcaggtggagccgaactcggggcccatgttgccgatggtggcgcggttggccagcggcacggaggcgatgccttcgccgtagaattccacgaacttaccgaccacgccgtgcttgcggagcatgtcggtgatggtcaggaccacatcggtggcggtaacgccctccgggatggagccggtgagcttgaagccgaccacgcgcggcacgagcatggagatcggctggccgagcatggcggcctcggcttcaatgccgccgacgccccagccgagcacgcccagaccgttttcggtggtggtgtgcgagtcggtgcccacgcaggagtcgaggtaggcgagcgtgttgccgttggcctcggccttgctcatgaccaccttggccaagtattcgatgttgacctggtggataatgccggttcccggcggcaccacgcggaagttcttgaatgcctgctgaccccagcgcaggaactggtagcgttcgccgttgcgctggtactcgatgtccatgttttgctggaccgcgtcggcgatgccgtacttgtcgatctgcacggagtggtcgatgaccatatcggactggacctgcgggttgatgacctccgggtcgccgccgaggtccttgaccgcgtcacgcatggtggcgaggtccacgatgcagggcacgccggtgaagtcctgcatgatcacgcgggacggcgtgaactggatttcgtggctgggttcggcgttcggatcccagtcgagcagggtcttgacgtgctcgtcggtgatgttggcaccgtcgatgttgcgcaccagattctcgaccagtaccttcagcgagtacggcagatgatcgatgccgtcgagattggcgatgttgtagtaatcgaagtccttgccggctgccttgagggtagccagctggtcgtcgcgtaaggacatgcttcctccgaaatcatgaatcggcttatgatgccgctgattatccgctacacatggtacgggcacgttaccgaggctctggcgtgtcggcttgaagtatgagacaatcgcgccgccgtctcaatgccgacgcgagagcttgcccgtcagtccgcgcacgaacggcgccagccacaggcacagcgcgaagatcagcgcggaaccggccaacgcgatcagcgtggccaccatcgtggcgccggtcggcagaatcagggcgaagaagttcgccacgaacgggacgaacgcgccgatcacgcccgccgccgcgaacaccgccaccagcacgccacgccaaccgttgagtggtctggccacgcgggccagcacgaacacgcccatcgcgaacaggatgatggcgctggtggcgcgcagggcggacaggtccgcggcatcgccggtcacgttccagcccatgaccggcggcagcacccaagcggccagcagcaccgacagcgcagtggcgatgccgcccggcagcgcgaacgtgaccacgcgcttgaggaatcccggaatatagcggcgcgtgttcggcgcgagcgccaggatgaacgcgggcatgccgatggtgagagcgccgatatacgtgatatggcgcggcaggtatgggtatgggatttgcgtcagcactacaccgagcgagatcagcgcggagtacacggttttgacgaggaacaggctggccacgcgctccatattggccatgacctgacggccccgcgccacgacgtccggcaggtgcgagaacttcgaatccaccagcaccacctgggccacggccttggtggcgggtgccgcgttgcccatggcgatgccgaggtccgcctccttgatggcgagcgcgtcgttgacgccgtcgccggtcatggccaccacgtggttctgcgtgtgcaacgcctgcacgatggccttcttctggtcaggcagcacgcggccgagcacatcgacgttttcgagcacgcgggccagttcgttcacgtcctcgggcagttcgcgcgcgtccatcgccaccggctcatggtcgcctgtcagtttcactctgcgggcgatggcacccacggtcactggattgtcaccggaaatcacacgacagcgcacaccctgctcacggaaccaagcgagcgtccgctcggcgtcctcgcgaatcttctcagagcacaacaccaacgccaccggctcagcctgcacatccagttgcgggccgtccgagacattggctccctcaactgcgtccctcagtccgcttcgcggactgaggggagctgtagaccgcgcaacaagcaacacacggttgccgtcattggcatactcgttaacctgctgcaacaccgacgaatagtcaccctcaagcgcagaaataatcacctccggcgctcccatgtaccaggtctcgccggatttacgcaccgcactccatttgcgcgccgaagagaacgggacacgagactcaaccgcacctgccccatatccttgggccttgagcccggcgagtacggcttggccggtgccgttgggctgctcttcgttgcagcagtcgtagagggcctgcgtggctgcctgttccgcagccgcattggcggaatcgagcatcacgagccggttgaaggcgataccgccatcggtgatcgtgccggttttatcgaggttcagcgcgtccacgcgagccagtgtctccacggattcaagctcctgcaccagcgtattgtgacgggcgagacgcatggcggccaccgcgaagttcagcgaagtcagcagcaccaagccttcgggaatcatgcctactacgccggcgaccgcggaaaccacggcttgccgccattcgccggtggagagtgccgtgccccaaccgccgaccgtatgaatctgcgaaagaatcagcagaatacacagcggtaccacgaggaaggtcatgaatttcagaatcgtgttgatgcccttgttcaggtcggacacggttttcttgtataccttggcctgcgcggtgagcgtggcggcgtaggaatggctgccgaccgcattgaccttgaccaatgccatgccggagaccgcggtggcaccggaatacacctgctcccccaccttgtggcgcacggtacgagattcgccggtgagcatggattcgtcgagttccagtccccaggtctggatgatctgcccgtcggccggcacctgttcgccggcacggatccacagcaggtcgtcgagcacgatctcgttgtggggcacctccacgtccctgccgtcacgatgcacgaggaattcggaggccacaaggatggaaagcttatccaacgtgcgcttggccctgagttcggtgacgatgccgatgcccgtgttgatgatgatgacgaaaccgaacaccgcgtccctccaggaaccggtgatcagcaccagtaccatcgcggcgaagatgatgccgttgaacagcgtgaacacgttggctcgcacgatatcttgaaccgaacgcgaggtggaggttttcaccgcattcgattggccactttcgatacgttgcaccacttctttggaggtaagaccggttgctccgatctcaggcatttccacggctgttgttgcactcatattccccagcctaccgcgtcttgtttcgcaatccgctaaggctcagggatgattcagggtgctttctcagcttcaagggcctgattcggctcaggaaacggtgactttgatctcgcgttcgtggggttcatcgcgcgtgatggtgagcacggcgtcagtaatagtcattggcttggtatcggcagtgtcgccagaatcggcactgttggtgttgaggtgaaggatgacggcgtacagcagttcatcttcgggcgcatgctttggatcaatgagagcgactggaataccggcttcacgcgcattggtcaacgtctggttccagctctcccggttggcgtcggtaacgtcgatgccgctgataaccacgattttgaccgcgcgagctacgaaatcggcaacaccctgctgtgcggtggccgcattcttgtcgacgccagtatgagcatccatactatcggcaccgttttcactggtagtgccggcgtcagaagattcggtttcaccggatacaccatcagttgcgtttgccgagcttgcggatgtttcgagcgaggcatagtagacattgagtttgtcatcagacagcgcattgatgacgaactcgtctgcggcggtgtcagtcgaccccacaaagccgactgtgacatccgtgggatgtgtggaatcgtgggcgacttccggcatgctgtcttgggtatcgccgaccgccctaccggccggcgtgcaggagaccagggacaacacagccgccatgcaggccagcaatccgagaattcgtcgtgtcatatgctcacctgtcagcgggtaaacagggccaccgtctcaacatggtgggtcatcgggtagatatcgaaggcacggatgtctttgagctcgtagccttcgccgatgagtgtcgcggtgtcgcgtgcgaggctggtgggatcacaggcgatgtagaccacgctggatgcgccggccgcggcaatctggcggcagaccttggcacgagcaccggcacgcggcggatcaagcactacgacattcggcttggccagatgcgccggcacatggtccagcgtgcgcgagacgtcacccgcgcgggcgtccacgtcgttcaggttcatggcgcgcagattgcgctgggcgttcttgacggccacacgcgcgccttcaacgctgagcatgcgggtgcgttcaccggtcattgtggccagcggcagggtgaacaggccggaaccggaatacaaatcccagattacggcgtccgccgctgactgcagctgcccgttgaccaggttgatcacgtgcgtaccgagggcgatcggcgcttggcgatgcacttgccagaaaccgttggcgtcaacctgatagtcgaaggtcgtgccgttgatggtcacctgttcggtgagcagctgggagccggcgcgcagttcgccgtccacaagtacggcgtaattgtcgtctgctgccgcggtatcgacgatctcgccgcgcggttcgggcacggaaagacgaatctgggagccgggttcaaagccgccttcccacacgtgttcgcgcttggcgacgtccagcagcgtgcgcgtggcaagcggcatggtgtcgatggccacgcggttgtgtgtgccgcgccggcgcatggatggcatgccgttgtcgtcggcaatcatttcgatgcgggtacgccaattgaggccgccggctgccttgtcgccgggcatgcgctcgatgggaacggccacgtcgatatggccgagtcggctcatctgttcggagacggtgatggccttccacttgagctggccgggcaaagagacgtgcacgagatccgcgccgcccactcccccgcccatcgccaagggaccggcaagtggccatgccggggtgactcggtcttcggacggctcgagaacctcgacgacttcgccggtccagaaccggtcgtcccggtcgtggggctcgtcaagttcgactcgcacgagttcgtcgggcaaggcgaagcggacgaacaccacacgaccgtcgatatgggccacgcagcggccttggtcggcgtatcgttcgatacgaacttcagcttgcatcatcgtcctttccggttgcgctcggttcaagttcggcatcaacagcgacttcagtctgtatcttcctagccgcgaccttatgccggtgcatcggcgtggcaataatgaggtaactcacccaaatcgccaatgcccagaacggaatgcccatgagcaggcgggtcacgccgagtgcagccacatggttggtcagatacagcggcacctgcaccaccagccgcagcaggaacagaccgacccacaggccggtgacaatcatataggcgcgtttcagggccttgtcgtccatccagtcatggaaccatgccttgaaatgctcggtgggcaggctacggatgaattcgacgaccaaacccagtccgggcacgcgcgcaatcagcgacacggcaagcaacgcggcatagccagcattggtaatgaatccgaagatgtagtaattgcgggcctcatgagtctgccatgcccaaatcaggcagatgcctaccgccaccagaccagagaccgcgcccattaccgactggcgctgaatcagtcgcacaataacctgcaataccgccaacacggccgaaaccgcaatggtgagattcagattgctcgtggccacgaacagtacgacgaacaccacgccaggcagcatggattcgatgacgccacgcgggccaccgatggcgtcgatgacggagaaatcctcgccttcattgccggcgtcggctagagcggacaggccggtgcgtttgttgtctgccaagtctcttcctataaatcagcgaacttcggagaacatcgggccgcgagacagcgtggtcttcacttcggtctgctggtcctggctcagcggacccttcggcttgttgtccggaatgtccttgaagtgttccttgccgttctcctcgccggcttcggccgcggccttggcggccttacgctcagcgggggcgaccggcggatgcatcgggatcagatcgcgcggcgccaaaggctcctcgccacgctcgacgacgatgtcggcgaagaacttgttcagcgcctcggtctccgggctgtccggatcgatagcagccttgccggagaagatgccacgcagcatccagcgcgggccgtccacaccaacgatgcgcgtgttcacggttttgccgcccttgacattgaccggcagcttcagttcggtgccgaacacaccgtccacttcagaagcggccttgttggcttcaagcaggtcaccgcgaacgtcatcccacagtcccagggtcttgggtgcggcaaaggcttcgatctccaggctggaggagccgaaggtgatggtggaaccaagcacttgctgggtggcgcggttggccttgatgcgcagctggatgccctggaggaagggcaggtagtaggcgccgagatccagataatcgtcataatcgggcacgtcctcatcgttgacatcccacgggcctcgctcttcgccgcggccctggtattcgctggccggctcggcgagcacggtctccgcgctctcggcctttgcggcagcgttcgcttctgcggcggccaccttgtcttcatcgacaggctcaatggccggctcggcttccttcttgctcttcttcttgccgaatccgaacagtcccatgattcctcgtttcgtataacggttgcaaccttgctaacactagcactcaggcttagagaaagctgagcatcgcggccgccggtgtccggttcgattcgtagggaggccaaaatagtatggccgcatgaccatcaccattaccacgtctaacgtcaacggcattcgtgcggccaaacgcaagggcatcgaggattgggccggcaagcatgcgccggatgtctggtgcatacaggaagttcgcgcgcctcaagacgatgtcgattctattttcgatgaatttggtttcgaatacgccaccgccggcaaaatcgaggcaccggccaacctccatgccatgaacgaggtctgccgggtgaaaggccgcgcgggagtcggactgctcaccgacttggaagtgcttgacaagcgatatggtctgccaggtctgagcgaggatgtggattcagggcgttggatcgaaaccgatgtcaaaacgcctgagggctatacgatcaccgtggcatccgtgtatgtgcatgccggcaacactgacgatccgaccaaaatggaacagaagtatcgttttctggacacgatgctgaagcgcatgggcgcgttgcgggacgaggctgcgcatggcggcaaacaggccgtgctctgcggcgatttcaacatcgcgcacacgccgcttgatatcaagaacgccaaggccaatgagaagcacgccggattcctgcccgaagaacgtgcctacgtggacaaatggctggacgaatacgagttcgtggatgtgatgcgttcgttggccggtgatattcaggggccgtacacctggtggagccagcgagggcgcgccttcgacaacaatgtcggctggagaatcgactaccagttcgccacgcccgagttggcggagaccgcacgcggattcgtcatcgacaaggctcccacgtatgacaaacgctggtccgatcacgccccactcacgatcacatacgaggtatgacgtattccgtgggacaacatccgaaaatcgacgattttcgcgggtcgtcccacgcctcacagcatgagtaatcatcgaccacactaagaatggcgtaattccgggcttcgtgagaaatctgctgtgggacaacactcatgtctatcgattgatgttgatgttgtcccacaaattgtgggacaacatcgggaaaacaccgatttttgcgttttcgtcccacgcgaaccatcatgcaaacctgcgcatacgaatattgggttctttccacggatggaaagaacccaatacaatgcgctcaaacgcagattatcagtccagaccgagttggagcttgccgccggggatggcgtcgagcaggtctcgggtgtactgcttctgcgggtggtcgaagacctcatcggtggtggcgtgctccacgagcttgccgtgctgcatcaccacaacctcgtcggcgatctggcgaaccacggccagatcgtgggtgatgaacagatagctcaggcccttctcggcctgcaggtcgttgagcagacgcagcacctgatcctgcaccagcacgtccaaggcggagacggcctcatcgcacacgatgacgtccggatccagagccatggctcgtgcgatggcgatgcgctgacgctggccgccggaaagctcgttcgggtaacgacccatcacggaagccggcatctcgaccatgtccagcagttccttgacacgattggcacgcgacttcttatcgccaatcttgtggattcgcagcggctcctcaatggaacggaagatggagtacatcgggtcgagcgaaccgtacgggttctggaacaccggctgcacatggcggcggaaaccgagcagatccttggccttgaacgtggaggtgtcgcgtccttcgtagaacactttgccggaagtgggcttcagcaggtgaagcaccatgttcgccacggtggacttgccggaaccggattcgcccacgatggccagggtggtgccgcgcttgacggagaaggacacgtcgtcgacggccttgaacatctccttcttgcggggcagcttgaattccttggtcaggtggtcgacggtgatgatgtgctcgcttttctcaagcgtgctttcgccggcgatgtggtggtcaagcagggcgtccgcgttctcaccgcgctccttggcggagatgatgcgctgggaggccagcgacggggcggcggccacgagtcgcttggtgtacgggtgctgcgggtgctgcagcacctcgagggacggaccggattcgacgacctgacccttgtacatcacgacaatgtgctgggcgcgctcggcggcaagacccagatcgtgggtgatgaacagcacggcggtgcccaacgagtcggtgagcatgtgcagatggtcgaggatcttcttctgcacggtcacgtcgagggcggaggtcggctcgtcggcgatcagtaggtcgggtctgcaggccagaccgatggcgatgagcgcacgctggcgcataccaccggagaactcgtgcgggaactgacgggcacgggtagcggcgtcgggcagaccggcctcggacagcagacccgcgatgcggtcatccattgtggagccgatgacgtacttcttggcgaggtaccaggcctgatcatcggccacaccggccttgatgaggtcgtcggccacgcgccaacgggtttcggagcccggaacccattcgttggtgaagcgggcgacggccttgtcgaaggcctcgccggacacgccggcttcggtcagggccttcttggcctcggtcatgagctcgggcagttccttggtgccgaggaaggtctcgtcgtcgttgcccttgacttcgacctcgtcgccggccagggccttggcgagggcggagcgcttctcgtgggccacgtccatgttgttggccttcagcgcctccttgacctgggatccgatacgccacaccgggttgaggttgctcatcgggtcctgaggcacgagacccatcttggtgccgcgcagcttgtcgaactcgctctgcttggcgccggcgatttcctcgccgtcgagcttgatggagccgttgaccacgtgaccggtgccgggcagcagacccagcacagccatggcggaggtggatttgccggatccggattcacccacgatggccacccactggccgggatagacggtgaagttggcgtctcgcaccgcatgcaccggcttgccggtgtcggtggtgaagtcgatggccagatccttgacctcgagcagcggaccatgttctttctgcatggccagcatcttggcgttggtattgtcagtcataatgtttctccactcccctcgctcaggccgtacggctcttcggatcgagggcgtccttgacggcgtcgcccatcatgatgaacgcaagcacggtgatggccagtgcggcggacgggtagaacagcaccatcggatcggtctgcaggttggtctgcgcgctggagatgtcgccgccccagctcaccgtggtggtaggcaggcccacgccgaggaagctcagcgtggcttcggccacgatgtaggaggccagcgaggtggtggcgatgacgatgatcggggccagggagttcggcaggatgtggcggaacaggtttctggcaggcgtggagccgagggccgtggaagcggtgttgaattcgaggttcttcgattccagcacggcgcttcgggcgatgcggcatacgccgacccagccgaagagcgtcagcaccagcacgatcttccagatggacttggaggtcttgaacatctggagcaccacgatggcgccgagcagcatgggcagcgcgaagaagatgtcggtgatgcggctcagcaccgcgtcgacccagccgccgaagaagccggcgacggcgccgatcagggtgccgacgatcacgaccagtagcgtggagagcacgccgacggacagtgaggtacgggtgccgtagaccacgcgggtgtacacgtcgcagccctgcaggtcgtagccgaaggggtgtccggcggaggcggggctcaaggagttgcccagatcgcaggcgttcggattctgcttggtgaacagaccgggggcgatggccaccacgatgatgaacaggatcagcaagccggagatgatgaacagcgggttgcggcgcagggttcgccatgcgtcggcccacatgctggtggccggtgcggattcgtcgacggaatcgacgtcctgcaacggggtctcgtcgagaggagctacgtaacggtcctgaccgggcagggtttccatgaagtattcggttcctggctcgccggtctggttgagctcgttttcagtggtttcgtttgccatgtgactcactcctccctatcacgcgtaacggatacgcggatcgagggccgcgtacagcatgtcgacaacgaggttgcacactacgaaaatcagcatgagcaacgtgacgatggacaccaccaggtttgcctcgcccttcagaatggactggtaggtgaggaagccgatgccgtggatgttgaagatctgctcggtgatcatggcaccacccatcagggcgccgatgtcctggccgaggtaagtgacgactggaatcagggagttacgtaacacgtggcgcagcatgacctgaccgttcgacatacctttggcacgtgcggtgcgcacgtaatcctcggcgatgttggaggagatttcggagcgggtcagtcggatgatataggccatcgacaccgaaccgagcaccatggccggcatgagcagatcaaggaagccggggtcggcgcctgccgtcaccggcaatatcgcccactgaataccaaagacatattgcatgacgaagccggtgacgaaggtcggcacggaaataagcagcagagagacgatcaggataacggtgtcgtaccacttgcccttcttgaggcccgagataatgccgaagaccacaccgaaaatcgcctcgaacacgaacgccatcaagccgagcctgatggtgaccgggaaggcgcgggtgatttcgtcgagaacgggctggccggcgaaggtatcgccgaagttcagggtcagtgcattcttcaggtagatgaagtactgaacgatgaacggctggtcgagatggtattctgcgcggatctgggctgcgacggcctcattgacaggcttgtctccgaacatggccttgacggggtcgcccggcagggcgaatacaagggcatataccagaagagtcgtaccgagaaccacgggaatcatctgcagaatgcgtcgcagaagatacttacccatacggttgctccttatttcctagaccggccagaaagggtatagtacgcccccgccggtcgataaatactccgacagtttaccgcatgcccggactgtgatatgtaaatttgcgttaacgcaaggtttgagattgggcaatgctggtggatatgtccatggttgcggtcggatagtggatactttaacttggttcccgatggcgtgagcaagcacccctcacacaacaaaaagggcggggatcttgcgatcctcgccctttatttccgaactacctaacggtatccgttcagtgagtcagactcacttcttggacatctcggtgtaggtcgggaggttctgccaatcgaaggcgtagccggacttcacgttgagggaagccacaccggaggcgttggagtagtacagcgggatggccggaaggtcgttgaggaggatttcctcagcctgctggtacagcttgttggcgtcatcggtgctggaaacggcagcggcctgcttgcacatgtcgtcgaaggccgggttcttgtagtcaccgtcgttggagccgttgccgtcagcagcagcggtggagtatagctgccacaggtagttctcggcggacgggtagtcaggctgccagccggtacggaaggcgcccttcatctgacggttggtgacggcgtcacggaactcctggaaggtcgggatcgggttggtggccgcgtcgatgcccaagttgttcttgagctggttcacgacggcgtcgtaaagcggcttggcaccaccatcggcgttgtaggagaaggtgagctggccgtcgtacttggagatggcgtcagccttggcccacagttccttggccttggaggcgttgaacttcaggttgtcggcacccttgagggagtcggagtagcccggggtcttcggggaggtgaactcggtggcggcggcggcgttgccgttgagcaccttgtcgatgagctggtcacggttgatggccatggagatggcctgacgacgcagctgaccttcctcgtcgttcttgaagtgatcaagggaggacgggatggtgaaggtctggatgacggagccgacctcggagtaagcctgaaccttcttgtcggtcttgaaggtcttggtgaaggcggccgggacggattccatcacgtcgaggttgccggcctgaatgtcacggtaagcggcggagtcgtcggtgtagaccttgaaggtcacgccgtcgttcttgggctgctcgttacccttgtagtcagggttcttgacgagggcgatttccttgttgtgatcccagtggtccagcttgtacgggccgttggagacaggcttctcgccgaaggccttcggatccttgtagaaggactcgggcagcggggcgaaggccgagtagccgaccttaatcgggaacacggagtcggactggctcaggtcgacggtgaaggtggtgtcgtccacgaccttgaggccggagagctgctcgtcacccttgaggccatccttctgcagatcgtcatagccggcgatggtggagaagaaggaggagcacttctgggcgttcttggcgttggccacgtaggaccaggccttggtgaaggactcagcggtcaccggagtgccgtcggtgaacttccagccagacttgatcttgatggtgtactgggtggcgtcatcgttcggggtgatggactcggccacttcgttggaagccttgccgtccttgtcgaaggagaccagacgggagaacagcaggtcgaccggcttgccgccgccggtttcgttggtgttgcccgggatcagcgggttctgcggttcggagttgtacgcagtgatgatgttggagccagcggtgttaccggaggcagcgttgctgttagagccgccgcaggcgctcagcagcatggccacggagcaagccatggcagcgaaagcaagagctttcttcttcatatgatttctcctattcattaggttgcaggacgtctcagccccgcctcatgcaaacggggctggattccccgtcaccgtgagacttgcatctcacgatgtctcgaacaatccaaccccgttgctgattacctgtcatttttgcgcacttgggagacaagcagtgtattttttgttacacccatgtaaaattcaggggttcttgccggctaggttcagtctttgctgagtttgttaaccaatgtccacatagtggtcacgcccgcggaaaggcctgtccgtaacggttcttgagctgctcgatggagacgtgcgtatagcgttgtgtagttttcaaggaggaatgcccgagcatctcctgcacctccctcaaatcggcaccgccgtccagtatgtgcgtggcggcggaatgacgcaacgcatgggggctgatgtccggcacgccggcctctcgggccgctctgtgcacgatgtcacgggctatgcgttggtcgatacggccgcctcgtgcgccgaggaacagggcgttggcagcacgggacttgactgcatccgttgccgtacgggccagtaccggccgcccctgttccagccaagtctccagcgcacgctgggcgggtagtccgaacggcaccacgcgttgcttgttgcctttgccggtgactttgatggtgcgagtggagaagtcgatgtcggcgatatccatcgacaccagttcggcgacacggatgccggtggcatacagcagttcgagaatcgcggcgttgcgctgcgattcggcggtgactcgggcgttgtcgcgcttgtctgcacgggcgggtgcctcactgcggtttacggtatcggccgacttatcagctgtcttgccgctgccggacgcggctgccgctcccccatcgtccttgtactggtttgttgcaacggcatgttcagcgacatccaataattgcttggcctgggattcggtgagcaccgcgggcagcgtgctgggaatcgagggagtcatcagtgtggcggccgggtcggtggtggtcagcccatgctcataggcccacgcgaagaacccgcgcacggccacggttttgcgggccatgctgctgcgggcgtgatcgcgcgattccaccgccatccagctgcgcagatcatccagcgtgatctcgttcagatcggtcacgccgcgcagctcgaacagatgcaggcatgccgtgagatccgcgcgatacgctttgagcgtattcgctgacaggccgcggttggacttcagataggagacgaaggagtcgatatcgccgtcgaactgcgtagatgacactctcgttctcctccgaattctttatggccttgggttacggccggggtggcgtgttacgccgctccggcacgggtttcaatgtggcaatctgttcctgatggatggtcacgttctgggccgggcgcgaaccattggcggcggcgtcacgcaccatctccaacgtgtatccatcccaggaaaccacatgccccacatagtcgcggaacttcatacggtggtcgaccgggtcaatgccgtcggtgatgcgcaccaccacgcgggcaccggccggaatctgccttggtaacgtcatacgtcatcatccccttaaccatccgccgcatcaacttctatgcgtttcccgaaaaacggtacagactaccttactcctttgggtctttcgaacagcggagccacacggtcttctcacgaaaacaagcgggaacttcatccccctcgcgcagccttcttcgtgacgggcggcgaggggaacctgcacacgggctgcatggcggggcgcagttacatggcggggcgcagttggacgatggcctgacgcggatggatgaaaccggtgatggcttctccccggcgtgcggagaacagcaaggtctgctgccagccggcttcggggacggcgagctcgcgttccgggaatccggcggcagttgtgccggcttgctgcgcggtggccgtaccagcttgtgcagcggtgatgccggctcgcgtcacggcggccttgtaccggcggaaggggtcgccttcggcgaagaatcccatcacatcctgctcgccgtcggcaccagcgtgcagttggtcggccatatcggtcagacgtgccgccatgcggcgcagcagcacttcgacgttcagcgagtcttcctcgaccatcgcgcgcgtgcggtccgggtcggtcagggacacgcgggtcatgtccctccagcagccggcagccagcgcggcggcgatgttgcggtccgggttggcaaccagttcgttgatcagcgcggtggacaccacatgcggcatgtgggagatcatcgccgcggccttgtcatgcgtttcgtcgtccacgacgatgacgcggttgccgacgtccttggtgatcatcgtggcgacgtcgaggaagcggcggtagtccgtggactcgtccacggtgatggcccatagggcaccgtcgtacagatgcgggtcggcggcctgccagccggacagttcgttgccggccatcggatgggcgccgacgtagcacttccccagcgcggcagccttgacctgatcgcggaccatgcccttgactgagcccacgtcggtgagcgtggtgttcggatggtcgcccataagcggggctagggcggcgaggattgagggcatcgccttgagcggattgcacagcacgaccacatccggctcggcatccatgagttcggagagcgtgctcttgcagaaaatgccatcggcttcggcctgggcgtaggggtgcgagcgatggttccacgcgatgacgcgtacgccgcgctcggtcaggcggcgtgcgagcgagccgccaatcaatccgagtccgacgattccgactgtgtctaccacagcagttccttccttgctccctcggcgtactgccagccttccgacgcgcgattggtgatgtggacgccgccctcgggcagcatccaggcgtcgaccggcgggttcgggcgttcgcggcgtgggtagacggccagggtttttgcccagtcgccgtgtccggcgatctcttccagtgcggtgcggaatcttggctcccagggggcggcgtcaagggtggcgatgaagctgtaggttccgtcgtggcctttgatcgggcgcgagatgaagctggtcatgttcagccccgcatcacgcaggacgtccagcaggtcggcgagcacgccggggccggtgaccagcgggatgaaggtgatgatggtttcgaagtcgccggcgtcattgcggtgggcgcgggcgttgaattcctggaccacatcacgcggggcgatgacaaggaattcggtgtgcgcgccatcgaaatcctgcacatgttcggcgagggtgtcgagatcgtagagttcgccgcagatgctggggccgagcgccacgcggccgggcttcaggtcgcggcaggcggcggcgttggaggatgcgggttcgggctgcaaatggtgttcggcgatgaaccgggtgcattgggccaggccgtgcgggtgggcgctgacggggttgccggtgcagtcgcagatgctgtggccgcgcacggtgaaggcgttgaaggccacgtccacactgatccgggcgaagccggccgcgtcgggggcgtcgatcagcgcgtcgagattcgggaccacatagccttcgacgttgttttcccatgcgatgacgccccagccttggcgcgactgtacggcctgcatgatcgcgggcacgtcgggcagggcggtgaggtcgaagtcgccgagtgtggcgaactggtcggcggccgtcattgccgcctgatgggtgaaggtgccttccgggcccaagtaaaacagtttcatgcgtgccataaggttctatggtagcggccgtaatcccctacgcccgccgatacgcgacgcattcgcggaaatgtgccgccatatatagttacgcgcgcgattcagaatgagtgggaataacgaaccagcgggcgggaagaatgagcaggacgacttggaccagcatcaggccgtacagccagatgtagccggcatgctgggagaagaacggcatgtcgccttggaatccggcgacgatgaccgccttgccggatgtggtggtcagtgccatgccccatgcggtcagcgaggaggcgatgaggtgcagggccagtccgaccgcacccatgcgcgaacgggcgcaccatgtcgataggccgatcagcagaaatgccagcaccagaccatacggaatactcagttctgcacccatacggtgggcgaacgtgcccacaaaggcggacgccacgcccgccgcaatcgtgatcaacgatttgaccagcgcgttctggcgatacgaccacggacgcaattcagcagtgctcttcacagtcatgcgtttcagtataggtggggatatgacttggctcccctcgtcgaggggagccaaagggaagatcacttgccctgctgggcggcgttctggcggcgctgcttggcgcgccacttgtaccagtcctcacggccgaggatgatcttgcgcacgcggatggactccggggtgacttccacgcactcgtcctcgttggcgaagtccagggactcctcaaggctcatcttgatcggcggggtcagggtttcgagcacgtcagcggtggaggaacgcatgttggtcatgtgcttggccagcgtgatgttcacatccagctcgtcgggcttgttgttcacgcccacgacctgaccctcgtacaccggggactgcggttcgacgaagaagttgccacgggcctgcagacgctgcatggcatacggagtggccacaccctgacgatcggaaaccatggaaccgttctgacgaatggtgatggcaccagcccacggagcatagccagcggagatggaggaggaaatgccggtgccgcgagtggcggacagcagagccgtgcggaagccgatcagaccacgggacggcacggtgaactgcaggcggacccaaccggagccgtggttggtcatgccgtccatacggcccttacggtcggccatgagctgggtgacggtacccatgtactcttccggcacgtcgatggtggtgttttccatcggctcgttgaccacaccgtcgatcttcttggtgaccacctgcgggcggccgacggtcagctcgtagccttcgcggcgcatctgctcggcgagcacggccagcgccagctcgccacggccctggacttcccaagcgtcggggcggtcggtgggcagcaccttgatggacacgttgccgatgagctcgcggtccagacggtccttgatcatgcgggcggtgagcttgtggtccttgccctcggtgccggccagcggggagtcgttggtgccgaaggtcatggagatggccggatcgtccacgtggatgagcggcagcggcttcgggtcgttggggtcgacgatggtctcgccgatcatgatgtcgttgacgccggcgacggccacgatgtcgccggggcccgcggactcgaccggggtgcgctcgaggccctgcgtgcgcagcagttcggagacgcggaagttctcgagggagccgtccacacgggacaggccgtaggtcttgcccttctcaagggtgccgttgtagatacggaccagaccgagtcggccgaggaagtcggaggagtcgatgttggccacgtgagcctgcagcggggcgccttcctcgtattcgggggccgggatggtggagatgatggcctcgaacagcggctcgaggttgtcgttgtccggcaggccaccgtcggcgggctggttcacggaggcgtagccggccttggcggcgcagtagatgaccggcatctccagcagctggtcaaggttcaggtcgatgccctcgtgctgcacgtcgtcggccaggccgagcagcaggtcggaggtttcgccgacgacctcttcgatacgggcgtcggggcggtcgaccttgttcacgcacaggatgaccggcagcttggcttcgagggccttgcgcagcacgaagcgggtctgcggcagcgggccttcggaggcgtccacgagcagcacgacgccgtcgaccatggagatgccgcgctcgacctcgccgccgaagtcggcgtggccgggggtgtcgatgatgttgagggtgatgccctccgggtggccgtacttggcggccagcggaccggtgtattccacggccgtgttcttggcgaggatggtgatgcccttctcgcgttccagatcgttggaatccatcacacgatccggcacttcctcacgctcggaaaacacgtgcgactgctgaagcatggcattgaccagggtggtcttgccgtgatcgacgtgagccacaatcgccacattacggatatctccacgaaccgccatcgaaacctctcttaatactgattttcttgcgtaatcgttcggtacttgcgttctcgagtacttgctcttggatatcaacctgtacctacacacaaaccgtcacgatgttactggcacaccttgacacacaacgggcccggctttctgagaattagtcacatgtcatctggcttgcgagactttttgtattccacactctcgactcccctccctgaggggagctgtcgccgtgggcaactgaggggcgccaagtgtatcccctgaatctcccctgaatcatccctgagtacagcaccgtcatgggtagttactgagtaacctgatatccaacgatagttactcagtaaccttcgcccaaggcaaaccgtctatgcaaaggggatgcggtatggcaatcagagaagcgctattagcactgttggagcgaggcccggccagcgcctatcagcttaagaaggacttcgaccgcaccatcggtctgacttggccgctcaatatggggcaagtttccactacactgcagcggttgaaccgcgacggactgattgaagagaccgcgccgactactagcggatccaatgatgtcggcaccgcagcggccgcaccattatggcgattgaccaattccggcgcccaagagcttgaccgatggtggcgctcccctattaccccggaacaacgcggacgcgacgaactggtgatgaagctggccgtcgccgtggaaatacccggcctcgatgtttccgaactcatccaacaccaacgccacgctttgcagcaactgctgcacgacatcacccgactgcgccggcaaacaccgcccaccgaactcgccacacgtctagtactcgaccaccatattttcatcactgaagcggaattgcgctggctcgataccgtggatgagacccagctgcgagcacaactggcgcagcaccccgtttcggcacctctcacggcaagctcagccgcactcaccgccaccattcaatagtgcataggagcacatcatgacttctcccgttctttcttctctcccgcaatcctccccatgcgcgctggaattacacgacgtcactcgcgttcacggcaaagatgcacgtcgtgtcaccgcgctcagtcacgccaatctcacgcttcgcccgggtgaattcgtggccatcatgggccccagtggttccggcaaatccactttgctcaatcttgcgggcgggctcgatgtgcccacgcaggggcacgtgctggtcgaaggccgcgatctggccacactgtcagtggccgaacgcgcggccatccgccgcaaatcgataggctacgtgtttcaggatttcaatctgctgccttccctgagcgcagccgagaacgtgtcgttccccttggaattggatggctggaatccccgcaaggcacgtgaggccgcgatgcaatccctcaatgaagtgggggtagccgatatggctgatcgccgacctgaagacatgtccggcggccaggcgcaacgtgtggcgattgcccgcgcactggtcggcccacgccgtctactactggccgacgagccgaccggagctctggattccaatgccggcatgacgattctcgaagtgttgcgcacccgcgcagatcgcggcgcggccgtactgctggtcactcatgagcctcgcttcgccgcctgggccgaccgcacggtgtttttgaaggacggccgtatcatcgatgaaaccggctccagcaatatggatgatttgctcaaccttgaggaaaggggagcatgatggcacgcgcagccctcaataatcttgccaatgccaccgtcggtcgctctgcccaaattccccatgccgctaggccaagccttggcgcacgttgcaaccggtatcgggccgcgctgcgactcggctggcgcgacgcactacggcacaaggcccgcaccctactgtccttgctgctggtaatgctgccaatcgccgcaatggtggcctccatcggtatgaccaccaccataccgcccaccagatcgcgtgcgctggcgacaatcccggctgatacgcaggcggtcatcaccgccaccgccaggccccgcaccggccaaccgttccggcagtcacccgaaagcggcggcacgtggcaggacgatccctcccagcagccggcctcggccgccgagcttgcgaagattctgccgcaacaggatcggctgctcccgtattggcagtcgcccgaactcatcgccatcaccggcaccgcgttgcaacccggcgaacagaccaaggctgggatcgacgtgaaaagcgggaacgacattgatctgaacgcggcctccaccgcgaccatgaccgaggcttcacctgaggcattgcaacgaatgttgccgaagctggtcaagggttcggcgccgcagaataatacgcagattgtcatcagccgcacattggcggataatctcggcgcttctctcggtagcacggtgacgttcgtcgctccgccgttcgatggctggatgagcctggacgggcgcatcggcgaggcggtggccgacactcagcgtgcttggacagtcagcgggctgaccgatgaatccgaagccgcggcatggggcttggaaggctggatgtcagccatattggaatctgatggcgtcggtgtggatggccattatttggtggtcggtccagagccggtcacgtgggcgcacacccgcagcatgaacctgttgcaggccatcgtcatttcccgccatgtactgactgacggctatccgcccgcatcgcagctctacccgatgcagatcgatgcggctaccatgttgaaccacatggtcactgtggtcatcaccatgctggtgggtatgttgctggtactgtttctggtcacgcccgcgtttacggtgtcggcagatcagtcacgtcgtgtgcttgggctcgcggccgcatccggtgctgcaccacgtgacctcagtcgaatcatttcctcgcaaggtctcgttatcggcgccatcggtggcgtgctgggctcggcattgggattcgcgcttaccttggcggccggccctgcgataggcgcattgcgtggatccacgccgctggagatcctgcacggattctcgtggggctcgctgccgatgggtattgccacggcaatcatcattggatttgccgcgacgattgcgccggctcggcatgtggcgcgtatgcatccagtcgatgcgttgaaggattgcccgacaagagaggaaatcggctacggtgaatccgcgaatggcgtggatacgaagcttcgccgtaatcctttgagactgctccgtgttgcggttggtccgattctggtcttggtctccatcgtatgcgccgcgctcagtctgacattgccattgcccacgctggccgatcacaatccgggcgcggttccggccggaaccgaaacgcatatggctctgcttgttgccacgattttgttggctgtcatagggcttgcgttgtcgattcgcacttttgcacggtggtgcggcaaagcgggttcccaactgaacatcggcgcacgcctggcactcagggatgcagccgagcatcatcgacggttcgttccggcggcatgcgcggtgctgattaccatgtgcatcgcctcgtacacactggtaatcaccggctccatggtggcggaccagcgaaattccacgatgacgatgacgtatggaccgtcggggatggccattggggccgacgtgcatgtcagcaatgagttcgaccgtgctgtggtgtcggatgcgatacaccggcttggcaaagagacgccgatacgcgctcattacccggtgtacaccgaggatgtcaagcgatggtcaaagctcaatgatacgaccgaagtcgattccgacaagttgaacgccgaacacggctacatgtatgccgctgcattgctcccggccggtcacacttgtgataacccaacgatccaagagcaaccggacacgtccacatgggtgggccaggatgccgcttcggccctgtacccaaacgttccgatacgttgtgtgccgatagaccgatcccatcagccaacgtattcgaatatactgccgagtttccgcggcgtgaatctcattatggatggcaatgcgatgcgtttgtccggcttcccgaacgcggatgaggcggcacaggtgcttgatgcgggcggtgtggtggtcggcgatgccggcacaatcgacgcgggaggtatggtgcgtgtggccatttcgccgaatccggcaattgcaaacgaatctcaggccacacatatcgagaagcgcaaggccatctacgtgcgcggcgcgtacccgctggtgatgagcccggcaacagcacaggcgctcggcatcaaacaattgcagtatctgggtgagtatctagacttcgccggtggcaactcccccgttaccgtaaagaaggcctcagcttatgcaatcgaaaatctgccgctggcatccacgagcactgacgggaatcgcctgccgtggggtgacaatatggcattggtgcccattggcctgttggcattgctggcactgatggccacgctcgtttcactgctgctggcccgcacgcaggcccagcgcgacatggccacgatggtcgccgtgggcgcgccaccccgattcctcagacgttacggcctgacgcaggctgcggtgattctgctggccggcgcgccagtgggcgtggtatccggcgtggcgttgggatggctgcatgtggcatggaaccgcaggatcggtgtggacggtcattggctggaaaccgtgccgatctggggattgcaggcggcgctggcattcggcgtagtggtaaccggactgctggtggcgtggctggtcacaaaaccaccgcgcaatctcacccgtcgttccctcgattgatcagtgacatacggcaacccttgccgtgtcattcgggagctataagacaaaaagtggcccacacattggtgtgggccactttagtagcgaaggctgaagtgtaatcagtcttcgagattgaggcctttgcgctcgggcaagcagagggctgctatgcaggcgaggatgaaggcggcggcgaagatgatgaaggccacggccttgttgccgccggacagggtcaggaaccacggcatgaggagcggcgcgatgatggcggcgatgcggcccaccgcggcggcggcaccggcggccacgccacgcaggcgggtcgggtagatttccggggtcacggcgtacaacacgccccacgcaccgaggttggaggcggacagcagcatgccgaacacgagcacgagggccgctgatccggcctgcgagaacgcgaaggcggccacggcggagacggccaggaagatgctcagcgtcttgcggcggccccagacctccaccagccaggcggccaggaagtaaccgggcagctgggcgatggagatggcgagcgtgtagccgaatgacttggtcagggagccgaactggtcggcgagcagcgacggcatccatgtgaacgcgccgtagtaggagaagttcacgaagaaccacgtggcccagatggcgatggtgcgggccaggtacttggagccgaacagctcgcgcgtcttgatcttcggcagcggcttgcccttgggagaggttaccggggccactcccccggcttcctcgaagtagcgcacggccttttcggcttcgtcttcgcgacccttggcttcgaggaatcgcacggattctgggatgtgcacacgggtgacgatcgcgtagagcagtggcagcgcgccgatggccagcgcccagcgccagccccagtcaccggtgttcgggatcacgaagtagccgattatggcggcgatgatccagccgacggcccagaacgattccagcagcacggtcatgcggccgcgctgtttggtcggcgaaaactcggagaccagcgtggaggcgaccggtagttccgcgcccaagcccagtccgatgatcagtcgggcgccgagcagcatgccgagcgaccaggacagcgccatggcgccgttggcgatgccgaagatgatcagcgtggcggtgaacacggttttgcggcccacgcggtcggcgatgaagccgcccaccgccgcgccgatggccatgccgacgaagccgatggacagcacccacgacttttcggtcggggtgaggttgaagtgcgggtcggctgcgatggcggcgaccacgaaggaaacgaggccgacgtccatggcgtcgaatgcccagccgatgccggaggcgacgaggagtttacggtgcgccttgttgaagggcagccggtcgaggcgctcgttgcgggtgagctgcgcgggttgcgctggagtggtggtgctcacggcgtttcctttctggtaagtggcgtcagatttagtgtcgggtcaggtcggtgtaggactcttcgatggccaagctgatgcgttcgacttgttcgcgggtcagcggcttgcggaaggtcatgcgtaatgccgatttggcgatggacggttcgaggcccatcgccagcaacgtggcaggaatctcgtggcgcccgatggcgcaggccgagccggatgaggcagcgatgccacgcgcgtccaggtcgacgagcagcgcttccccggtgacgccggggaagatgaaggaggcgtgaccgggcagacggcgttcggggtcgccggtcaggtcggcgcgaggcgcgacccggcgaaccgcgtcgatgagcgtgtctcgggacgcgaccaactcacggcactgcacctgcatgcgcgcattcgattcgttgagtccgatggcaagcgccacggcgccggccacgttctgtgtgccggagcgcaggccgcgttcctgccctccgccggacagcaccggttcgatgggtgtgcggccgcgtaccagcagtgcgcccagtcctttgggcgtgccgaatttgtgtccggatacggacagggcgtccacatcccagtcacgaaaacgaatcggaatctggccggcggcctgtacggcgtccacatggatgggcacgccgtgcgcgtgggcgatgcggaccagttcctccacgggttccacggtgccgacctcgttgttggccagcatggtggagaccagcgtggtacgttcgccggcctcgccgtcaagctcgcgttcgagcgcgtcaagatcgagatgcgcctgcgcatccacgggaatgcgcacgacttcgaagccgaaccattcgtgcagccatgccgccgattgggccacggccgggtgctcgatagcggaaatgataatgcgcgggcggctgcttgccagttgtttgccatcggtttcgtcgagtccgtagaccggccgcaggcccagtttgcgcatgcgcgccatggcgatgcctttgatggccagattgtccgattcggtgccgcctgaggtgaagatcacgtcatccggccgggcgcccaacgccgcggcgaatgatgcgcgggccgcgtccagcgcgcgggccgcggttttaccgggctggtgcacactggccggattggcgtaggcctcagtcaggaacggggtcatggcctcgatgactgccgggctcactggttcggtggcggcggcgtccaggtacagttcaccgggttcaccggatgcgttgggggtatcggccatgactagttccaatccaatccaaggtcgatgctgcgcaccgagtgggtgagcgcgcccacggagatcacgtccacgccggtggcggccacggctggcactcgctccaggctcatgttgccgctggcttccacgatggccttgccgtcgatgagctccacgccgcgacgggtgtcgtcgagcgagaaattgtccagcatgatggtgtccgctccgccggcgagcacggcgggaatctggtcaaggcggtcgacttccacttcgatatgcgtggtgtggcccacctgttcgcgcacgtggcggatcgcgccggccaggtcgatgccgcgcgcggcgagcgccgccagatggttgtccttcatcatgaccgcgtcggacagtccgtagcgatggttgtggccaccgccacagaccacgccatatttctcgaacgggcgcaggccgggcgtggttttgcgcgtatcgacgatgcgggtgcgctcgtagcggcgtggccgggtgacgggtccgtcatagtcgtcgccgtagatggcgttcaccgcgtccacgaaggcggcggtcatggtggcgatgccgctcatgcgctgggtgaagttgagggcgatgcgctcggcggtgagcaggtcgcgtaccgggccttccacggtggcgagtatctggccgcgctggaatcgctcaccgtccttgacggtgacggtgacggtgacggccgggttctgtgcggcgaaggctgcggcgaacacgtcgatgccgctcatcacaccgttttcgcgcgcggtgaggtgggccgagccggtttcgtccgcggggatggtggtctcgcaggtgatgtcgccgtagggcgcgtcttcggcgagcgccgcttcgacggcggtgcggatgatgtgtgatgtgagcatgggtcagtccttgatgtaggcgacggagtgggcccagttgtcgactggctcgctgtagtcggtgcgggcgtgggcgcctctcgactcggtgcgggcgagcgcggcggtggcggccacatagcctacggtgagcatgttgcggttctccaaagcctcaacgctgcttgcagcgccatcggcgtttatatcagcctgggcgtttgcggcggcgaggccttggccgagttcggcgatggcggttttcagtccggcctcgtcgcgcagtacgccgacgccatgccacatggtgttctggatgcgggtacggtcccagaccttgtcggcggcggtatcgtcagcagcagccgtagtggcaggagcggccagcgcgatcggcgcatggtcgaacacggcaccggtggcggagttcaggaacggttcgggtgcccagaccgcgtcgtcaccgtccgcgacggcggcaagaccggcgcggcgtccgtagacaagtccttcgagcagcgagttggaggcaaggcggttggagcccatgacaccggtacgagcgcattcgccggccgcgtacaggccggggatggaggtccgggcgtccagatcggtgcgaatgcctcccatgtagtagtgcgcggcgggcgccaccgggatcggctccttgctccagtcgaagccaagcgaacgcgtataggcatcgatggtcgggaatcggtgggccaggaagctggccaggtcggggttctcgcgggtcatcggcgagacgtcgagcatcacgggcttgccaccttgcgcctgcatcacgcggaagttctcgcgggccacgacgtcgcgcggtgcgagttcggcgcgcggatcgatgtccttcatataccggtggccgtgttcgtccagcagcaccgcgccttcgccgcgcacggcttcggagacgaggaagtgctcgcccacggccatggcggtgggatggaactggtagaactccagatcggcgacctgggctcccgcacgccatgcggcggcgagaccgtccgcggtggcgaccggcggattggtggtgtacgggtacatacgacccgcgccaccggtggccaagatcacccgaccggcggccagatccttgtcctgcccgtcgatcagcaggcggacgccggcgatgtggccgtcccgcacgatgagatctttgaggaatgcgttctcgatgatgtggatgcgcgggttcttgcacaccatggcggagacgtccagttcgagcactttgccggtggcgtctcccccggcatgcaccacgcgggcgcgcgaatgagccgcttccaggccgcgcagcatgtgtccctgcgcgtcgcggtcgaagtggacgccggccgcggcgaactcgcggacgcgctccgcaccctcacgggtgaggatgtccacggccttcgggtcgcacaggccgtggcccgcggccatggtgtcggcggcgtgcagcttcgggtcgtcgtcggagaagatggccgcagcgatgccgccctgcgcatgataggtgttcgattccaccagttcggccttggttaccaaggtcacgtcgtgtccggtgccggtcacggccagtgccgcggacagtccggcgacgcctgcgcccacgacgacgatttcagtgttgctcattgtgttgctttcctctgtttttgcgtcatctgccccccctcagtcacctacggtgacagctcccctcagggaggggagctagaagcatgtcacgggtgaacgcgcagcatgcgctccagtgccaccttggcttcgcgggcggtgtcttcgtccacggtgatgcgattgaccacgttgccggcttcaaggttctccaaagcccaagccaggtaagccgggtggatgcggtacatcgtggagcaggggcagaccacagggtccaggcagaacacggtcttgtccgggtactgcgcggccagacggttcaccaggttgatttcggtgcccacggcgatggcggatccagcgggtgcgttggcgatctccttgacgatgtacgcggtggagccagtgccgtcggcggcgtcgaccacctgcatcgagcactcggggtgcacgatcaccttgacgcccgggtatgccttgcgggcgcgttcgacctgttcgacggtgaagcgctggtgcacggagcagaagcccttccacagaatcatcttggcgcgggcgtagtcggccggatcggcggcgccgccctgtgccttgaacggatcccacagcggcatctcgttcagcggaatgcccatcgcgcgggcggtattgcggcccagatgctggtccgggaagaacagcacgcgcttgccgcgggcgaacgcccattccagcacggcgtgcgcattggacgaggtgcatacgatgccgccgttgcgtccgcagaacgccttcagcgcggcggatgagttcatgtaggtgaccgggatgatctgctgcaagccatcggcgtcgggctgggtgccgcagatctcgccgagctggtcccagcattcctggacctggtcgatgttggccatatcggccatcgagcagccggcggacaggttgggcagggtcacgctctgttcgggcgtggagaggatgtcggcggtttcggccatgaagtgcacgccgcagaacacgatgtggtcggcgtccgggcgttcggtggcgttcttggccagctggaaggagtcgcccacgaaatcggcgtgcttgatgatctcgtcacgctggtagaagtggcccagaatcaacagtttggagccgagacgctgcttggcgtcggtgatgcgctgctgcagctcctcgtcggaggccttgcggtattcgtccggcagcacctgctggcgcggcgcgttggcgggcagacggtcgagcatcgaggcacctggaccgtagctgggtgtggtggtgtcgaagtgccatgggtcctgggtcagtcctgcatcgcaggtgctttgcgcgcccagcttggcgatgatctcgtcaacggacggcgcagtggatagtgcggtcatagcggttcctttcctatatacgtctgtgatgccggcccgaagcgggtcggcgggaaaaatcagatgcgcgcggatggaatcagcgcgtcgagagcgtcttcacgctcgccttgtctggacagttccacgatgtcgtcgccatcggattcgtggggcgtaccgttctcgacaagtcgtttggggatgtagcggtagacggtggccggtcgttggcggccttcgcgcaccttctccccggtgtcttcaagatctcccgaggcaagcattttgcggcggaagttcgccaagtcgagggtttcgccgccaatcgcctcatagacgccgtgcagttggcgcagggtgaacgtggggccgagcagtcgggtggccacgtcggagtattcgattttggagcgcaggcggagcagcgcgtagtcgatgatctggcgatggtcgaacgccagctcgggcagttcgtcttcggggaaccatcgtacgttgtcaccatcctcgaagcccgcggcctcggtctggccgacgagcgcccagtacacgacggataccatgggcaatccgccatgggaccgggtcgggcctccaaaggtgtacagctgttcgaggtatcgcgggtgcaggtctgtggtcgattcgagggccgcgtaggcggactgttccaacgaccgatcggagcgcaggtcgccgccgggcaatgcccagcagcccaggaacggctgacggacgcgcttgaccaggggcagccagagacgggaatgggccgagttcgcggcgttgccggaatcggcggcactgttgccggtatcgcctttcgggccgagtgccagaatcaccactgacacgccgacctgtggcggtgcgctgcggcgctcggacacattgccgaatcccatgccatgcctctttccataccggttgttctccccgcattgagagcatagcactacttatagtcacaatgaccataaatcacatattggatggtctagcgcacgaatattggtcaggtagcgggccccaatcgctacgaaatcacgtccgtgtcttccgatttcgactgtgtcatttcggcgacgggcgggaggaacggcgctagggagggtagttcgtcgagactcttcaggcccatttggtcgaggaaggattcggaggtgaccaaaagggccgcgcgggattcggggtccacgccgtcttccttgataaggccgcgtaccgtgagcgagcgaatcacgccatcggagttgacaccgcggatcgcggccacttgggctcgggtgacgggctggcgataggccacgatggcaagcgcctccagtgcggcctgactgagtctcgcagtctggccgtcggtgacgaatgatgagacgaccggctcgaacgcggcgcgactggcgaactgccagccacgagcggtgcggcgtagttcgaagccgcgcgggcggatgccacgggattcatcgccctcatagtcatcgtgcagggcttgcaatgcctcttcgactgtgttgcggtccaatgccaaaatgcgggccagctcggtggcggtctgcggctggtcggcgaccatcagaatcgcttccagacatgcgggcagcccgccgggaaaatcgtctaccgtgaaatccacgtattcggggcgcgtctcctccactcccctcacctcggcttttgcggattcagccgtcgattcggcatccgccatgtgctcggttgcattcgttgcgtcaatccgttcagtcaccagtcgccgtccttacgcaaaatcgccttcggaaatgttcacgtcgttcatcgtttcgtctacgccggatacccacctcaggtgcagttcggcaaacggaccatcttgctgatactgcagcacaccttgtttgaagaacacgagcacggccatgaaccgagccaccacctcaatacgagaagtgcagtcccgggtcaattcgctgaacgacatcgactggtcgcccttggattccagtgctgcaatcagccggtcgcgcaccaccagcgattgggcccgcagatcgaccagcggcacgtgcagctggtggatcgatacttcggaggcgggcgcgttggcgatgacctgggcggccagttgggcgagttcgagcggggtcagcgtccataccagctcaggcaacatggcggcaatgccctcgtccatggccgccggatgcgggaatcggccggcattggcggcgatacgcgcccggaaatcaccggcggcctgcttgtaggcgcggtattggaggagtcgggcgaacagcaaatcgcgttcgcgcagcgcctcgagactttgctcgtcgtactggttgtcttcgccgccgggcagaatcgccacgcttttggcctcgaccaaaatagaggcgatgtcgagaaaggcgctggcctcatccatgtttttcgtgaagtcgagcccgcgcacgtatgtcaggaattcctcggtgatcgaggagagggaaacttcggtcagctcgagtttgttgttggcgatcatgccgagcaaggcatcgaacggaccggaatagacctcgaggttgacccggaagccggaagtggcggattcctccgtgctgatttcggcttccgcggagctcccctcagtctcgctacgcgagccagcttccctcagagaggggagccgagaaagggaagtctcattcatcgtttatcgaaacaatcgttacgccacgatgccgcgagcaatgagctcacgtgccacctcacggtattcctttgatgtcttgtgctcaggtgcatagaccaccacgggcgcggcggcaaccgtggaatcgggcagtttgatggagcgggagatgaacgtgtggaacaccttttcgctgaacgcctcgtaaatgcgctggcagacctcttcgcagtgcagtgtcttggtgtacatggtgatgagcacgccatccacttccaatgcgggattgatgcgggactgcactttttcgatggactgcataagtagggccacgccacgcaaggcgaagaattcggcggccacgggaatgatcacgccatcagctgcggcaagcgcgttcacggtgagcaggccgagcgatggctggcagtcgacgatgatgagatcgtattccgacttgagcttgcgcagcacactgttcaggatctgctcccggcccacttctgtgaccagttggacctcggcggcggacaaatcgatgttcgccggaatcacatcgatgttctcgaatgcggtgtgctgcaccacatcatgtgggtccacggaaatatcgaacagcgcggtgtaaatcgtgttctccacggtattcgcgttgacgcccagtcccacagtggcggcgccctgcggatcgaaatcgacgataagcacgcggcggccatactgggccaacgcaccggcgatattgatggagctggtggtcttacctacgccgcccttctggttgcacatggcaatgacacgcgccggaccgtgctgttgcagcggttcgggtgcggggaaggtttcgtattcacgtccaagcaaatcggtaggcatactgtctaccttatcaacatccgggttcgctgggggtgcaacgacatacgttcccgccataggcagcgttccttgacggaatgcgctgtctttatcgcggatgtctcgccagtcgtccatcgttgccctcgccccctttgccgggaatacctgctcgcctatcctaatgtactcgccgggctcgcctcggaacaccgttttgcagcgggcattccagtgttccgaggtttatggatctcgtctcgtactatgtcgatgcgcttactcggtgcgcagtgcggtggccgggtcttgcttggctgccttgcgcgagggaatcaggccgccgatcagcgtgagcaccacgcttaggatcaccagcaccacgccgccggtcaccggcagggcggcattgacgtccgcattgccgatgaagtgatgcaacacggcgttgatcggaatatcgagcagcacggtcaagcccacgcccaacaggccggagcataggccgatgatgccggtctccgcattgaacacctgggacacgttgtgcttcgaggcacccattgcgcgtaggatgccgatttccttggtacgctccagcaccgaaatgtaggtgatgatgccgatcatgatcgaggaaacaatcaacgagacggacacgaacgcgataagcacgtaggaaatcacgttgacgatggtggtcaccgagctcatcatgagccccacataatccgtgtaggtgatcttgtctttcttcgagacggtgttgttgtagtcggtaatcgcgtcggcgatgtggtccttgtcttcgaagctgtcggcgtagacgttgatcgagctgggcgcgtcacgactcaccacaccgaatgcggcgaggttgtcgtcgtaggtgccggtcgacacgtactggtcgtagatcgcgacaagcacgtcgttcgaagccgtggcgatatacgagtcgaaactgtcggcgagctgctgttcgctcatcgcggccatcgcgtcggcctgatcgccggcacccgccgcgccagcaccagcaccagcaccagcggcatccgatgcgcccgtaccggaccgctgcccggcactcatcatcgacttggccatgttcgccttctgcgtcacgcccagcgaaaccacgtaggtgcgcgcgtcggccgccttggtggcgtcgtccgagggcgagaacgtcatgccgttgagcacgttcgtgttcgggttggccttctgatcggtgacgatggcgctggaggccgcacggtcgatcagatcattggtcagagcgcgcgtgtatcccacgccagcggccaacggtgtggccgaagcatccttcttcgccttgacgacgcccaccaccttgagtttggtggccgtttcgaggcgctgttcgattacatccttgtcgttgccgatgaatcggtagtggccgtcatcgcccttgacgtactggtcggatgccggaatcatgtacagcgtctggtcgagcgccttagcatagtcgatcttgtcttgtggagtgctgaccttgtcgccggcgttgagcttggacatcatctcgtggtagtcggaggcgggcagcaggccgagctcgtacagcgtggtcagcggcacgctgttgttgtcgtcgagcaccagcaccacctcgtccttggacttcggccatgaaccgttgaccacttggtagttgtcggtgatgaccttgcctacgagcttgctgtcgtccgctccaggcatgatctcattgaacgagtcgggcgcggcgttctcatcggttttgccggtcagcatcgacatctgctgcgaggtgatcgacgaggtgccggacatgccggacgagcttgtggacgccatctgcgaggccattgaagtggagtcgctggcaccgatcgtcacgccgtccgcattgaccagcgtgccatcggggtcgtggtcgaacacggagaatttcacgtcatacgtgtactggataccggcggaacccacatactggtgaatctcgctcttggaattatccaggtatttcttgaagcgggtcaggttgttttcggtaatcgaactggtcaggctggatgcctgcttgacgctgcggtcgtccgggtagatgccgtcggttctgtgcgtcttgccgccgtatccgtcatcgccgcccatctggccgcccatcatgctgctcaggtcgaaggtctgggagtcgatggtgatcgggtaggcggtcatcgtgtcacgctggatgtcgctgatgtatgcgttcacgccagtcgacaccgatagaatcagcgcaatgccgatgatgccgattgagccggcgaacgaggtcagcagggtacgcgccttcttggttttcagattgttgaagctcaacgccagcgacgtgacgaacgacatcgacgcgcggcccatcgtcttgtgcacggccggctgttcggccgtctcatccacgacaaacgggtcggagtcggagcggatcacgccgtcgcgcaggttgacgatgcgcgtggcatattgttccgcaagttcggggttgtgggtgaccatgaccacgaggcggtccttggccacgtccttgagcaggttcatgatctgcacggatgtgtccgaatcgagcgcgccggtcggctcgtcggccaggacgatgtccgggtcgttgaccagtgcgcgggcgatcgccacgcgctgcatctggccgccggacagctggttcggctttttattgatgtgttcgccgagtccgaccttctccagcgccttgcgcgcacgttcgcgacggtcggccttgccgatgccggaaatcgtcagcgcgagttcgacgttcgacagaatcgtctgatgaggaatcagattgtagctctggaacacgaagccgatggtgtggttgcggtacgaatcccaatcgcgatccttgtattggcgcgtcgagatgccgttgatcaccaaatcgccgtcgtcataccggtcgaggccgccgatgatgttgagcaaggtggtcttgccggaacccgagggacccagaatcgcgacgaattcgctgtcgcgtaggttcaggctgactttgtcaagcgcctgttgaacgaaatcaccggttttatagcgcttcgagatcgatttgatctgcagcatgaatacctcttcctggctgacggttcgctgttatgtactgtattgtcacgccttgaatttccggccgactttggtgctccccccccccgccgcgattccgctatgggcggacgcgtcgcaaaatggtgtgtctcaccgcgctctggggtgtgaggtcagatacgtttcgatcagggtttcggggcttacgtgcgtgtagatctgcgtggtggtcacgctggcgtgcccaagcagttcctgcacggtgcgcacgtccgcgccgccttggatcaggtgcgtggcgaaggaatggcgcaaggtgtgcggatggagtggtttggtgatgccggcccgctccccggttgctttgacgatttcccataccgattgccgcgagatgcgcttgccgcgtttgttgagaaacagtgcgcgtctctcgggaatcttggcgctggagcgccgttccagctcgccacgccccgcattgaggtatgcggtgatggcccggcatgcgtagctgcccaatggcacaagccgctgcttggagcccttgcccatgagtcgcgtgatgtgctcgtccaggtcgatgtcgtccagattcacaccggtggcttccgagacgcggcagccggtggcgtacatgaattcgagcagggccttgtcccgcaataccaccggatcggttgagccgccggctgccgccgcgtcgagcagacgggttacctcgtccacggtgagtacgtcaggcagggtgctggcacctttgggtgccttgactgcggcagaaacgtcggcagtcaccgcgtgctggccgagcgcgaagcgatggaattcatggatcgaggccagtcttcgggctttggagcgggcggactcccccgcctggtcaagggcggcgatgtagtcttcgacgtcttgtttggttatggcgtccggttcggggatgccgcgggtttcgagccaatcaatgtatttggcgatatcggattcgtaggcggtgacggtggccgtggcgagtcctcgctccacgccgatgtggacgaggaactgctctgtgagtttggtgaatccgttggtcatgtgtttgttctcttccccacccgctgcgcgggagcccccctcgtcagaggggggctaataataggaaaccccgctcggaagcggggtttctagtgtgaagtcacgacttcaagcaatcaggcctcaaccggagcgttgacgtcctcaggcagggcggccttggcggcgtccacgatggtcttgaaggtgttcgggtcggagacggcgatctcagccagagcgcgacgatccagctcgatgccggcgagacgcaggccctggatgaagcggttgtaggtgatgccctcagcgcggacggcagcgttgatgcgctggatccacagcttacggaaatcacccttgcgagccttgcggtcgcggaagttgtagttaaaggagtgcagcagctgttccttggccttgcggtacaggcgggagcgctggccacggtagccggaagccctctcgagaacaacgcgacgcttcttgtgggcgttcactgcgcgcttgacacgtgccataatctattcctcagctttctaaagtcttattatttccgggtaagccctatgctcacttctgcagaagctggtgcagcttcttggcctggccgccgcgcagcacatcgtcggcggacagttcacgacgcttgcgagcggacttgtgctcgaggttgtgacgcatggcggaaccgacatgcttcaccttgccggtgccggtgatcttggcgcgcttggaagcggcggaattagttttcatcttcggcattgctgccctccttgctggtttgcttcttgtcggaagtcttctgagaaatcgcggactgcgcgtcggccgcggcctgagcctgagactcctgcttggccgcgagacgagccgcctggcgagcctgacgctcggcgcgggactcggcgccacgacgacgctgctcggactgggtgtggaccttcttgcccttcggcgcaagggtcatgatgatgttgcggccctcctgcttcggcttggactcgacggtgccgtattcctcgacatcgtcggccagacgctgcagcagttccacgccaccaatcgggcgggagatctcacgaccgcgcaacatgatggtgaccttgaccttgtcgcctccgttaaggaagcgggtcacatggcccttcttcacgtcgaaatcgtggtcgtcgatcttcaggcggaaacgaatctccttgatttccgcggtgctctggttgcggcgagcttcacgagccttgatcttctcgttgtacttgaacttgccgtaatcaatgagcttggcgaccggaggcttcgcgttcggggccacctcgacgagatcgaggtttgcctccttggccaggttcagcgcgacggaagtcgcgatgacgcccacctgctcgcccttcgggccgatcaggcgtacctgcgggacgcgaatctcgtcgttaatacgtggttcgtcgctgatgatgactccaatcctctacttcaattccgtggcggggcctttgctggagtcctgttcaatgctttgggttcatggcaagccaaaaccagcgccaatatgcgctcagcttctgcagacgcatatcagttctttgcgtcattcctgattgcgcgttgtatatcgcaatcgctaggctgtttgccttgaacccgaggccttgaaaggcttccaggtggggttgccccgctttcttgatttctcaagccaaataggaatcttaccacatgcccggacattcgcggaccgtgtgtcgatgggtggataccggctacagtaggcataatgactcaggtatgcgtgatttttggtgcgggcgaatactatgcgggcacgcccgtggttcccaccggtgcgtatgtgattgcggccgatggcggactcgaccatacgcgcgagttgggcatcgtgcccgatgtggtggtgggcgacttcgattcgctggagggccggccgccccgcaccgatgtgcgcaccatcgcgctgcccgcgttgaaggacgacccggacatgctttccgcgctgaaggtcggctggtcggcgggttgccgcgagtttcacgtgtacggcgggcttggcggccgtattgaccatacgatttccggcattcaactgatggcgctgctggcccgacacggggcaagcgggtatctgtatggcgacgggctcatcgtcacggccatcaccgatggtaggctttcgttccccgcgcatccggtgcccgaggacggccgcatggtgtcggcgttctcccactccgatgtttcgcttggcgtgaacgaaccggggctgaaatatgagctcaagaacggcacgctgaccaatacggtggtgcagggggccagcaacgagttccgcgacggcgtggacgcggccatcagcgtgaaacgcggcacactgatcgtcaccttccccatcgaagtggcgttgccacaggtgagcagattccatgaattcggcggcgatatcggcgagctggacaccgaagtgtccaagctgctggttcgctgacttgcatgccgcgcgcttgctcgtgatgattcgagacattcctccaaaggagaggaaaatcacatgtcggttgcgggcaatccaaattgtgagcgctcacaaaaaatacggcatttttacccaaaacgcacgctgaaacgttgccatgtgtacagagtcggcattacagtagcaactgttggtaaacaatggcccggtgtgccaaagcgcgccaaggccaccctacaagggagaattacatgacagttaagattggtatcaacggcttcggtcgcattggtcgtctcgccttccgtcgcatcttcgagctgcaggctcgcggcggccaggctggtgacattgaagttgccgccatcaacgatctgaccaccccggctaccctggcttacctgctgaagtacgacagcacccacggcaccttccgtcatgacgatggcactccggttgacgtcaaggccaccgaagactccatcatcgtcgacggcaaggaatacaaggtctacgccgagaaggacgccaacaacattccatgggtcaagaacgacggtgttgagtacgtgctcgagtgcaccggcttctacacctccgccgagaagtcccaggctcacatcaacgctggcgccaagaaggtcctgatctccgccccggccaaggatgacaccaccccgaccgttgtgttcggcgtgaaccacgacatcctcaaggcttccgacgtgatcgtctccgccggttcctgcaccaccaactccatggccgccatggtcaagctgctggacgagaagttcggcatcaaggccggcttcatgaccaccatccacgcctacaccggcacccagatgctgctcgatggcccgcgtggcaccaagaccggccgcaacctgcgcgccgccgccatcaacaccatcgcccactccaccggcgctgccaaggccatcggcaaggtcgttccgtccgtgaacggcaagctgcagggccatgcccagcgcgtccaggttccggacggctccgtcaccgagctgaccaccgttctgaacaccgagaccaccgccgacgagatcaacgaagccttcaaggctgccttctccgacaccgattactacggctacaacgatgagggcatcgtctcctccgacatcctcggcgacacccacggtggcgtgttcgacccgacccagaccgacgtcaacaccattgacggcgtgaccctggctcgcaccgtgtccttctacgacaacgagtacggcttcacctccaacatgatccgtaccctgctgtacttcgctgagatctccgagtgaaccactgcggtctaggccgctacggttcgtttgagaactaagctgtgagacccccgccttgtgcgggggtctcttcgtagtagaacggtaatcatggcaaagaaaagcaagcatgataagggcgcgggttctaccccggcgacagtccaactggagaaggcgggcgtggaattccacgtatacgaatacgagcactccaacgaccatatggatgacggctacggcgtggaggcggccaccaagctcggcttcgacgagcatcaggtgttcaagacgttgatggcggacaccggttcggagcgtgtggtgggcgtggtaccggtcagcggacatatggatttgaaggccctggctgcggctgtaggtgccaagaaggcctctatggccgatcccaaggtggcaatgcgtgaatccggctatgtggtaggtggcatctcgccgttgggccagaagacacgtcataagactgtgttggatgaaagcgccctgcaattcgaccagattctggtctccggcggcaaacgcggcctgtctgtgggcgtgaatccacaggacctgctcaaggtcttgaacgccgttgccgcaccaatcggcacgtggtgaccgttcttggcttccctcggtgaggggagccaaggatgactacttcttcctgcgcaactccgccggcagcacgaagtgcatgttttccttgatggtttcgacggacttcataccggtgaagcccaagttttgcagagcgtcaatcacaccggacaccagttcgtccggcacggaggcacctgaggagatacctacggattccagaccctcgaaccatgccggatcaagctcgctggcatcatccacgcgatacgctttgccgcgctctcccaagccctcctgcgccacctccatcagtcgcacggaattcgaggagttggccgatccgacaatcaccacgcaatcggactgctgggccaccagtttgaccgcagcctgacgattcgatgtggcatagcagatatccgaactcggcggctcttgaatccacgggaacttggccttcagcgcggcaatggtgccggcggtctcatccacgctcaacgtggtctgcgagagcagcaccagcttggtgtcgggcgcaaaatccaacgaatcgacatccgattcatgctcgatcaagtgcacatgttcggggttctcccccaccacgccgaccgcttcatcgtggcccttgtgcccgatatagacgatttcatacccctcgcgcacgaaacgcagcacctcacggtgcaccttacccaccagagggcaggtggcatccaccacatgcatgccacgacgttcggcttccgccttcactaccggagatacgccatgggcggaaaacaccaccggaatacccgcttgggcagcagcatccggaatctccgccaattcctggacgaacaccgcgccttgcccggccaagtcctcgaccacatgcttgttgtgcacgatctgccggcgcacatataccgggggcagcccatcctcgcgcgttcgctttccggaagcctccgcggctttgagaatggtctgtacggtaagaatcgcacggtccacacccgcgcagaagcctcgcggatcagcgagcacaacgcttttggtcatcggaacctcctgaacgtcaatagtgtttttccagtgtaaggcagggattacaggaatctgccgtcacaacttttccgcgtctcccacgaatcaccggtttccaaggaatccacgtgcttctcgcatgatggtgtgagattcgtcactccacgtattgctaccgtgtctgtacgaattgtttattatatgccggctatcgccaatccccgcctcgatagaggagacgcgctagactggggccagcgatagcaggagctaccggcccaccaacctcactacgggagtgattccatgacgagtaaaacaccacgcaccggaaatcagtattcgattcactatggcgattattccgccgtcatctgcgaactcggcgccaagattcgccgattcgattatcaaggcaaggaaattttctgcccgttcggagtcaacgacctgacccccacctgtaacggctatgtgctggccccgtggccaaaccgcatcgaaaacggcgaatacgatttcaatggcaagcattactgcgcgccggtcaacgaatatcatcccgcaccgcgcaacaacgcgaaccacggatacgcctaccactacatgtggaagcttgaatcgttgaccgatagcgccgtgacgctttcactgcgcttccccaacctggacggatacccgttcgatgtgaccgtgaccgtcacatacgaactcggcgacaacggcatgaccgtgaccgtcaatgcccgcaatgatggcgacgagccggcaccgtgggctctcggcctgcatccgtggctggccaatggcaagcagggcgcgacttccgccgagcgtgacgccgactccgccgcctgccacctgcagatcaaggccgccagtcatgtgacggtgaacgaggcgctgattcccaccggcaccgaaccggttaccggcatctacgacctgaacgatggcccgacgctcgaaggccgcgcctttgatgatgcctgggtcgacgtggagcgtgccgccgatggtacgaccaccaccacattcacccgcccggacggtattgaagtgaagctcattggcgatgagacgatcaatgcttggcagtgctacaccgccactggcgcgccgttcgccgagcatccgtatggtatcgccgtcgaaccgatgaccgccccggccaatgccttccgcactggtgaccacttggtgacgctcgcccccaatggcgactacaccactgtggtccgctacgaagtagtccagaagtagttccgttacgctggctcccctccagaggggagccaattttttatccttatgtgccgccgcgtcttgggacttgtgcgatacgattgtgagcggtaacaatctgtttcacaaaggagtgtgcactatggctttgaagcctcgcactggtaaccaatatgtcatctcgtccggcgaatggagtgccgtcgtcaccgaactgggtgccagcctgcgcgagctgaagtggcgcggcgaagacctcatcgtccccttcgacccgaacaaggtcatcccctgctgcaacggctgggtgctggcaccgtacccgaaccgcgtgaccaatggtcagtattctttcgatggcgaagactaccagatgccaatcgacgagttcgaccgccaatcctccctgcacggctacgcctaccgctacatgtgggagctcgttgatttgcaggaatcacatgtgacgctctcctggcgttcccccgacatcgccggctacccgtttgatatcaccatcaccgccacttatgcacttgacgagaacggtctcacggaaaccttcaccgtgcacaacaacgacagcgtgaaggccccatgggcatttggcatccacccgtggctggcaaacggcaagcacgccaccggtcaggccattaccgccgacaacgagtcctgccgtcttgagctgcactgcgatacccacgtgaccgtagacgaacacctgctgcccaccggtgaagagccggtttccggcatcttcgacctgcgcgataaccccacgctggagggacgtggcttcgacgatgcctggaccgatatcaccaaccgcggcgaagacggcagcacttccgccgtgttcacccgccccgacggcatcaaggtcacgctgaccggcgacaagaccatcaactcctggcaggtgtgcaccggcaacgaaatcggcgggaaggctcgtcaggccggcgtggccgtcgaaccgatgaccgcctacgccgacgccttccgcaccggcaaggatctggttgtgctcgagccgggcgatgactacaccaccgtggtcaccttccacgccgaacaaatctgaaaaaccgaataaccaagcctgacgatcatcgccacatggacacccgtgttgcatcacgtcgtacttatgtggcataattccgaaggcttatttttttactgcagcaaaggagtccatcatgggcatgcgcggacgtaagcgcaaggatcgtcgtaagaaggccgccaaccacggcaagcgtcctaacgcctgattcttcgcgtttcttatagaacgctcaaggcccgtctgatgatacatcagacgggccttgttgtatatgtgtcgttacttatcttcgccgcagcagtgatcaagcgtggccttgagccgggccatcagacattcgggtgccacatccgggcgcaagtaggcacgcaacgcggcaatcaacgcctgttcacgctcgtcgcagcaggtacgggggtcaaaacagtcgccctccgtaacgatatgcacgtctgtctggaccgacgcagcggccgagccggtatctactgaacgatgatgcaccgccgtgatatgcacttcggtctggcttaccgtgccatcggccgccgtacgggttatggagatatggcgagtacgctctaccggctgatcgttcatcagatctcctttcccgaaagcttgcttgactgttgtggcgtgtgggcgtgagtcgcatgactatgtctcactacggcttgcgtgtcgccattgctgccaacagttcgttcactactttcattatggccggaatcggcgattcgaccaacgttttcgctcaacttcgcggatggtgaaccagccgacgaaccagtcgcgtacccgcgctctttcgcatacgaggcgagctcacgcttgagttgcgtgcgggcgcgattcaggcggctcatcaccgtgccgattttcacgccctgctcatcggccacctgttggtaggacttgccgtcgatggcggcgtcgatgaacacctgccggcgttccggcgagagtttggcgagcgcggccatgatttcctcgggcgcgaaggcgtccaaatattcctcttcagcggacttgagcccgtccgacgtatgttcggcggcatcgtaaatgtcccaatcgtcgtattcgccagtggagtcgttggcacgctgcgggcgccgcttggccttggcatactggttgaagtaggcattgcgctcgatggtggtcatccacgcctcgaagttggagcccggctgaaatgagtcgaaggccttgaacccgcgttcgaaggtgtcctggaccagatcctgcgcgtcatcgggattgttggtcagcctcatcgcctgccggtacagtgcattgacggcgggcatggcgagctgctcgaatctggcgcgcttggctgccatggactcgcccgatccggctgactgcccggattgcgtagttgcttcgcttgtcgtcacggttcaccattctaatcaaatcatgtgcccatatcgtggtcgatgacgtgtgagccacaacacgctacaccccacctgtagaatggcgtatcggctagataatagggagtaacaattatggctttgactttggcttcggccgctgacctgctcaaggaacaccatctgctgcgtgaaatcatccaaggggatgtctggaccgacgacccggcccgtatcgcttcggcggatgaaccgttcgccggcatcacctacgacacccgcaaggtcacgccgggcaccctgctgtgctgcaagggccgattcaaggccgagtatctgaacggcatcgacgaagccggcctggccgcatacgtggccgaaaccgagtactcagccgcaaccgccgcccccggcctgatcgtcaacgacgcacgcaaggcgatgagcctgctgtccgccgcgttctacggatatccgcagaacgagctcacggtcatcggcgtcaccggcaccaagggcaagacgaccacctcgtacttcacgcaggcgcttatcaacgccgtctccggcggcaaggccgcattgttctcctcggtcgataattgccttgacggccacacctacgtcgaatccgatctgaccacgcccgaatcgatggacgccttccgcatgatgcgcgaggcggccgataacggcatgaagtatctggtgatggaggtctcctcccaggcgtacaaggtggaccgcgtctatggactgactttcgatgtggccgcgttcctcaacatctcccccgaccacatcagcccgatcgaacaccccacgttcgaggattacctgtattgcaagcgccagatcatcgccaacgcgaagtcgctggtactcggcgcggacagtctgcacgccgatctgttgcgggaggacgcggaggcagctggcatcggcgtgaccaccttcgccctgcatgacgcggataatgccggcaccagtgcggacgtcgtcgcctggcccgccgacccggagcacgcctccttccacatcgccgacggagatcaggcccttggcgactaccatctgtccatcgatggcgacttcaactacctcaatgcggcggcggccatcgccatcgcccatgcggctggcgtatcgctcgatgacgccggcgcactgcacgccatcgaatccgtacgtatcgccggccgtatggaacagttccgcgatccgcagtcgaacacgctcgccatcgtcgattatgcgcacaactacgcatccgtcaccgcgctgcttgacttcgtctacgagcgttggggcgaggaaaacccgcgtatcacgctggtgaccggatcggccggcaacaaggcctacgatcgtcgtaaggaaatcgtcgaggctgccgagaaccgtatcgcgaacttcattttcaccgccgaagatacggacaccgagccgttcatcgacatctgcatggaaatgcaaggctacatcacgaacaaggatgtggcctccacggtgatttccgaccgtccgacggccatcaccaacgccatttacgatgcccgtgcgcacgccgaccgattcaacatcctgctgatcatcggcaagggcaacgagcgttggatcaaggaccatcacaagcatgtgccgttcgacggcgacgatcacgtggtcgaacgcatgtttggcttgtgacgggattccggccaatcagatcctgatcggattccgattggcccacatcagatcacgcgcaatacgaccaaaccagaaacacgacatacggatacgaacgaaaaaggatagctgaatcgtaatgatcacgttggagaaagttgacggagccacactggaagccgaagccgagaaggccggcatcacgttgcctatcgaacagaccaaggtttggtctggttttcaggcggatatcgacggacgcacgccatggggcgattatctgatcaagcgtgatggtgaattggtcgccgtgatctcctttatcgattttgagacgcacggttatcattatctgcgctcgatgcatgggccggcgtgggctgccaagcccaccgaggctgaggagcgcgaggtcgtcgacgccatcgtggacaccgtcaagaaggccgacaagaacatcgcgttcctgcgtatcgacacctggttcgccgatggtacggagaaggtgctgtccacagtgccgtacgaccagaccgtggtcatcgacgtcaccggtggcgatgatgagattctggctcggatgaagcgtcgtggacgccgtgacgtgcgcaagtctctacgtgagtgcccggccgaggttgccgatgagacggataaggcgctggccgatttctccgaatattacgatgtgatggtcgagaccggccagcgcgatggattcacgcctgctccgatgagcgactattccgatatgatcggcgcgttgggtgccgatcattgccgtgtgttcgccgcacgtattgaagaccgtgtggtggcatggtcgattgtcaccgtgaacggcacgcatgcggtgcgctactatgccggcatgcgcaacgaggttatgcgtctgcatgtgaccgacaagctgctgtattccgaatgctgcatcctgggctcgcagggtattactgaatacgatctcatgggcatcggctccgacttcgcgccgtctctcaagggccttaacgagttcaagtgcaagttcaccgaggaaatcaccccggtggcccccgcccgcgacgtacccatcaagaaggtcttctacaagacgctgcagactgtacagggcgtgcgcaaggcattgcgctaataccgccccgctcccgctggtgggagctatcgaacgaagcgagactgaggggggtctttcgatatggaccaccctctgtcacctgtggtaccagttcccgccagcgggaaccattcgtttatcgttcgagtttttgactcaccacggctgttacgccgtcggctctcatggttacgccgtaaagcgcgtcggcaatcgacatggtgcgttgctggtgcgtaatgatgatgagctgcgcatgggcgcgtagctcattgaacgcattaatcaaacgggtcaggttcacgtcgtccaacgcggcctcgacctcgtccatcacatagaacgggctggggcgggcggtgaaaatcgcgaacagcagcgccagcgcggtcagcgaacgttcgccgccggacagaagactcagctgtttgacgcgcttgccggccgggctggcctcgaccagtacgccggtggtgagcatgtcttccgggttttccaggcgcagtcgtccggtgccgcctgggaacagcgtggcgaacatctgctcgaatgcctcggcggtatcgtcgaacgcggatttgaacacctggaccatcgtggaatcgagatccttgatgagctgcatcaaatcgtcacgtgatttgaccacatcgttgcgctgatcattgagatacttgttccgctcctcaagcgcttcgaattcctcggtggccaaagggttgatcttaccgagtgcggccagatcgcggcgagccttatcgagacgcttcttctgctcctgacggttatacggcacggtcttaaagagggcggaatcgccgttggtgccggtctctcccccggtttctccctcttcggtcccagcctcagcttccgtctcatccaacggcacagggttgccctcatcatccagcacgggcaccggctgttcggggccgtaaccactaaccaattcctccaaagtgagaccgagttcgtcggacactttctgcatgagctgcccggattcggcggccaaccgttcgcggtttacatccaaggcatgttcgcgcccggtcagatcggtgaccttgggctcgatctggttgcgctgcgcgcgcagggccttgagttcctcgtcatggctggaggcggcggcctgcagctcgtctcgtttggcggccacgtcatgcagcgtatgctccaccatggcggccactgctcgcgcgtcatcggccacaccttgcaggtgtgcggcctgctcgcatctgcgatcgttcaacgcctcgatgcgggcgcggcgttcggcggcttctctggcgttgtcccgcagcagcccggcctgtcggctcagtgactcccctttgcggcttgcttcggtccacgcgattttcgcggcgacctcatgctcgcgagtcaggttcagtccgcgctccagcgtgcgttcacgttcatcaagttcgtcgaaatcggcatgttccgctgtggattgccgggccgatgccaaagcgcgattgagatcgtcgagcttgagctgatgctcgttgcgattctcttgggtctcggtgattttcctatccagctgctcaagctgacgggtgaacgatgcgacgcggtctgtggcggatttcagagatttctccgcctgttgggctttgagccgggcttcggtgcgtttggcggattcctggtcgacgagtcgggccgcttcatcgcgtttggctttggcctcggccacttgctcagccattccgccgtcttgggcggccaactgtttgacctgtgccaatgctttgtctcgacgggcggccagagacaggtccgattgagagatggaagagccgccgaccgccgccacgccgtgtgtgaaggtctcgccgttcttggtgacggcccgcatggcttcgccggatgccacgatgtgctgtgcttcgtcggcggtgccggccatggctacatcagccagcaggagacgcacggtgtgcacgacagcttcggcctgtgccgggttctttgcatccgggttcgcggtgacgagtgctgccagcgcgttgcccgatcgcggggcggccgccgtgttctcggcgctactctcctccgactccgtgcccggctctgtggcgggatcgccggcaatgctcgcggtcagcaccacggctttgccgagcttatcttcccgagcgcgttcgagggcgtgcaacatgttgcctgcctcgggtaccacgatggcgctggcatactggtcgagcgcgtgggccacggcatcttcccagccttcggccacatggatgaagtcggtgagtcggccaagcgaggccacgtccgtgtcgcgttccaatgatccggaggcattgcggctgcctagcgtgtcggcaagcgcatcggccttggatttgagcgagatgatcttggactgtatctcgcgctgcttatcggcgagttcgttcagtcgttcgcggcattcggcgagcgttgcacgcgcggcgtccaatgcggcaccgtcatcgtcggcaatggagtccgcttcgctgcgcaatgcgtccagctgttgctgggcatcgtcgcgctgggaagtcagcaagtcgcgttgggaggcataatccttggcgcggctggtcgccagttgcacggcggattcctcgcgggcgatgagttcgcgcagtcgggcgatctgcgcatcgcgctcctgtgcggttttgcgcagttccgtcaaggtctggcggactgaggcaagcttcttctcgtcgtcggcacgttcctcggtggccttgtcgagtgcgatgcgtgcatcggccacggccttggtttgtgccgcggcctgagactccagttcctcggctcgtttgacgagcatgccgggatcctcaccgaagttggtgacgatctggccggtgagtgaccggctgcgctcttcggccaactgggcgagcgcgttcagtcgttcacgggtctgtgagaattcatgccagtattggttggccttggcgatggtcggactggattcagagctcaacgcctcgacctgttcgatgcgtactttgacgtgggcgagttcacgttgggcgacggccagctggttgcgcacatcgccaagctcttgacgtaccgtgtcgcggcggctcatcgagcgttgggcgtcttcggcatacagacgtgcttgggcgtcgcgtacggatatctgaatcgcgtcggcgcgccgggagatgcgtgcctgacgtccgagggggccgagctggcggtgaatctcccccagcaaatcgtcaagtcggctcaggttcgtttcggtattggccaacttgcgcaacgcgcgttccttgcgcttgcggtgcttcaggatgccggcggcctcttcgatgaacgcgcggtggccggacgggtcggccttcagaatcgcatccaatcgtccctgacccacaatcacgtgcatctgctggccaagaccggtatcggagaggagttcctgaatgtcgagcagacggcattgcgagccgttgatcgcgtattcggagcctccgttgcggaagatggtgcgggatatggtgacttccgtgtaatcgatatcgagcgtgtgatcggaattatcgatggtcaggctcacctgtgcacggcccaatggcgggcgggaggacgtgcctgcgaaaatcacgtcctccatcgaagtgccgcgaaggtttttggcaccttgctcacccatcacccaggtcagggcgtcgacgatgttcgacttgcccgaaccgttggggccgacgaccgccgtgatgccgggctcgaagcgcagcgtggtggcggaggcgaaggatttgaatccgcggagggtgagttccttgagatacatggcgtgagactgttttccgtatgtcgggcgtccgggtatccgatgtgccttggatgcgggttaccggacgtcggcggaatcgtcggtgcctgtgtcggcactggccgtgccggtgccggcgttaccggcgtcactggcctgttccttgccgaggccgaggacgtcgaacacgtcgaagtcgtccgggctcaccgaatcctcgaggttgtcggcggcctcatcctcggccttgtctgccggccgatccgaatcgtccgggtcgaccgccggctgatggacggccatggcctgcctcatcgtggggctggcatgctcctcaagcatcaggcgtgcgtcgccggcggtgacgaagctgccgcagataagcacgccgtggccgtagcccacgcccagctcgtcctcggcatcgaccatgttgacggcagtctgaatcgcgtcgggcaggttcgcttccttgatcacacggtcacggccgaacacgtccacggcaatcttctcgagctcatcggccggcatcacacgctcgcgccacgagttctcggtgaccaccacggagctcaggatcggctccagaacacccagatattcctcgacctgcttgtcgcgcatcatggcgaccacgccgaccagttgcttgaagtcgtagctttcctctatggccttgcgtagggcttcggcggcattcacgttgtgtccgccatccagaatgatggtcggtgaggtgcggatctgttcgatgcgtccgggaatcttgaccgagctcaacgcctcgcccaccaagtcgccgtccagcgggccattgaccggaatcaccacttcggcggcgacgagcgcggcaagtgcgttatgggcctgatgctcgccgaacttggcaatcggcacgccctcgtaagtgccgttgggcgtggtcagggtggcgacctggccgccgactgcggccatgcggtcggacacggtcatttcgtagccgtcgcgcacgagcatggcgtggttgcgttcggcggcttcggtgagaatcggcatgacggcttcctcatgcggctgcgggccgatgatggcggtgcagttcggcttgatgatgccggccttctcggtggcgatctgttcgacggtgtcgcccagccactgcatgtggtccatgtccaccggaccgatgatggccgcatccgcgttgagcacgttggtggcgtcccacaggcctcccatgccgacctcgacgatggccacgtccacgggcgtgtcggcgaacttccagatggccatggcggtgagcacctcgaagaagctcatcttcggcttgccttgctcctccatcttggcgtccaccagggccacgagatccttggtctggtcccagatgtcgatgaaatcgtcgtcggacagctgctggccgtcgatggcgatacgctcgttgatcttctccagatgcggcgacgtgtacaggccggtgcgcatgccgtaggcgcggcagatggcctcggccatgcgtgcggtggagcctttgccgttggtaccggtgatatgaatcacgcggaacgactgctccgggtggcccaggatgtcgagcatcaggttcatccggtcgagatccagattggtggtgttatgctccggcgggcggctcatgatgtccagttcgacgtcccgcatgctctcgttgttccgattcggatgctcgaatgacatatcctcttctgacctctgctcgtgttgctgttgaaccgttcggagtgcgtatgccacttacgtgttcgtgccattctcgtcatgtctacgcatgcccgcatatattccgcttccgcatgcgcaggaagctcccctcgcacaggtttgccctgcatggttcgggattcttgccttcacgcgtggagccgcactccctcaattccctctatcctagccgccggggtggtttatcgtgcgcgcacagtgaaaccgtctcatatgtcgccgccgcgcgggcggccttttcctgcagcgcgcacagtgaagccatctcatatagttgcaatgcggctcttgccgtcggcatcccattcttagtcggctgcaatccaaaacttgtatgtccggcgacgctgatgctattcagcgtcggtacagtgccagcttctggcggtacaccgacgctatgatgctcttgcgagtcggtagctggccaaaacctggattaatcccgactccatcgcctctcagtgtcgtctcctcgccaaggcatgccattctgccgtcgttgagaaatttcaacgtcgtcaatcgaccatgtcttgccccggaaacgactctcacaaacgtccgctacatcatcttttgaactcgcagaggctcattcactgttatgactgctctcaccgtcggcagccgtccaagccctggatctatgccgccaataaattgcagcaaatcgtcggccacgatacaaccattggactcacgccgacgctagattccacactcagacagaagccagccaatatctgaaccagcaccgacggcgtacaaagcataagcaccgttaaccgtcaattcgccgccctctaccagctacatccgtcttcgccgatgatatcttgttcgaatccccaaagcacgttgttcgaatgacattactgatggtggataagttttgtatgttatccactattccgaattagcggcctaataccttgaaattatcgggaatatctcactccaagacagccaagctccgaggctagaaccacaatggctgaaattcatacttacgctgcttcgttccggctacgctcgacgtcatgaagacacacaaagcagtggcctcgctcatatcagccgcgcagaatgagctgagatgcgtctattcaagaaatgaagcggaacagaccgctctacgccgccgtgcccagagtggcgagttgttgaaagtgtatgacggcattcccagtctttatgcaaataccgcatactgggatggtttgacgccgccggagcgaacgttgcatatggcccgcgctcttgcgcaagagcatcctcagtgggtttttggcggcttggtggcagtaagtgcttatggattcgaacatcaatggcatttgcatgatggctgcataaccatcgtgacttccgatcatggatctcgtcaatgccatcagcgcttacgacatgtctatatgcccgatatgaacaatccgaagacacattacgaggcctccggcctatccctgatatcaccggctagaaccttggtcgaggccgctatagaccttgattttcggtttgcgttgccgatctttgactcggcccttgccaagggaataaccaaggaagagatagccgccgactgcgttcaatggagaatcgattatgcccgagtattccgcctgctgcgctatgcaaacgaaaggagcgagaatggtggagaatccctcgcgcgaggcaccatcatcgaggatcgcttcctcacgccgcgtattcaggtaacggtgaccgacccgcagacgaataccgagcaccgcgttgatttcgtatggaagctcgatgacgggcgcgtgatagtggccgaatacgacggcacacaaaaatacgtggacccagccatgaccgataaccgcagcattcaggaggtggtggccaaggaacgagcacgcgacgagggactgaaacgagccggtgccaccgaaatcgtccatttcacatacgccgacgtcatcgaacgcactccgctgcgggtaaaactgctcaaagccagagtgccccagatggaggcatccgcagagcagcgggtcccgtgatgcgatgaaccttcatcgcatgggttcacatggattcagcccgcaaaatatgccaatatcaatcggcaagctccagcccatgcccctccttccctaccgagaacaataaacgggtccgcattccagcccgatgcactcgccatatgggcatgtccggaagaccgtccaaattccgtacttggttttaccgtcagccgtcaatcgtggcacatcgcataaagccgactagtatgaggtgggaatcgatgattcgacaacaactacatacaggagagtggcaatgggtgaagtgatcaccgccaaggacaaggaatatgaggccgaggagcgcgctacggcgccgggcgcgaaccagtcgatgagcgaccgtgtgaacaaccgctcgctgcgcccgcagtcggctgcattcaaggagtttatgaagtccggctgggccgacgatgatccggagatcaagcctctcgaatcctccaagttcacgccagcccgccttgaggcgctgggcaaagccttcccgggcgagcgtctggtcattccggccggccagccgaaggtgcgcaacaatgattgcgattacatgttccgcccggacaccacgttcgcctactacaccggtctgggttccgattacgaggccggcgccgtgctggtcctgaacccggtcgaccccgactcccccgaagccgccgccggcaagacgcacactccggaactgttcgtggcacctcgcgccgacaactccaccgaggacttcttcatgtccgcccactacggcgaatactgggttggcccgcgtgctggcctcaaggagatgcaggcgatgaccggcatcgagacccacgacatcgcccagctggccgacgccctgtccaaggacgtgggtgccgaggccggcgccgtgcgtgtgcgcgtggtcagcgagaccgatcccgaaatcacctcgatggtcgagtccatccgcgaggccaacggtttcgccgatccggacaagaactccgcatccgacgacaagctgcacgagttcgccgccgaggcacgcatggtcaaagacggctacgaaatcaacgagatgcgcaaggccgtggacgccaccaagcacggcttcgaccgtctgctctccgcactgccggccgcgctcgacaagccgcgttccgagcgtatcctcgaaggcgcgttcaacgccgtgtcccgtgagctgggcaacgccatcggttacgactccatcgtggcctccggcccccacgccccgattctgcactggatgcgcaataccggtgtggtgaagaccggcgacatgctgctggtggatgccggcgttgaggtcgattccctgtacacggccgacatcacccgcaccttcccgaccaacggcaagttcaccgacttccagaagcgtctgtaccaggccgtgctggactcgcagcaggccggtttcgaagccgccaagccgggtgccacctattccgacatccaccacgcctgcatgcgtgtgatcgccgagcgtctgcacgattggggtctgctgccggtgagcgtcgaggagtcactgtccccgcaaggccagcagcaccgccgttggctcgcctgcggcgtggcccaccacctaggtcttgatgtgcatgattgcgcgcaggcccgctatgagtcctatcagggcgcgaagatcacgcccggcatgatcttcaccatcgagcccggtctgtacttccgcgaggatgatctgctgattccgccggaataccgcggcatcggcatccgtatcgaggacgacgtgctcatgaccgagaacggccccgaatggatttccgccggcatcccgaagcagatcgacgacgtcgaagcgtggatgcggagccgtaaagcaatcagtccggtggactgattgtaggcgacgccgaacgctgacaagcgcgaggaaaatgaaatcatgcgcgaagcgcaccatattaagcaggctgcccaagccaagtaacccttaagctccctcatcagagggagctccttttttctactaaggaggcaatgtgcctactccggaatttgtgttggaattgcgtaagaagatcggccatgatctgctatggctcaatggcgtgaccggttgtgtactgaacgaacatggtcaactgctgttgggccgtcgttcggacacgggcgaatgggcgatggtctacggcatcaacgagccgggcgaacagccggcggacacggtggtgcgcgaaatcaaggaggagacgggcatcgatgccatcgtcaccgatttggtggccgtcacctcgtcaaacaaggtgctgacctacgccaatggcgacaacaccatgtacatggatcattcgttcctgtgcgccctgaagcccggcggcaatgccgagccgttcgtgggcgacgaggaaagcctcagcgtcggctggttcgatctggatgacctgcccactcccctggcggccagcacgagcgagcggctggagctgttccatacttacatcgagaacaaaaagcacggcgacgcccacgccctgttccagttcgatgggcagcagtactagcggatataaagttagctccctctgacgagggagctccaatgctatgcgattacgcctcttgggctaggagctcgtggaggtgggcgcggtgctgctgctgttcgcgcgggtcgggcacgggcagggaggccagcagcttcttggtgtacgggttctccgggtgctgcataatctggtcggcatcgccgtgctccacgatctggcccttatgcatcaccatgatgcggtcggcgagcatatcgaccaccgccaaatcatgggtgatgaacaggcacgcgaagccgatttccgcctgcagtcgcttgaacagctccaacaccttggcctgcaccgacacgtccaatgcagaagtcggctcatcggcgatcagcagcgacggcttcaacgccaaaccacgcgccaaagacgccctctggcgctggccgccggacagctcatgcgggaaacggttcatgtaggcgcgcggcagctggaccatctccagcaggtcgcccacatagttcttggcctcggccacggaaccgtacttgtggtgcacgagcagcggctcggccacattctccgcgatggtcatcagcgggttgaacgaggagcccggatcctggaacacgaaaccaatgtccgcgcgcttgggcttgaagtcacgctccttgacgccgttcatctcgatgccaagcacgttcagggagccgccggacaccttctgcaggccggcgatggcacggccggtggtggacttgccggaaccggactcgcccaccaggcccagcacttcggagcggtggatggtgaagttcgcgccgtccacggccttgaagtcgggctgcatgagatggcccgggtacgtgatggtcaggttcttggcctcaacggcgatcggctgttcgcgccaatcggccttgcgctcgatcggcttgccctcgcggtcgcgcacgaccagcttctgaccgatgcgcggcacggcacccagcagtcgcttggtgtagtcgtccttcggatggtagaagatctgctccacgtcgccctgctcgaccacgtggccgcggtacatgacgaccacctggtcggcgatgtccgcgatcacgcccatgttgtgggtgatgatgagcacggaggcgtcgaactcgtcacgggcgaggcgcagcaggtcgagaatttcggcctgcacggtcacgtcgagggcggtggtgggctcgtcggccagaatcaggccggggttcagcaccaacgccatggcgatgacgatgcgctgcttctggccgccggagaactggtgcgggtagtagtccacgcgggtttcggcatccgggatgccgaccttcttcaggatgtcgatggccttggcgcgcagttccttcttgtccttcatgccgtgggcgcgcaggccctcttcaatctgccagccgatggtgtacaccgggttcagcaccgaattgggctcctggaacaccatcgcggcctcggaaccacgcacttcgcgcagctgttcgccgctcagggagagcacgtccagcgaatcggagccatcacgcttggacaggtagacggcaccggaggtggtggccgtctccggcagcagcttgatgatggagcgcgcggtcacggacttgccggaaccggattcgccgaccacgccgaccacggtcttgcgcggaatggtgaagttcacgtcctcgacggccttgatggaaccggcgtcggtcatgaaggagacggacaggtccttgatatcggcgagattcttgttgtcttcgctcatctctcactccttgccttccggcttgccttcgccggtccattcggaggcgacgatggtcgggtcatggtcggtgacggtggccggcgggtcgacgttcgcgtcgagttcggcgatcacctcgttgcgtgcggacggcttctcgtttgggtcgacggacgtgtcttcgatcgatccgaccacttcgccggcggacttgcgggcgcgcagacgcgggtcggccagatcgttgagcgattcgcccacgagcgtgatgccgagcacgataagcacgatggcgatgcccgggaacacggcggtccaccagatgccggcggtcacgtcggaaaccgaacggttcaggtcgtagccccattcggcggcggcggtcggctcgatgccgaagccgaggaagcccaggccggcgagggtcaggatggcttcggacgagttcagcgtcaggatcaccggcagcgtgcgggtggagttcttgaacaggtgcttggtcatgatgcgccaggtggaggcgccgaccacgcgcgcggactcgacatacgcggattccttgatgcggatcacttcggcgcgaattgtgcggaaatactgcgggatgtacaccacggtgatggagatgccggaggccaggatgccgctccacaggccggactggccgtgggagatcatgatggccatcagaatggcgagcagcagcgaggggaaggagtagacggcgtcggcgatcatcaccaggatgcggtccacccagccaccgtagtagccggacaccagaccaagcagcacgccggcgaagatggagagcagcacggccacgacgatggcgatgacggcggtgcgggcaccccacaccacacgggagaacacatcgaatccggcggcggtggtgccccagatgtgttcggcggagggcgcggcctgcgccgggaaggacgtgccgtcggcggccttgatctgggcgtggccgtagggggcgatcagcggggcgaagagggccacgagcaggaagaacgcggtgatcgcgagaccggtgatcagcatgcccttctgccagccgaccgccacgcgcagttccttgatgattggaatcttggtccagaacggcgtcttggtgctgacgttgagcttggtgaggcggtcgtcaccggggacggtgatcttgtcggaggatgcggtggtcatctcagtacctcactctcgggtcgataagcgcggcgatgacgtcgacgaggaagttgacgacggccacgatgatggcgataaggatcacgatgccctgcacggccacgaagtcacgggccttcaggtactgggacagcatgaagcccaggcccttccattcgaaggtggtttcggtcaggaccgcaccggcgagcatcagggcgatctgcatgcccatgacggtgatgatcgggatcagggccggccgccaggcgtgcttgttgagcaggcgcttttcggagacgccgcgcgagcgggcggcctcgacgtagccggaattgtaggtggagatgacgttggtgcgcaccagacggatgaacacgccggcggtcagcaggcctagggcgacggccggcagcacggcgtggcgcagcacgtcgacgagcacgttcatgtcgccgagctggatggcgtcgatgatgtagaagccggtcggcgataccagacgggtgaactgcatttcggagttcaggtcggagcggccggaggctggcaggatgttgagccagacggcgaagatgagcttcagcacgaggccgaggaagaacaccggggtggcgtagcacaggatggcgaagatgcggatgccggcgtcggcggcacggtcgcgtttgcgggcggcgagtcggcccaggccgatgccgacgatcagcgccacgatcagggcgaggaaggccagttcgaatgtggcggcaccgtagtgcgtaaggatgctgatcaccggctggttatcggtcagcgtcgtgccgaggtcgccgtgcagcaggccgccaagatagtcgacgtattgcacgatcagcgggcggtcatagccggccgcgtggatgcgctgctggagttcggcgggtgtcaggcggccgcccagggcggcggaaatcgggtcgccggtggcgcgcatcacgaagaacacgatggtgaccagaatgaaaacggtggggataatgaggaggaacctcgtcagcacgaagcggaagaaactacctgacagtcggttcttcttcgtcttggctttcgccggagtggtgctggaggtcgctgtggcgctgtctgacacgcgatgctccttggtgttggtaatcggtatataaagcaataaaggctcccctctccgaggggagctggcggcgaagccgactgaggggagtcatacgagttgggctcccctcagtctgccgtcgccagacagctcccccctcaaagaggggagctcatgctggatcagcccttggtgacggaggcgtagcggaagcggaaggaagcgtcgagggtgacacccttcacggaggtgccggtgacggcgacctgggcaccctgcagcagcgggatggtggagaggtcttcggtctcgagtttctggacctgcttgaggatgtcctcacgggcggaggcatccttctcgccggcctgcttgacgatcaggtcgttgacttccttgttggagtagccgttgttcacgaagttgccgtcgcggaagaacggggacaggtagttgtccgggtcggagtagtccgggaaccagccgagctggtagaccgggtacacaccgtcggaatcgtcggtgaccacgcggtccttggagtactgggtccattcggtggactgcaggtcgaccttgaacaggccgccttcctcaagctgggacttcaaggccgcgtactcgtcggcggaggcggagccatagtggtcgctgttgtactggagcttgaggtcgaccggggtggtgacgccggcatcggcgaggaccttcttggccttctcggtgctcggcttgccgttgccgtcgccgtaggcggacttcagcgtgtcatcgtgaccggccaggccgtccgggatgaaggagtacatcggggtgtaggtgcccttgtagaccttggtggagagctcttcgcggtcgatgaggttggcgacggcctggcgcacggccttggccttgttagcgtcggcgtcgggctgggattcaccgtagggctgaatcttgaagttgaaggcgatgaagcgctcctcaccgcccgggcccttgacgaccttgaccttggagtccttggagaggtcctcgatgtcggtcgggctcagggagcggtaggccacgtcgacctggccctgctggacggccatcttcaggttggaggcgtcggcgaagtacttgacctgcacggcggagttcttggccggggtcaggcccttgtaggagtcgttcttagcgtaggcggcggactcgttgatcttgaaggcggtcagcgtgtacgggccggcgaaggccttcttggagacgatggtgtcggcgtcggtgagcttgtcggcgtcgaaggtatcctcatcgacgatcgggccggcgggactggacatgacctgcttcaaagtcacgtcgaaaggcacggaatccttgaacaccacggtggtgtcgtccttagcggtcacggattcgacgttggcgagcagggagctcgggccgttcgggtcgttgatcttcttgatgcggtcgtaggagaacttgacgtcggaagcggtcaggtcgttgccgttggcaaacttcaggccgtccttgagcttgacggtgaattcggtgccgtcatcgttccaggtaccgtcatcggcggcgatgtccgggctcagctcggaggtgttgtagtcctgggcatacaggaacgggaacacctggatctgcacggcgtaggagccgttgtcgtaggagccggcggggtccaggctggtgatcttatcggtggtgccgatggtgatggcgttgccggaatcggcgcctgcggtggtgtcatccttcacaccgccgcaggcggtcagggatgcgatggcggccacggagacggcggcggccagaatcttcttggaattcaacaggaatcctctctcataacttgtttccacgccatcactgcgggcgtggattaccgcctgactatggtgaggatgtgttactcctgcgtttccacagccatcgacttatgtttcgcttgtggcgaccatggccggttttatgcggtatcgagcagtattacggattcttgtattacgacgtgaataacgttcaaatggtgagatgaacatgctatcatgtcaccatttgaacatgcttgtagacgaatgctttccattcgtcaaccggtcggcctactgctacttgagcttgcggcccgcgcaccacacctgttcgaccgtccaatcggtcggatcggcaaggttgaaatcggcggcgaagccgggggcgatgaggccgataggcaccccggtgaccgggttcggccggtcgaagccgaacgccttggccggagtcaacgtggcggcctcgaccgcgtccaccgggctcaggcccagttcgcacaccgcgcgacgcacggcgacttccagtagcagggtggagccggcgatggcgccgttggagaccaggcgcgcatgcccgtcgaccacgttcacatccagcgcgcccaacttgtaggcaccgtccgggcagtcggtcgcggccattgcatcggtcacgaaggccgtacgatgaggcgcgaaccggagggagaggctcaccatcggatcctgcacgtgaaatccgtcgttgatgagctcgatggtgacgcgcggatcctccacagcggccggaatcggaccgggctcacggtgatgcaagccgttcatcgcgttgaacatgtgggtcatgatgcccgcgcccgcgtcgaagccggctttggcggtctcgtagtcggcgtcgcagtggcccacggccggcaccacgccggcagcggcgaactggcggatggcggagatgccgtggggtagttcgggggcgatggtgatctggcggatgcagccaatcttgccgttcgccgcgcctgaagcctcaagcatgtcgtcgacgatgtcgggtaccggatccttgagacattccgggtcatgtgcgcccttgcgggccagagccaggaacggaccttccagatgacagcctaggatgtcggggcggccggactccatcttggcgcggacggtgcggatgttccggcagatcacgtccacgggattggtgatcagcgagagcacctggcgcgtggtgccgtgcacggcgtggccggcccgcgccacatcgatgccatccgacccgtcgtcgaagctcttctcccatgcgccgtgcgcgtggatgtccacgtagccgggggtcagaatacggccttcggcgtcgatgaccgcgtcgcgatcggccgggtcgagccccaccgtgcggcagtagtgctcgaaggcctcctcccccgtgccggccgccacgatgacgccggcggcatcggagacgacccaatatccgcgccgttcgccgcacgcatccaccttgcgcgcgttgcgaatcgccaccggagccggcttgccctccagtgccgcggtcacgcgcgagactatctcgttcctatcagacatgttgttctccttaccgctcatgcgctcccgccaacgggagctggctcgcgaaacgagactgagggtggtccaatcgggaagcaatacacatatgccgccgccgataaccaccctcagtctcattacattcgacagctcccctcacacaaagagggaagccagcacacgataactcagatgccctgccaggccggcttgtgggtgtaggcgtagcgatagtagtccttgtggcgcagacgagaggcggcctcctcgtccacgataatcgtggcgtgcgggtgcatctgcagcgcggaagccgggcagaacgcggacaagccgccttccaccgtctcctcgatggcttcggccttgccggcaccgaacgccagcagcacgaggtgacgggccttcatgatcgtgccaataccctgcgtgatgcagtgggtgggcacttggttgatgtcgttgtcgaagaagcgcgcgttgtcgatgcgggtctgttcggccaaggtcttgacgcgagtgccggaggccaacgaggaaccgggctcgttgaagccgacgtggccgtcggtgccgatgccgaggatctgcacgtcgatgccgccagcggcttcgatggcacgatcataggccgggccggccagcgcgactttgtcgccgtcttcgagcggagtgccattgagtacgtcgccgggcacatggaccttggccgggtccaggccaagcggttcgaccacggtgcgatggatggtcgcatgataggactcgggatgggtcagcggcagtccaatgtattcgtcaagcgcatagccactcacttgggagacgtcgattgactcgtcatgcacgatcttggcgagcgcctgataggcggccagcgggctggagccagtggccaggcccagcacggcgtccggctttgctttgatcaggtccgccacgcaacggccgtagatctcgccggcctcggcttcgttcttgacaatgatgatttccggcatcggtttcctccagttccgtgcggcccgcccgatgcgagtcgctgtaccgccgcccgtcttgcggataatggcaacatccttgtcacgtccgggtgcgcgcggcgttccaaccaccgttcggcgtagcgccgattggtgattcgctatttgttaatgatagtaacaattttggacctcatgaacactcacggtgtttcctgacgcttcacacaggtacactggaatttattagtgaagtttcataacagtttcaacgacgaaattgcgcttcaccgtctaagctgtgtatggaacaacaatcgccgtccactcgctcaccatcaggtaggaggaaacatgtcatatctcggtctcaacacaacgaccgacgaccatgcggccaaggcttcccccgccgatgtgcgccgcaagaaccgccaacttatcttcaggttgttgttccccaccaaccagtattcgcgcgccgagctcggccgacgcaccggattgagccgcgtggccgtttccgatgtggtcggtcggatgctggaggaaggattgctgcgcgagaccggtcaggcacccagcggcggcaaaggcaaacgaggcacactgctgagcatcgatatcgatcgactgcgcatcatcagcatcgacctgacgcaggagcacctgctgcacggcgcagtcaccaatctgctcggccagccgctgcgtcacgccgaagtcaccctgaacaccggctcattcgtttccgtggatgtgatcatcgagctcattgagaagatgctgggcatgtccgatggcgaggtcatcggcatcggagtcgcctcccccggcgtggtagacaacggcgtggtccgctcctccacgatgcgcggctggaacaatctcgacctgtccacgccaatcgccgaacatttcggacttgaagtaaacgtcagcaacgacgccaccgcagccatgctcaccgaacgtttctttggccaaggcgggccgaatatgcttttcgtgcgcatcgaaagaggcatcggttcggcgattctgctctcggacacgccggtaatcggcgaactgcacgcggctggcgagctcggccatatttccatcgatcttgacgggccgctgtgcccttgcggcaagcacggttgcttggagacgatgatttccggaaccgcattgaagaagcaactcagcgcagcagacgtggagcagcatcagggtatccttgctcgggcgggccgctatcttggccaagccctggccatgcctgtgggccttttggatatggcagacgtatgcgtctatggccagccgaacatcatcaacgcgacgttcatcggcgcggcccagcaatatctggatgccgccacatcctcgtccttccacaaacacacggtgattcggcgctgcgaatgcggacctgacatcaccgtacagggcgaggccatcgccgtggtcttccaacacttggccaaataaaagccggtcaccccggcaacgaaacgcgcaagaccaagcgcggcacagcacgacataaagcgatataggactgcgcgggagatggggcctcggagacaaatctgaggcctcatctcccatgccccggcactatgccaggctacgccgccatggcggcaccgatggctccgactggttggccgacaggtgccagacgtagccgggccggcaggtccagcgtttcgaggaatcggcattgcgattcgcgccggcgcagctcagccgtgatcacctcgaccaatggttcgccggttttggccatgccaccgcccaagatgatgagtcgcggatcaacggactgagccaggatttgtatggtgtcgccgatggcgcgcactaccatgtccagcacatcgacggccttggcctcccgctttttcgcgcgacggatcaggtcgggcatcggcgggtcggcgttgggccacagacgccccacggatgcgcccgagcagactgtttccaagcatccgtattgcccgcaagggcacttgaggcgatgaggttcgactgggatatggccgatttcgccggccgcgccgctatagccatgcatcagcacaccgttttcgacgatgcccgcagccagtccggtgccgaagttcaggaacgcaatggtaccggccatgccgtccgcaccgcccaatacggtggccgcgccgacggcggcggcattgacgtcgttttccacatgggccggcacgcccgaacgctgcgagaccaacggccccatatccagcgagaccacgtcgagattcacgatattgcccacatgcccgctggccgaatccaccgtgcccggggtaccgataccgatggccctcacctcgtcaaaacgctcacccgctgcctgatgtgccacagcgacgatgtcttcgatcacggcatcgttgccatgcctggcgggaatacgggcggaatccaataccgtgcccattgcgtcgaccagcacagcttcgatttttgttccgcccacgtcaacaccgattttgagattgttcatagtgttctcagacatcagtcctcccctgttcttcatcgaacgtttcgcttgatatcagtgtgcatccgactattgacaaccatcttaacaaattcccccaagacgacactcacatgcacgacacaccgaatgacatattgattgcgtcaatcaattaacagcgttaatatcttaatcaagttcagattcaaagacgagcggaacaactcgcaacggtgcagacaaggaggacttaagaccgatggcaacaaacaccacccatgccacttcccaagccagtgtctccgaatccaaccgctcccgcatcgtcaagcacctgtatcacaacggcatcagctcccgcgcgcaaatcgccaaggcactggaactcacccccgcggccatcaccaaaatcaccgcacgccttatcgaggccggcatgattgaagagaccggcgatttggaaggttccaagaaccgccgttccatcggtctcaaactcgacaccacgcggttccgcatcatcggcatcaaattcgcccgctcgctggtgcagatcggcgtgttcgacctgtgcggcaacaccctgagctttgaaaacctgcccacggtgtacgacaacaccatcaacggcaccatcgtcaccatccaccagcgcgtcgaacaactgcttgacaacgacccgtccattgtggccatcggcatggcggtgcccggcccctacctgcgtaacgtaggccgcaccgccgtggtgtccagcatgcagggctggcgcaaaatcaacttcatcgacgaattcgccaccgctttccgcgtgcctgtgttcatcgaacaggacgcccgcgccggagccctcgcacattatctcttcgacccgtcggtgcacgccgacggcaacctcgcctattatctggtcggcgaaggcgtgggcctcggcgtcatcgacaacggtcgtctcatcaacggcttcctcggtgccgccaccgaaatcggacacatctccatcgacgtcaacggccgcccctgcgattgcggcaacgtcggctgccttgaacgctactgctccacccccgccattcacgacatgcttatcgccgatggcaccgtggttcccggcgcggccgatatgacccacaccgaagccgcccgcgccctgttcgccaaagccggcgacggcgacgaagcgtcaatcgccattgtccgcgaagtcgcccgatacgtcggctacggatgcgtcaccatcttcaatggatacaatcctgagcacatcatcatcggcgacatcgtgtccgaagccggcccgatactgctcgatgaggtgcgcgccacggtggccgaacgggccatccccgaaatcaatgcctccacttccatcagcctatccaccctgtccgccgacgcggcggtctccggtgccgcagcagtggcggtgacccaattcctcgaacacccctcggtgttcttcgacgtctcctaaaccaagcgccgacatcacaagatgttccatacgaaacacccggtaaaagaaacaaaggaaaggaaaccaaccatgactaccccgatcgttctgagcctcggtgaactgctgtgggatatgctgccgagcggcaagcgagccggcggcgcccccgtcaacttcgcctaccacgcgatgaagaacggcaccgaaggctgggctatcagcgcggtcggcgaggatgagctcggcgacgaactgattgccaaggccaacgaggccggcatcaacaccgtcatccagcgcaacgcctggccgacctccaccgtcgaggtcgcgctgaagaacggcatcccggagtacaccatcgtcaagggcgtggcttgggaccacatcctctacacccgccagctcatcgacgtggtctccaaggctgacgccgtctgcttcggcaccctggccctgcgctcccccgaatcgcacgccaccatcacggagctgctcaagcacaccaagccgggcgcgatgaagttcttcgacatcaacctgcgtggcgaccactactccaaggacctcatcgaggaactcctcaaggcggccaccgtcttcaagatcaacgacgaggaactcctgctgctgcgcgacatgttcgacatccgcggcacctccggcgaagacgcctcccgctggttcatcgaggaattcggccttgactacgtgattctgaccgccggctccgcctactccaccatcatctcccgcaagggcgaggtctccacgctggatactccgcacgtcgaggtgaacgacaccgtgggtgcgggtgactccttctccggcaccttcaccgcccgcatcctgctgggcgacacgctggcagaagcccaccgcaaggccgtcaacaccgccgcctacgtctgcacccaggccggtgcctggccgcagtacccggccgagatgcccgactatctggctgaaatcggcaagtaatccacccatccccttatccgccattcgtgcgacttcacgaatcgactgatcgcaaccggtgagattctccgaacaggaaatctcaccggtttttcatatggtgcgctcacactcatgctcttcacatcctttcgcgtgtcatgaactaaagcggtttagaataatgctgttcccttgatatgtatatccctcaaacaaagaagttgaatttatgacgaccaccgcgataccgaagtcggtctcggatttcatgcagcacatcacggacctgtgtggcaccgaacacgccgcctgggccgagaacttcaatgcctgctttgccgacaccctgaccaccacggtcaaacggcatgacgacggcaccacattcctgcttaccggcgatatcccggccatgtggctgcgtgattcgaccgcgcaattgcgcccgtatctggcccttgccgccgaagacagcgatattgcgaacctgatcgccggtctgatacggcaacagttccgctacatcatcatcgacccgtatgcgaatgccttcaacgaggaaccgaacggcgcctcctgggacaaggacgaccggtccgatttctccagcccttggctttgggagcgcaagtacgaggtggattcgctgtgctaccccatccagttggcttggatgctgtatgcgaacatcggcaacgccgatcacttcgatgccgaattcattgccggcgtcaagaagattcttgacgtcttcgagaccgagcagcatcatgaacgctccccgtatttcttcatccgcgacacggacatccccaccgaatcgctgagcaatgacggcaaggggtcgccggtggcgtacaccggcatgacctggtccggcttccgccccagcgacgacgcctgcacctaccactatctggtgccctcgaacatgttcgccgccgtggtgatgggctatctggaacgcatcttcggcggtgagattctggatgacgccgatatcgccgcccgtgccggcgagctgcgccgcaccatcaccgaaggcatcgaaaaccacgccaagacgacgaaccgcaacggagagacaatctacgcattcgagaccgacggcctgggccacgtcaatatcatggacgacagcaatgtgccctccttgatggcggccccttacttgggatactgcgcaccggacgatccgacgtatctggcgacccgacgtacgctgctcagcgacgagaacccgtactactacgagggcgagtatctcaagggcatcggctcaccgcacaccccgccgcgctatgtgtggcccatcgccctgtctatcgaggcgatgaccagcgacagcaaggacttcaaggcgcatatcctcgaccgtcttgtaaccaccgacgccggtacacatctcatgcacgaaggcatcgacgtggatgatccgaccaagtacacgcgcgaatggttcagctggtcgaatatgatgttttgtgaactggtcatggactatttcgacattcgtgtgaagcactaagacgtgcccgctgaatgctcattgcgcacccaccgcatgttcttgttaaggaaaggaacaatcattatgaccaataacccacgttatgcactcggcaccgaagccaaccgcattttcatggcttccgaaacctatgagctgctgaagttcggcaaaggcttcccagcgccgaacggcggttccggctggctgaacgccgacggcacccttgacccatcccacggcgtcgaaacgtggatcaccagccgtatggcccatgtgtattcgattggcgacatgctcggatatccgggcgccggggagctggccgacgcggcgctcaagggattgaccggcattcttcatgacgacgagcacggcggctggtacccgcaggtgttcgcggacggcacccatgctccgggcaaggtctgctatgcgcatgccttcgtgattctcgccgcgtcctctgccctgctggccggacgtccgggtgccaaggaactgcttgatgaggcacttgccacgtatgacaagcatttctgggatgacgaaatcggtttggccgtcgatacttggaacaccgaattcaccgagctcgacccgtaccgtggtctcaacgccaacatgcataccaccgaggcgttcttggccgtggccgacgccaccgggaacaacacctatcgcgtccgcgccggccgcatcatcgaccacgtcatcgaatgggcggcacacaacgagtggcgcatccccgaacatttcaaatccgactggtcgttggacctcgaatgcaacgccgacaagaaggacgaccagttcaaaccgtatggcgccacgccgggccatggcatcgaatgggcgcgcctcatcgtgcagtgggcgctgagctccttcgccaaccgagacggcgcgcggccctacatcgacgccgccgagcacctgtttgcgcgagcggtggacgatgcgtggaacgcggacggcgcggaggggctcgtctatacgaccgactggaacggcacaccggtggtcaccgaccgcatgcattggacggccgccgaatcgttgaacaccgccgccacgttgcacgccgccaccggcgaggaacgatacgccaactggtacgccacgttcgcccgctacgtcgacgagcacgtcatcgaccacgaaggcggatcatggttccaccagcttgacggcgacaatcgcgtgatcggcacggtctggccgggcaagtccgacctgtaccacgccttccagtccacgttgattccgttcctcgacccggctgtgtccattgcgacggccgtgaagaacgcggcgcaaggcgatacaattcgtgataacgaataggcaaggtccgacggaaaactcccgtcggaccttgcctattcccgtctcatgccgtttctatccgctccaccaacaggatgtagccgtagacgaatcagacacaggaaagtctggtactgtccctgatcacgagcttgggagtcaggatgcggcggttgccactgaccgtctcaccgttgatgaccttgatcagcagtttggcgaccttcattccatacacgctcgggtctcggtgtaccgacgtgagcgatggatagatcgatacgcacaagaaactgtcctcgaagctaacgatagccggaagattatgcggatatcgcggtgcgtccggattcctggacggcgtattgagcagccactcggtaatggcatgcagactggctgcggccaatgtctcattctcgtagatgaaagcggtgggcggattgcttccacacaacattgcaagcgtcattgccgaggcgatgtctacgctgaagttggtgtattcgacacggatcgactcaagatcgcggcgctttgcgaattcacggaacattcgttcgcgatcacgcgaatagtcaagggtgcggtcccccgataggtatgcgatacgccggtgtccgcatgataccaaatgtcggagaatcgtttccatggcgcctgaatcgtcaatcgacagcgagggcacgatgttctcaggatccggacctcccgcaagcacagccggcacaccgagccgagcaagcagcgcggggcgcgggtcgtcagcacgcaggtcaacgaggataacaccgtcaacacgcttacgtcgagcccaatcctcgtagaccgacaactcttccctgaccgatgagcagggccgatacaacagaccgtaacctttgagactcagggattcatgcaaaccggtcatgaaatgcagcatgaagccttcgtcccgaagaccgtttgaggagcgtgccggggcgaagccaaccgtcatggtcttcgatgagccgagcgcctgcgccgcatacaccgggctccagccaagcttcgacgcagcctctttgacgcgccttttagtctcttcggagacgccgggacgatcgttgatcgcgaacgataccgcggtctgcgagattcccagctcgtcggcgatgtccttgaggcccacccgatgcggtttggcgaccggatgcgcggctcctgactccaagtggagggggtttgtgttcatcgtcggctccgtgctcgtcatcggcgtactctcccgtttcgcgatatgttggttccctgcaatggggaacctcaaaaaacggacttcgatagcactcaccattgcatgcatactgcatgaatcagtttagtatatggcatggcccacatcgatacagaacttctttgccctcattccccacaaagtggaaattcgcacggcatgcattcgatacgggccgagatgccgcctccgggtaacaccgatataccggctcacccggaagcgatgtattcgtcagaacaaacagcggctcctagaggatcgcgccgtctgcgccacgtacctgcatctcatagatacgagccgcagtgtcgctgccctgcgtcggcttgttaaccaccaacttgacgtaacgggcattgaccggggcaaaggcgttggacgtggcaccttcagtgttgcccttgaccaacgcgacctgcgtgtattcggttccgtcctcactgacctcgatcgcatattcctgcgtgttcatgctggcatcctctccaccggcttgagcatgggaaatatcgacttgagagacggtcttgggtgcgccgagatcgacaacaagctcatgcggagccgggccggtgacacaccacttggtcttcacgtcgccatcaaccgcgaactcaggcttctcgttgccgttcgtgaacccgtcggcgctgacctgagcgccttgagagagcaacacaaggtccatgacatccgcggagacgacaatctgccccttcagcgtcgcagtggcctcgccgctcttgttcttcgcggtgatctcaacgtcatacacgccctccttgtcgtaggtgacggtgacggacttgccagtggcatgctccttgcttgatccgggcagaaaccaggcgacctcggcagtgttcttcgagcttgcggaggtgaacgtcacttcgtcgcccacattcaacagtgtgcgcgaagccgtggcaccggctttcggcttgctgttgtcgggccaatccatatcggccttggcgctcgtgccttgcgtaccataacggtctaccggcacaatctcgaacgtggtgttattggtctcgcctacacgtgtcagtgcgtttgcatagaagttctcgacgtttgagacgccaaggaacgaacggctcttgtcctcgttgatctggtagatctcgtaggccggagccttgccatcggtcttccatgaaatgcgggcaccggcatacagggcgtcatcgtcgaactcgctgtcatcgaccttgacttcggtgaccttgccgagctcggtctcctcggagccatccttgagcgtgatgttgcccagcaacagctcgtagccggtcttatcctcggaagactggtaggtgaagtcgatgccggtgagcgtcttgttcgacaacttggcgatgtcgtagtcgatgacaccccaatcgttgccgaccttcttcttgccattgacggtttcgaccgagccatccgcgaaggtcagcacggccttaagatcggtatcgacattggccttggcggcaatcgacagcgtcggctttgcccctgtctcgacgctcgccgagtacagcttgaccatggtcttgccatccttgacgaccttgcccgagaacttcagtgacgatccgccgtaccaggcgtcggcatcgctgtaatcggccttggtcttattgccgccctcatcggcgactatccaacgataggtcggctggatatcgctgacggaacggttgttccaatccatcttggaaatctgcttgccttcacggaagaagctgtagcccgaaccgttattgaagttggtcacaaacggcagcgaggtgacagccgactgctcgaccacgtaattggatacgccggtccacttctcatcgtcctcatacggagtgctcaccgatggattgccttcatcgttaacccatagacgactctcgtttttgcggaatgtggtcggattgccggcggaccaatatgcccagctcgggcagtacaggccgagagaggtatgcgtcttgccatccttgccggcgaacaggttccatttgaccggggtgtcatagccgtcggcctgcacatcgataccggcgtacagagaatacgggtcgatgccgagttctttggctttggttgcggaggcggcaagcaggtcgtcgccggccagtttgtcctcggtccaccagaagttcagaaacatctcatcggctatcggatgatcgccatccgtcatgtacatcgagttttcatcggtaagggcattctgccaatcgattgagccgtccttggtcatcgagtcgtaatacacgacacgcaggtcaggggcctgcttcttgaggtaggcgatgaacgcctgcatcttcgtcgcgtagtcggctcccagcgaggtttcgttctcaccctctgtctcctggttgatgaaccagccatcgaaaccgtacgtggtggcgacctcaatgagcttgtccgccacggggaacgagccatcggacttttgggcaagcgtctggtccagccattcgaccttgcctcctgatacgttctgagggaagaagactgtgcccagcaccggcacgccgttggtatggcccatgtcagtcacatcggggctcggcggcacgatgatgccttcgcccgaagagccgccccagtacacaagctcgtcaacgtactgccaatacgagaacgtgttcgcgttcgcggtgttcaggccatgcggggcgttgccgcttgtcgaggagttcatgatcgatatggccatcaccttggtatcggtgttctgcgtgtcattgactggtttgaggtcggccttgtccacacgcttggccaacggcacagtgctcacattgtatgctagatccgggtctttatccgcattccacttcagcagatcttccgggaaccagtaggacgcctcgggccggttgcccagcacaagctcctcattctcgttctccggtgtgatcgtgtacttggtcgcggaggtgcctcccgagcatgccgccagcgacatcgcaagcatcgcggcaagagaggccgccagcacccggcgccacgtcattgtcttgttcatcggtttcctttcctgttctccccgccgcattcttgcgtcgggacatatctgtatgggcttggggcccgcgcgcctgttcagtcgcgcagcaacacctctgacaacgcctcgatgacgccttgcggcatatgcgaggaaaaccaccgcggctccccgtagtcgcccggcggcatttccagcgtgtgcagggtggcgagcgcgcgtatgccttcgcgctgaacggattgccaggcccgttccttggtgaaatagtgcatcttggcgtcggcgagtatgtcgaaggcgtctcgctcgaccggcgacggcgcaatcgaaagtcctccggccacgtgaatcgtcaggtcgccgtccacattcagagcgccgacctcgacgcttaggcttaacgtatccgggtcatagtcgactgtgccgctgattggccgaccgccatggcgtatagagaccgatgccggcaaatcgccgtccggctgttccacacctcgcaatatgagacgccacgcgcgtgagctcggcaccagcgaactgtcgccgtcaagcgcatgtacggtgaacatgccgtgcacccaatcaaacgtaagacgggtcgaagcccattctccgccgaccgactcgccgtcatcctcccatagcgtgaacgtgccatccgcgcccggaaataccagtacatcgaatgccgacgggttggaaacatcgttgagtggagcgccgtcgagacgttgcatcggtatgatgcctccggctttggcgaataccgggatacggtcgagagtacgccatacaccgagcgtgcggccctccggattgtcggctacgtaacgtcttccgtcgaagaagtcgaaccattggccgactggcagccagacctctgctttggcacggcctgcggcctgatcggccggttcgagcactggcgaaacgatcagctcggtgccgaactcaaattccgtgggcacggtaccgcccccgtggttccagtacattggctcgaccaacggcagctcgtcataagccgcgcgacggttcatcgtatgcaggtacgggatgagtctatggcgcaaacgaagtgcggctatcatcgcctcgcgagccggggagtggaagttccatggctccttgccgttgaatggggagtcggtcgagtgcagacggttgatcgggctgaacgtgccgagctggtaccatcgggtctccagctcctcgtcccggtagccgaacatatgcccgcctatgtcatggctccaccatccgtagccgatgttcgaagccatcgtcgtaaagtacggctggaatttcaatgattcccacgatacgaccgtatctccggagaatccgaccgggtaacgatgggagccgtaaccggcatagcgcgagaacgtgataggccgccgacctcgcgaggccgagtccaggaagtgcaggtggttgagcatccacaacgggtcaagtcccggctggcgagtcacgctgccttgttgccagtcgatccaccagaaatcaacgccctgagattccatcgggtggatgatttgatcgaagtaagcggacatgaacaccggcgaggacgcatcgaactcaatcgagctgccggacttggaatcaacgcccactgcccgagccatgcgatcgtagcagtcctcgaacgcacgtatgccgtctcgcggatgcaggttaagcgtggttttgagaccccgctcatgcagccatcccagaaaacgttccgggtcggggaacagggtgcggttccaggtgaatccggtccaccctgagccatagcacggatcgggatcggtcacatgccagtccatgtcaagcaccgcgacggtgaaagggatgccctctgtttcaaaacgttctatcagcgtacgatattcggtttcgctgtaacgatgatagcgactccaccagttgcccaacgcccagcgaggcaatagagggaccggtccggtgagctggtgatagtcatgcagtgcatcgtggatacgccgcgcgtatccgaaaaaatacagatcggtggaggaggccggcttacgggccacccatgagccaaatggattggggctgccattgacttcagatgcttcgactaccagattgtcgtctgaatcgtcaagaatcatccaaccgtcacccgacagcaggccgggttcgagttcggtcggaccgtcaatctggtcgagggttcgcacagtgccgcccagattggcattctgagcgtcgccgtaacgccaagtgttgtgttgtgacagcgaatccttgacacttaccgccaagccctcggcagtgaacgggcctccatcataaacgatacgtaaccgttcggtctcaatatcgagccagccatcggcatcacggcgaacagtgtatgccgcaggctctccgaaatcacggttgacgacgctttgcgttcgttcgtcgacgaagacgccggcatccgaccattcgaaacgcaccaaagagtccgtcagaatcgaaatacgccaccgatccccccgaatgatggcttcagggcgggccgccggatcactattcggcggctgaccggtgaacagcgtcgcatctaccatacgtcgtctcccccattggatgcgcgatgtgtgtgaacaatggcgcaccgataccggtacgtaccggtgcgccggatgcgcaaatgtaatgagtgccaacatcttgcaaggaatagcatcgtctgttatagaaaggccggccgccaagttcaagccgaggagagccggccccttcgaagaggaacttcgaacaattattcggttatttcgatgtctggaggtccggacaatgacgaacggtttgtactacatcgtatgaccgttcgtcaatgcgtcatcattcgcctttatgctcgaaagctggatcggacaccgcattgtaggcatggcccgccacgagttcgacgcgctcaaggcggacgatgccccgattggcgagcttggccggattgccagcatcaagcgaggtgataacgcatggcctttcaccctgacgattcaagttcgcccatgcctcgaagagcgagccgcccggagcttgagcagctcgcatgagcgggtcgccctgttcatccacagggatgacaatcgctgtcgtgcgtggcggtgcaaccgtatcccggtgggtggcgattgcgtctcggaacgccttgccaacgtcggtgagagtcccgtccacatcgaacaggccaagctggtgctcgaagaacgggaaatccgagaatgtcgaggggatgcggtgagagcaccaccacgtgacgccgaacacatcaggacagtcagcaatcgcatcaatcgagcgccggcagaactccggagcatcggcggaatcgatcacattgccaggtgctccgatttcctgtacccacaccgggcgatgcggatcagcagcgaatgccttggatagttcaacgagccaggccgcgtgtcccaggctttcgcatgacatcggaccgtaatgctgtccggtaccgttgaatacccaggagtgcacggtggtcacgtcgcccttgcatgaagcatatctaggcaggaaggcatggccatcggcgtaccagattgcgtcgttttcgctatgcgcgattagacggccatcgcgccggcatcgcttggcaaccaatccgataagcgtatccagccattcaccaatctgctcggcattggccggcatgcgtctgggatgtgtggcatcagtgaactggttgcactcgttgcccaacgtaaggcccgcaaaggccttcatgtcagacaacgtaccgtaaatcgcctcagtcaacgcactctgggcttctatcgccgactgatcggtgaacatgctgccttcatgccaggagaccagccaggaaggcacgaaatcgaaactcgacaagtgcccctgaatcacatccacatagacatcgagaccggcttctccaccgagttcgaccatacggcgaacatctgccaatgccttgggattaatccaagttcgattaggctgcagcagcgtccacaggggaaatatacgcacatgatccgcacccagctcggctatctgcgccaaatcccggcgtatgacttcccatttgggattgagccaggtgtagaaccattcgcccgaaggcgtgtagttgactccgaatttcatggtgaacctttgattattccttgaccgatccagcttccaggccattgaagatataacgttggaagacaaggaagaagatcatgatcgggacgagggcgattatggtgccggctgcgaccacacgcggatcggacacgaaggtgccctgcagacggctcatgccgagtgtaagcgtgtagtgcgagtcatcagtcagcacgattaacggccacaggaagtcgttccacgatcccatgaaggagaagatgccgaccaacgccatggttcccttgacctgaggtacgcatacgcgccagaaccgttgccagacattggctccatcgacctctgcggcttcgatcatctcgcgaggtatggccttgaacgcattcatgaacagaagaatgttcatggagctgaccaatccaggcaaggcaacgccgatcaggttgttctgcagctgaaggttgcggataatcaggaactgcgagatgaggatcgtctcaccgggaaccagcatcgataggaacagcaggcctacgaccagccccttgcctttgaacttgagcagggcgatcgagtagccggcgaagcatcctgagatgatgttgccaccgatgttcaatgccgccacgatcaacgtgttgcacacgtagaagagcaacggcagacgattgaacacatcgacgaagttctggattgtcgggtcaacggggatgaggtagggcgcggcgtacatgtcgtccttgggacctttgaacgccagtgagatctgccacagcagaggtgccgccaggaagagcagcagagcaatcagcacgatgatgcgaacgaccttgcccggagtgacatgattatatttgttttccatgactgcgtgtgtgcctgccatcagtcttcgctcctgctctgaatgaaccattcgatgccgatgatgcaaccgagcaccacgaacatcaccatgccgagggcaccggagtagccggttcgggcgttgatgccggtaccttcctgcttgatgagcatggtcatcgtcagatcggcgccaccgacgccaccggaacctccggagagcatgtagatctcgccgaagactcggaaagcggacatcgagctgagcagcatgactaggatcatcgtcattctgcatccgggcaatgtgacgtgcaggaactggcggatgccaccgcacccgtcaatcgaagccgcctcatataatgtgctgtctatattggcgatgttagccaaatagataagcatgtaatagcccagaccactccagatcgtgacggccatggcactgaaaagcagcagccagcgatcggtcaagaacggaattggcgtggtgatccatttgagtgccttgaacgtgccgttgagcagaccatccttatcgaggatattggtccacagcaagccgacgacgacgctggacatgatgaccggtgtgtagaaggcggtgcggaagaagttcatgatgcgggtcttctcggccaccagggaggccagcataagaggcagaatcaccatgaacgggacgatgcacaccacatacagcgacgagttgaagaacgccgtctggaagcggcggtcggtgaacatgtcgatgtagttttcaaggccgacgaacgtaccgggcttgagcagggtggaatcggtgaaggagagcctgatcgtattgaagaacgggaacagggagaaagtgcagatccataggatcggaggcagcacgaacagccaaggaacaatgcgtccgctactgttcggtcccagccccgcctggcgtgaggccttggccgcgcgcttccttgatttcgcttcgcttgccataattagagccgttcgttgcagtacttgacggtggcgtcaagcgcttccttggccgtgatcttgccttgcagcgcttgagcgatttcctcacgcagcatggtggagcaagcggaggtgaactgggccgggccccaaatctcaccgttgcgaatctgatcggcggacatacgcatggcttcggcgtccatggtatcgtcggacgggttgaagaatttgtcgtcaatggtacccttcgaagacgggaacacgttcgccttcttgtcgaatgccagctggttgtctgagttggtcacgaatcgggcgaacttgatagcctcctcctggtgcttgcttgtggcattgaccgtaagcatctccatgaacatgttcggcttggtgttggcgatgaaatcggtgatcgccagattctcgaacaccttcggggcgttcttgcgaatatcgtccacactgtaggcgttgccgttcataaacgcctgggttccaccgttgaagctcttggactcacccgaggtggagctgttgagcatgtcatcggtgaaggcgccggcgttgtacatgtcgatgtagtgctggacgaattctacgcctttcgcgttgttgaacgtgaactcggtgtggtctttgttcatcagttccacgccatacatgccgaagtcctggatggatgggatgccggaggtcagtgcatacttgccaccgcagttggagccgaaggtgtcggccatcgcgaagatgtcgtcctgcttggtcggcgggtcgttcggatccacggtgatgccgcactcctcaagcaccgctttgttatagaaggtggggccggagttgaggtaccaggggaacccgtaggtgccttcctcaaggtcggttcccttgagtgtggcggcgtcccaggcagctggaaggaagtcatcttcggcttccggcacggcatcggcgagattgagcaggatgcccgcactggccagcgtatatgccggttcagggcccatatcgaccacgtccggcagttctcccgcagcggcgtcggtggacagtttgtcctcgtagttgtcggctggctggtcgacccacttgatcgtgataccggggttctccttctcgaactggtcgatcagtccctcgaagtagtcggtgaacttctcgttcttcagattccatgtctggaacttcagttcggcggtgccgtcgcccgagctggatccgcaagcggcgagtccgcccacaagggcaatggcagagcccaatgcgaccgccttcttgaatgtgcctttcatggtgttttctcctttgatatatttggtttgttcttcgaaacgtatggtgggaacgcggtcattgccgaccggttcatgttgagcgctcacggggaggctgaattccgttggcgaacgcatcgattcgactgctatgtcgattgacggttggaggcaaggaccatgcccgggttcaggacccgggccgaatccgtatcaggcgcggcttaggcgcaatgtggtcagttggaaggggttgagcgccagttcggcgccttcggcctgctgcttgccgccgataagtccggcaggttcatccgggtaggattcatcctgttcgagcgtgttcgtctcacgcaccgtccagccgtccagcgtaccgccgacatgcagcattgccttggctttcgccccggcggcctcatagagtcgggccacgatgtcgcccgaaccatcatcggcgagcttgatccagtcgatgaccggcgtgccctctatgggttccagcgtgatcggcgcggcgatgtcgggcatgttctcaatcgtcggagcattgatctcgccagcggcggcgaccagtggcgcgaccgaagcgcatggcagtacggtccagtcgaactcgtggtggccgatgtcggtgcgtggatccggtgccgtcggagccgcgaccaacgacatgcgcaccatcgtgccggcgagggcatcatcccgatcacgtagcgagctgacgtcggagccataggtcgagccgttggccacgccaatgccgtatgaggaatcgtgtatgcgaacgaagcgatgtgaacagctttcgaacatcgcctcttcgccttcggtgttcttgacgatcgggcgttcgatgaggccatactggcattcatactgggcacggctggcgctcagtgccatggggatgtctaccttgagcagcttctcgggcacattccattcgacatctgcatggaaatcaagctggcttttgcccgggcgcaacgtgattgtggtggaaatctcgtcgtcgcggtaactgttcttggtgacgatcacggcggacccgtctgcggtggtctcgatcgagacgatatgtccgtcagccaatgcggtggcgcacaggaaggcatcgcgttcgacatcccaggcatcgaatacgcccggctcgtccttgagaatctcgtaacggcccattacgtgatccttggcgaccatttcgcgtccggacttcaggtcgatcatcgagtcgacggtgccatcggcggcaacgtggacacacagcagcccgttatccagcgtagccgagccgtcttcgcgacgattcacctcgactggttcgccacaggagaccagcgatgccggacgccacggatcgacatcggcgaattggctgatccgggctttggcgatacgggccacgtccgggttggcgacggcgattgccgcgatcgcgtcacgggcgatatccgagagcgccttaagatcgcgggcatattcttctcgggccacgcgatgagcccattcaatggccgagccggggaggatgtcatggaactggctgagcagcaatgtcttccagatgcgatcaatccgctcagtcgggtacacatagtcggcagattcgagcgaagccacggcaccgagatattcaaccgtgcgcaacatcgattcttccttgcgacatccgcgtttcatctcctgctgagaggtcaacgtcttgcgatgcagctcgaaatagaattcgcctttccatcggggcatttccgagccggcctcggccttcatctcggtttcagctttggagaagaagtcgtccggagtgccgtattcgacttttggcataccttcaaaactttcaaagcggtgctcgcgcatcgtcatttcacggatgggcccgccgccgccatcgccatagccgaataacaagatacctcggtcggagaggtccttgtccttgtagttgctctgcacgtaggccatgtcgtgcgcggacatgtcggaatcgtatttgtcggcgggtgggaagtgggtgaagatctgtgacccgtcgacgccctcccacatgaaggagtgatgcggcaggcgtgtggtgtcgttccagcacagcttctgggtgaggaaccacgagtagccggagcgcttggcgatttgcggccatgcgccggtatagccgaagctgtccggcagccagatgccgttcggcacgacgccgagcttctccttgaagtatcgtttgccgtaactgatctgacgaatcagcgattcgccgcacggcatggtgccatcggattcgacccacatgccgccgaccgggatgaaccggccttccgcgatgcgggccttgacgcgttcgaacaggtcggggtggcgttcctcgagccatgcgaaatgctgggcggcgctcatcacgtaagtgaagtccgggtcgatatccatcagcgcgagcgcattggatacggtgcgcccgaccttgcgctcggtttcgcgcaccggccacagccatgcggagtcgatatgcgagtgacccattgcggtcagggtcatggccgaggcattggcggggttgtgcatcaccttgtcgagcgcctttcgagccaaggcgagcgtgttgtagtctttctcgtcccacaggttgatggatcgctgcatggccttggcgagcttccaatagcgcgggtcagcgtcgttcatgttttcgagagatccggtgacgacgtcaaggtcggcccagtagtcgaacatgtcctgatccagagcggcgatatcgatggaactgaactcatagcgttcgtctgctttgccggtgggcttggtgcccagctcggtaacggtaaacgacgggacattagggttgtaagcgccttcgacataaaccacgaaagagccgtcaggattgaccacacgatccttgacaccgtcagcggagacaagcggcatccagtgattgcgcgggtgcagtgccttgatgacggtgccatcggcacggtatgccatggcctcaatgtgaccgccgacgggccattcgagccaaccaaggttgaacaccagctcgatggctcgcccctcgggcagggtttcgggcaactgtccctcgacacgcatccaggtcgtgccccatgaggttccccagggttcgcctacagcgagcggctgaaaattgacctgcccggacactgcgcgcgtgatgaacgcagcgggcatctccggttctcccgggttcttgaccgcgccgaccgtgcactgtgcaagcacctgatggatatgcggccaaacacgctcccgcataacgcgcttgcaacgatcaatctcgcgattgactttgagcagcatagctctccttttgtcgtgtacttttcgctgagactaaagcgacttagctgaccaccatggtcattcgccggttactaaagcgatttagttagagaataacatgatgtgtgcacgaacgcaacatcaccgtgtcgcatatcgttaccccgtctcccatccccgccataacgcgcaatcgcgcgcgaccatgcagcatctcggaggaatccgattcccgcatgatcgagcgcgattgcaatatcggggttaagaccatctgtccctatcgccgaatacgcaatgtgacgatctggaacggcgtgaacgagacggaggcaccctcagcgggcaccggccctccggcgaccagtgcacggggcagatcatcggccagcaccggctcctccatgagattcacctcctccaccgtgcatcctgcgaacgtatcatcaaggcgcagcgttgccttggcatcgcccccggcggcctcatatagacgcactataagatcgccggaaccatcgtcggccagctttacccaatccagtaccggcgtgccggcaacatcggtgagcgtagccagcggtctcacggccggcagctcatccataatcggcgcgttgagacgagatgcttcggccagcaccgattccataccggcaccggcaaccaacgaccaggcgaagaaatgctctccctggtcggtgcgtggatcggggtacagcggtgcggacaggagcgacagtcgcaccatggtgccgcggccggcgccgtgcgccgcggcggcgtggatcggactgacgtcggatccgtacgtggaggcgttgaccacagcggcggcatagccggcgtcggcgatacgtacgaagcggtgtgtgcagctttcgaatttggcatcatcgctgcgcgtgttcttgttgatcggacgttcgaccaacccgtactggcattcgtactgcgcgttcaccgcctgcaccgtgaccggcatatccaccttgaggaacttctccacggcatgccaatccacgtcggcggtaaaatcaagactgccggaccccgggcgcaacgtgatgacggtatggatctcaacaccgcgcgcacgggtgacgacgtgaatcgcagccgagccgtcgggcatatcttccacatgctcgaccatggcgtcggtgagcgtatcggcggcgaggaacgcatcacgctggatatcccatgcatcccaatggaatggctcatccttcaacagctcatagcgccccatgcggacaccggatggcacaagttcacgacgcaaagcgagatcgatcagggatgagacggtgccatccgcctcaatacgcacacgaagacgtccgttgtcaagtatgatggcgtttccgtcacgctcgacggaaaccggaatgacagactcttccacagccgttccaccaccgtcacgcacagcccatgaatactgcggattgcttgcatatggcgcaatcacggcatgcttcaccgtcgctatgcctggatcggcctctttaacggcctggccggcagccgcagcgatgtcacgcagacgtgcgatgtcacgcgcgtattcctcgcgtgcctgacggtgcacccatgcgatggcggaaccgggcagaatgtcgtggaactggttgagcagcagggtcttccagatacggtccagttcctcacgaggatagacgtaacctgggttcttgatactggccacggcgcacaggtattcgacgacacgcagcattgactcctcttggcggcaaccacgcttcatatcctgctgtgcggtgagtgtgcctcgatgcagttccaaatacagctcgccatggaagaccggtgtctcgccgcgggcatcgtccacgatatccttgcgcacgcggtcgaacagctgatcaggagtaccgaaatcgattttcggcgcaccggcgagatcatggtcgcggcggatgcgcgcggtcatctcacgcgtgggaccgccgccgccatcgccgaaaccgtagagcaggattgcgttgcgggaaagatccttgtccaggaaattgcgctgcgaatacatgagctcgcgcatgctcatcgacgagcagtaggtgtcagagggtgggaagtgcgtgaggatacgcgtaccatcgatgccctcccacatgaaggagtggtgcgggaacttggtggtgtcgttccacgagatcttctgcgtgaggaaccagtcgaatcctgcacggcgggcgatctgcggccaggagccggtgtagccgaaactgtccggtagccagatgccacgcggcgtgacgccgagatgctccttgaaatatcggcggccgaacgtgatctgccgcaccaatgattcgccggaaggaatcatgttgtcagattccacccacatgccgccgaccgggatgaaccggccttcttcgatgcgccgcttcattcgtgcgaacaggtcgggatgttcttcttccagccatgcgtactgttgggcggaactcatcgcatacgtgaagtccgggtcttcgtccatcaaagccagcacgttggatacggtacgggccactttgcggcgtgtctcgcgcaccggccatagccatgcggagtcgatatgcgcgtggccgatggcaatgtggttgattgcgctggatgcagccggttcggcgagcacgccggcgagcgccgcacgggctgccggcacggtttccaagtcacgttcatcgtagatgttcaaggagcgttgcagcgctttggcgagctgccagtagcgcgggtcgtcgtctttgagttcgcgaatcagggaagatacggtttccaagtccatgtcataggcaaacacgtcttcgttgaagatggtgatatccatgcgactcagtgtgtatgggaagtcacaggtgccggtggcctcttcgccgagttcggtgggcgagaacggggtggggccttcgacgaatgggttggcggcggcttcgatatagacggtgaagtcgccatgttcatcgagttctacagtgctgctgccgtccgcgtagacgagtggaatccagtggttgcgtgggttcgcggatttgatggcggtgccgtcggcacgatagacaagtccctcggattggaatccggggccgcggtgatcgagccagccgaggtctaccatgagttcgacttttcgtcctttgaccgccgccatgtcgatgtggccgttcacctcgaaccatgtggtgccccatgtggtgccccagacgccgggaacgcggaaaggttcgaagggcacttggccgttgcgcactttggctagaaattcgctggagggcaccggttcgccgggattgtggaacgagcgcaaggtgcatgcggcaagtgtggtgtggatatgcggtttgacgcgctgctgcatgacgcggtcgcagcgctccaactgctgattgggcagaagaaacatggagagttctcctttgctgtgtctggtgggaatgatgggaattcagcgcgtgatgcgcagggtggcgagctggaacgggccaaagtgcagcgtggcaccttcggcgttctgtctaccgtcttgcagcgcgaccggcaggtcggcggccagatcgtcgccttccagcacattggtctcatgcaccgaagcgcctgcgagcgccgggcagacgtgcagcatggcatcggcctggccgccggccgcctcataggcacgtacgatcaggtcgccggaaccatcatcggccagcttcatccagtccagcaccacggtaccattgacggactcgatcgaggcgagcggcgtgatatcgggcacatcatggagtaccggtgcgttgagcacaccggcggcgtcaagcgcacggtccaccgtggcgtcggccaccacggaccagtcgaactcgtgcgagccgatatcggtgcgcgggtcggggaaggtcggcgcggagagcaatgacagtcggaacatagtgcccgagtcacgaccttcggcggcgttcccggcgatcggtgaggcatcggacccgtataccgatccgttgatgacggctgcggcgtaaccggcatcaccgataatggcgaaacggttcgtgctgctctcatacttggcttcgtcggatgcggtgtttttgacaattgggcggcggatcagaccatactggcagtcgtatgtcgcttggtcggccacgatacccagcggcagatcgaccttgaggaagcgctcgcgttcgtgccaatcgatatcggcatggaagtcgagcgtgtgcgagccggggcgtagcgtgatggtggtggtaatgacggtatcaccgtcggcggtatgcacgtggacctgtgccgcaccgttttcggtattcaccgactcgattgatccggtcacggcattcgccatgagcagggattcgcgttcgatctcccaggcatcccaaacggcgggctcgtccttcaacagctcgtatcggcccagtcgggtgccggccgggaccagttcatggttatgctcctcatcaagcagcgacgagattgtaccgtcggcctcaatggtgacggacagtacgccgttggccagcagtacacggccgttgtccaatgtctgggtcagtacggaaagcgcgtcggtcggttcgttgatgcggctggcacgccaagacgcgccgtcattgcggaactggctgatgcgggcctcggcgagcaagtcggcctgcgggttggccttgcgcagcacggtgcacatgtcttgggcgatttcagcgagacgcttcaggtcgcggcgatagtcctcgcgggcttcgcggtgcacccatgcgatggccgagccgggcaggatgtcgtggaactggttcagcagcagcgtcttccatatgcggtccagctcctcgcgcgggtagacgtactccggatcggacaacacggcggctgcgcccaggtattcgaccgtgcgcaacagcgattcctcttggcggcagccgcgtttcatgtcctgttgcgaggtcaaggtgccacggtgcagttcgagatacagctcgcccttccagacgggcatttctgggccggcgttctctgcaagctgctgatgcgccttgtcgaagaagtcattcggctcttcgatgctcaccttggagacgccttcgaggttctcgtagcggtgcaggtgctccatcatgttgcgcgtggggccgccaccgccatcaccgaaaccgaagagcagaagcgagcggtcggagagatccttgtcctggaagttcttctcggcgtagtcgagttcctggaccttgcaccaagcagcataagtatccgccggcgggaagtgggtgaagatgcgcgagccgtcgatgccctcccacatgaacgagtggtgcgggaacttggtggtatcgttccacgagatcttctgcgtgaggaaccattcgtacccggcacggcgggcgatctgtggccatgcgccggtgtagccgaagctgtccggcagccatacgcccttgggctccacaccgagatgttccttgaagtatttgcggccatatgcaatctggcggatcagtgactcaccggcgggcaacatgccatcggcttccacccacatgccgccgaccgggatgaaccggccttcttcaatgcgccgcttcatgcgcttgaagatgtccggatgatcctcttccagccaggcgtactgctgggcggagctcatcgcgtatttgaagtcggggtcggcgtccatcagcgccaatgcgttggatacggtgcgagccaccttgcggcgggtctcgcgcaccggccacagccatgcggagtcgatatgcgcgtggccgatggcgctgacgttcatggccgaggcattggccggcttggccagtacgccggcgagtgctgcgcgcgcggcttccacggattcggggttgcgctcgtcgtaggcgttcagcgaacgctgcaatgctttggcgagttgccagtagcgcggcgactgtttgtcggcgaattccatcagggagctcaccacgtcgagatcgacggagtagttctcgtagcgttcatcgaattcggccagatcggcggacttgaatacgtacggctcgtccggcttgccggtggcatggtcgcccagttcggtctcaatgaacggaggcacgccgagcagcagcgggttgctggcggcttcgaggtacagggtgaagctgccgtcttcggcgaccggcacttgcgcgttgccctcagcatccatgaacggcacccaatagttgagcgggtgtacggctttgatggcggtgccgtcggcacggtagacgaggccctcgatatggccgccgcaggagtgcgggtaccagccgaggtcgaggatgagctccagcggcttgcctttcgggtagccggccggcacagtaccggtcaggcggaaccagactgtgccccatgtggtgccccattcaccgccgagcgtaaacggcttgaagtcgatgtcacctcgattgagcttctcgaagaactcgtcagtgggcatcggctctccgggaatgtcaaaggactccaccgcaagctgtgcgatcgatgggtggatatgagggtccacgcgctggcgcactatgcgcttgcaccgctccagttgctgttcaggtttcaggaacatctgctgttcactccccttatctctgccgcttgtgcggccacatcattgtgctgcccgttcatgggaaacatatcggcatgcgccctcgcccgcagaagactaaagcgctttagtaacatattggaaggaacgggatatgatgtcaaattactatcgcaattcagcgtgttccgtcaggcatgtcatgctcggtgtcgatgacgatggtcatcggcccgtcattgaccagcccgacccgcatatgcgcgccgaaacgaccttccttcaccggcactcccccggagcgcaacgcctcgttgaacttgatccacatgagatcggcatgctcgggcttgccggccttgatgaagctcgggcgattgcccttgtgcacgtcggcgaacagcgtgaactgcgagatggagagaatctcgccgccgatgtcctgaatcgaacggttcatcttgccctgcgcatcctcgaacaccctgagattcaggatcttatgggccagccaggcgatctgccgttcgccatcctcgtcgcgaacacccaccagcatcatgaccccgggcccgatctgctgcggctcgaaggtgggatccggcatccccaggtcattgatcacgtccaccgacgcttcggacactcgctgcaatacgactttcatggttccctacagtacaacgtgcgcagtcaccaccaccgaaccatgccaatactgcggcaaccagcaggtcgaggcaccgtggacgctctgccaaggttgaccgcaggccgcgcacgcgccggataatcggcgtatgccccgaatgcggacgcgaagtgatggccgcgaagggcgaggcgctgcgcctgtgcaaatgcggcgaccccgtcaacgtggccgagctgcgcgagcaaagccaagccgaggccgaatcaatccacctgaccaaaaccccggcaggcatgagccaatggctcaagggaaactacgggtacgaggtcagccgaaagcggatcagcaactggcccaaccggggcaaactccccagctcgagacccgtcgatgacggctactgggagttcaacatacgggagattcttgcgttggctatggactccagcggccgttcggcttgacatgatgtagtctgtaggctacaatagaggtatagaaatcaagcaatccgccgaataccgcaagtggttcaagaaactcagggaccacaaagcgaaggcctccatccaagcccggctcgatgcctgcaagctcgcaggcaggccattcggcgacatcaaacccgtggtaggcccggtcagtgagatgcggttccacaccggggccggataccgcgtctacttcgccatgcagggcaacgtgctcatgctgctgctcgcaggcggcgacaaaagcacccagcagaccgacatcagacaagcccacgacatcctcaacgactacaaggaacaacgacaatgagcaccgaattcaccgactacgacaccagcgaatacctcgaaaacgaacaggacatcatcgcctacctcaacgccatagccgaatacgacgaccccgcactcatgcaggccgcgctcggcaacgtcgccaaggcccggggcatgacccagatcgccaaggacgcgggcgtggggcgcgaaagcctctacaagagcctcagcaaggacggcaaccccagcttccagaccatcgccaaggtaatccacgccctcggcggacgcctcaccatccaagccgcctgaaaaaacaaaacacaagcgggagtagggtgaatccaccccgtggcatactccgtatcaggattagtgtgaaagcctctgaatcaaccggttcaggggctttactcatatccacccaatggtcatgtgccatggcaatcaaccggcatgaccgcctatgcgcgtagctcagctggtagagcggcggtctccaaaaccgcaggtcgtcggatcgaagccaaccgcgcaatccccagccgcgtctacgacatcctcaaatggttgggcctcatcgtcctgcccgcactcgtcctgttcgtcagcacggtcggccgttgtagatgactttgttttagcttgtcgctagagcgaagtcatctgcatggcctcgttgccgaggccagctccaagactcacacggcttacgccgtcgcttggttcgcgtttcacaggatgccgcgttgcccgacgcg

SEQ ID NO: 1051 - DNA, 34194 bp, Unknown
  R13_10m  MAG No. k141_2013
acggccgagatcatcgcgcacatcgcatccagggcgaacggatcattgtccaatacgggcgatacggatcgaccgcgccgcagccccggtcatgtcatcatgtcccatgccgctcatcgtggccacggtcgcagccggacgaaacctgctgtcatgcgattacttgacacgatgttgcgcttttggccatgcgcaggttgaatgggattgcgccacgaaaggatatgccatgaacgatctgctgattatcgacatgctgcccacgtacgggctgctgttctacctgctggtctcggtatccgtcttcgtaggatgccgtggcctgcgccggaggacctcggatcgtggcctgctgcgttttgccgtagtcgcgttcttggttgtttccgcgctcggcgccgtgttcgctgcgctggtgtatatcatggcagcgcctttggcgcagccggatatggtcgacttctaccgcacgtaccggccaagagctctgatcttcctgctgggattgttcatcatacaatttgtcttcggcgtcgctgccgtgtatcggggaaagtaacctggtatatcctgcgataaacgcattggcagacacttgctgcctatctgtaaacacaccctagataaggcttgcggccgttggccgagcacagtagtagtgtggtctgctgtgtcaacaggaggagtgtgaccaatgcggctgattgagacatggctggcggaccaggaacgcgcgtttgacttgttcgcgaaattcccggcggaggagacgggattcgaaaacccagcggccggcatgaatcgtgaacggttcgccgcatatgtgcgagggttgcgtgacgagtcgatgggcatcggcctgcctgacggctgggtgccggccaccaagtacattctcgtcaacgatgagggcgactatgtgggcatcttcaacctgcgtcaccggctcaccgacttcctgcgcaacggtccgggccacatcggctacggtgtcgcccgcgaataccgcggtcacggctacgcgaccgccgggctcaagctcacgcttgccaaggcccgcgagctcggcatcaaggaggcttacctgagtgtccacaaaaccaatccggcaagtcttgcggtgcagcagcattgcggcgcacgtatcgaccatgaggacaagacggaatactacacacgcatcgccacctgcacgaagagcgatggcctctatgcgcgaggcgattgacggcgcctcttgcgtgtaaatggccgattatcaatcggttttaatcaatctcgcctcggtcgataaagtcgccgtcgaggaaccaataatcgtgcggatttccgcgtaacgccatgaacggcgtgagttccacgccctgtgtctcagctctgctcagcagataggcgcggataatccacggatactccagcacgcccgacttgagggtgatgatttgctccactctgctgccgctgacgccgaaatccttgccgatccgttcggcggtcagacccaaccggctcatgttctcctgaaattcgcggatagtcgccgcgcgttgctcactgttcaaagacatggcttcatgaatgttgcattggcgccttaatcatccatagttaaggcaccacgcaacatacgattcgcttacgcagccatccgacgatggttgggatagattgttcggcgaagcggtctatggcgtcggcggtgacgtaggcgtgggcggtgaggcgcaggtacagttcgccgccgaccgcgctggccgcctcggatacccgacgctccgcgtaatcggcaagatcggacatgtaccggcgcacggcatcacagccccacagtcgctcgatctcgcgcagggactcgggcgcggcgatcggaccgcataaatcctgggtgccttgctcatcgaatcgctccgggaacgggtcagcgaaaccccacgagtcgatcagtggccacaaatcctgaccatcctgaccgccttcgggcggaatcaccagcaatgccgtgccacgcggcgcacacgggaacttatgaaaattgccgacccaccaatcggactgcagtccgccggccggatcggccagttgggcgggagcgtgcgcgccatcaaccaaaatgcggatgccgcggcgatgggcttcggcggcgatgcgctgggccgtaaacagcatagcggtggcggaagtaatctggtccaacacgatgaacgacgtacgctcgctcatctgcgcggtcacggcgccgaccacgccatcctcgtcggcgtcaatggtaactggtgcatcttcctcatccatgcgaatgatacgaatcgcctttcatcccaatgatttcgctctcatggctgatacccgcgtgccgtcatgttccgtaccttggaatcagaagtcgagagtcaaggtccgaaaccgaacggagcgggccgaagcagggagcattgaagatgggatttcttaagaacttttccgaaccgtttgcattcgcgatggcattgtggccgtttgtgtccatgctgctgaccgtgccggtgctggcgttgctgtatcatcgcgacaatcgcatccgactgtcgtcggccatagtggcgtatggcacggtgctgtacctgctcggcctgctgtgcttcacactgtatccgatgccggccgatgcggcagcctattgcgccgcgcaccatctgacgccacagctcaatccattgcagttcatcggtgacatccgtaccgatggtctcaccgccgtactgcaaatcgcgtttaatatcgtgttcttcctgccgttgggcttcatcatgggccgtatctggcgttggccgctgccggttaccgcagtactgtcattcgccacgtcgctgtttctggagacgatgcagctgaccggcctcatgggcgtgttcccgtgcgcctaccgtctgttcgacgtggacgatctcctgtggaacacgaccggcgcgctgatcggattcgcgctggccatgctttcgctgcgcctgattccggcgcgggtcgccgatatgacgccgaccaccacacctggcttcatgaggcggctgatcacgttcatcatcgacatgacgctgatcgggttcgccgtgatgccgacgcatctgttcgtcatgatcgtccgcccaaacctgccctcgggctccaacggctcatggcagtcgatggaaccgttcgactggaccggctcgatcctcttcctggcggcgctcatcctcttcgagggcgtggtgccatggttgcgcggcggctgcacgttcggcggcagcttcacgcacatgacgatagagacccggccgcgcgaagggtggcttcgcgtggcgttctatgtggcgcgcatggcgacgctgatcgccgtggtgtggtggcatagtggcggattcaatctgctggtgttcatcggcctcggcatcttctggctggtcaagcgtcagatgccgtacgacctgatataaaccggcgctccgctgcttggcgttacaggaaaacctccgaccactggtcgggattcggaatgctgcgcagcgggccggccaacgatacggccaatcccgctacggaacagaccacggctacggccatcaccgccgtgaaaccgagatctggctgttgcaacagccagccgaccatcgccgggcatgctgcgcccagtatgccgaccgtggtttcaaatacggcagaagcccgcccctgcatgttgtcgggtgtcttgccgtagagaaagcccagcagaccagcgttcaacgcggggaacggcaggccggccagaatctggcagatcagaatggccgcgtagctgtgcaggaatagcagtggcatctggctgaccacgaacaacgccagcgcgcccgcaatcagtttccctgtgggaaccatatcgactagcttgttggccaacagcgagccgaccaaagtactcacgcccattgccgtgccgagcagtccgatcatgaccgcgttggcgccacgggcggccaacatgatctgcgcgccggtgatactgactacgcaggcgatgttcacaattgccccgagtatgatcgcggataggaagacgcgcttggtcagggcccatcgccagccttcgaccaagtgcgtgggaaatggcacaacagaagtgccgtgggcccaaacggtgaccacggcttagcgcgacgagtcaacgcgcattagctgtctgcgaacgacaccaacaccttgtacataacaatgcccctttgcaaaaaacaaactccaattattgtaccagttcgagcataaaaccaggcgcgtcactgggcacaacataatcggccatcaatggtttctcggcttcgaggggctgatttcgtccggtggggacatctacttggctttcgaggggctgctcaaacgccaaaccgcgagtataaacggctttgcggcaacgccattacgccattgtggagccttgtctactcgggcatcagccccttgaaacggagatagatctccggcaagtgccaaatcagcccctcgaaatcgagttaggcgttgttttcgcgtttgcgctgccgttcgagtgcgtaataagccgcgtagcagcaggcgacgaacgggatcatgcaatacagggtcgaacgctgcgtatcatcgagcaccacgagcaccagcgcgccgatgcacatcacgatggccagccacggcagcaccgggaaaccgggcgcacgatagccgagctcatcggcgctgtgcccatcccgcgcccattcgcgccggaaacggatatggcacacgcatacggagaaccacaccaccagcgtcgccaaacctgacacggcgaccaacaccagatacacggtcgaggcggcgatcacggaagacagcaacgccagcagtgagcccgccatgctgaacagcacggcccacaccggcacaccacggaaattcgtcctagcaaaacgttcgggaatcagccgctccttggccagcgaccacaccatgcgcgaacacacgtacaggccggagttcgcggcggaaagcacggccgtcaacaccacgaagttcatgatgtcgccggcgaacggcataccgattgactggaacaccagcacgaacgggctcgtatccacgccggcctgatgccaggggatcaaggccgccatcaccagaatcgagccgatgaagaaaatcgccaggcgcagcaccgtggtgtgcacggccttgggaatcgcacgcgagggatccttggtttcgccggccgccacgcccaccacttcggtgccggagaacgcgaacaccacggtcagcagagtcgagaaaatcggcgcgataccgcttgggaaccagccgtcagccacgaagttgcccagcaacggcgcggaatcatgaccggcaatcggtatggcgccgaagatcgccagcaggccgatcacaatgaacgcgatgatggcgaacaccttgattgacgcgaaccagaattccgcctcgccgtacagccgcacggacatgatgttgagcgcgaacaccaccacaatgaacacggccgaccacacccaggacggcgaatgcgggaaccatcgctgcatcaacagccctgcggccgtgaattcggaggcgagcgccaccgcccagttcagccaatacaggatggcgatggtgaacgcggtgccggagccgatgaaccgtttcgcgtacatatggaagcttccggcgtacggcatggccacggacagctcgcccaacgacaccatcacgcagtagacgagcagggagccggccgcgtaagcgaggatcgcgcccaacggtcccgcctgatgaatcgcgtagccggagctgacgaacaggccggtgccgatcacgccgcccagggagatcatcgtcaggtgacgcgactccatcttccgttcaaggccggtatcgtccttgggtgtgccggctgccgccatgctcgggtctcctttggtcgggtgaacagttgtgtctcgtgtcggttgtgcgggcggcgctcgatgccgcctaccatatgatagcggtaacacgaacagcgagtggaacacgaggagtttggaatgatggaactgtatatcggatcgcatctgtcgacggccggcggatggaatgcgctgctggaacgttcccatgaggagggcggtaccgcgttcgcgttcttcccgcgttccccgtacggcaagcgttcgaaggcgctcgacccggccggcgcggcggcgttcggtgcgcgtctgaaggctgagggctatgggccgttggtcgtccatgcgccgtacgtctacaatctagccggcaaggatgaggccaagcgcacattcgcgatcgaggcgttggccgaggacatcgagctgctgaccgccatccgcgaggccggacaggaggtgtatatcaatattcatcccggcgcgcatgtgggccaaggctccgagaccggctgccggctgatcagcgagggactgaatcaggtgttcgagcgcgcggccggcgtcatggtgcttctggagaccatggccggcaaaggcacggaatgtggccgcaatttcgatgagctcgccacgatcatggatggcgtggagaataaggcgaacgtcggcgtcacgttcgacacctgccatgtgttggatgccggctacgatttggtgcacgactacgacggtgtgatgcgccagttggatgaggcgatcggcttggccgaggtcaaggcgattcacgtgaacgattcgcagtttggcctcgactcgcataaggatcgtcacgccaatatcggcgagggccagctcggcatcccgtttttcacgcgactggtcaacgacccaatcatggccaagctcccgatgatcctcgaaaccaaggagcagacgcccgccacgcatcgcgacgagatcgagttgttgcgcggattggtgcaaaagtagtcgtagtcgaccaatgtcgagcagaagagacctgtttttgactgatggctatacgaggttagctatcagcggggcgttgattgacccgtcttcatatacagctgcatagccggttccagctgcaagagctcaaaacagacgcatgggttcggcggaatccaatggctgaataagacgtttgccgtcgctgttcagtggcgcgacttcgtgaaattgcagatgccgggaaagcatggtacccgcttcccgcatggaatctaacagtgcggctccgtcaacggagcggtccagccatgaggcaaccatattccgaggaaccagcaggggcatgcgatcatgcaccttgacgaactcgtccgcggcaggacaggtgatgatggttgcggtcagctgccatggcgatgagggagacgacctccaccatgagtacaggccggccaaagacaatagttcatcatgtggcgcgtgaaaatagaacggcctgcgacctttccattcgtagtagccggaagcggggatgatggctcgcatggattttgtggattcggcgaacgccggcttgacatgcgcagactccacacgcgcattatatgtggggtagctcagcactttgctggcgctccatcgcggcaccagcgaccaataggcaccggtcagatgacggcggccatccttgccctgtgccaccacgccaatgttctgcgtgggtgcgatgttgcaggaaggctgtggcagagtgtcaacgcgcacgtcatcctcgtctaccgcgaactgtgaggccacggcatcccaatccaaatcaagcgcgaatctcctgcacatgcgcccagtctatgccatcaatggaatcaatcccaggccgtatgaccgatattcatggcgattttcctttttgttggccgctctggttccgtagcgatacgaaccaacgaggaatagcccaaaatgtaggacgggttcggcaatcgggacaggacgtgacctagagtggcgcatgaccgaacaccaacaaagggaggaccatgtcggttttggacgaactggtggcgggagcgctggaggatcagcgcgcccgtgagctcaccgtatcgcttgaggacgtgaagaaggccgcgctggcggccccggctccgattgacgcgacacgatggcttaagcgcgccgacggcatccccgtgatcgccgagatcaagcgcgcgtctccgtccaagggccacctctccgacatcccggacccggccgcgctggcccgcgagtacgagaagggcggcgcaagcgccatctccgtgctcaccgaaggccgcagattcctcggcggccttgacgatttcgacaaggtccgcgccgccgtgcacattccggtgctgcgcaaggacttcatcgtcaccgactaccagatcttcgaggcccgcgcccacggcgccgacctggtgctgctcatcgtcgccgcattggacgacgcccagctcaagcacctgctcgacctggcgcacgagttgaacatgaccgtgctgatggaaacgcatacccgcgaggagatcgaacgcgcccgcaaggccggtgccaaggtgatcggcatcaatgcgcgcaacctgaagaacctcaaggtggacgtgaacaaatacaacgaactcgcggccgatctgcccgataacgtcatcaaggtggcggaatccggcgtattcggcgcggtcgaggtcgaagactacgcccgtgcgggagcggacgcggtactggtcggtgaaggcgtggccaccgccgatgatcatgaacttgcagtggaacgactagtaaaggcaggagcacaagtgaaagcatccgaaacgaccccgctcagcgaacatcagggaccgtattggggccagttcggtggccgctatgtgcccgaggccctcatcaccgccctcgacgagctggagcgcgtgtacacgcaagccaaggccgaccccgaattccacaaggaattcatggcgctccagcagcgttacgtgggccgtccgagtccgctgaccgaagccccgcgcttcgccgcactggtcaaggagaagaccggtctcgacgcccgtatcttcctcaagcgcgaggacttgaaccacaccggcgcgcacaagatcaacaacgcgctcggccaggccctgctcgtcaagcgcatgggcaagacccgcgtgatcgcggagaccggcgccggtcagcacggcgtggccaccgccaccgtgtgcgccatgctcggcctcaagtgccgcatctacatgggccagatcgacgcccgccgtcaggccttgaacgtggcccgcatgcgtatgctcggcgccgaagtggtcgaggtgaccctcggcgacaagatcctgaaggacgccatcaacgaagccctgcgcgactgggtcaccaacgtcaaggacacgcactacctgctcggcaccgtcgcgggcccgcacccgttcccggccatggtgcgcgacttccagaagatcatcggcgaggaagccaagcagcagctccaggactggtacggcatcgaccatccggacgcgatctgcgcctgcgtgggcggcggctccaacgccatcggagtgatgaacgccttcctggacgacgagcgcgtgaacctctacggctacgaagccggcggcaacggccccgaatccggcaagcacgccatccgcttcgcccccggcaccggccagctcggcatgttccagggcgccaagagctacctgctggaaaccgacgaaggccagacgctcgacacctactcgatctccgcaggcctcgactatgcgtccgtgggccccgagcacgcatggctcaaggatatcggccgcgtgaactacagctgggccaccgacgaggaggccatgaacgccttccgcgacctgagccagaccgagggcatcatccccgccatcgaaagctcgcacgccgtggccggcgcgtacaaggccgccgccgatctgaaagccaagggctatgacaaggccgtgatgatcgtgaacatctccggccgaggcgacaaggacatggccaccgccggcaagtggttcggctacctgaccgacgatcaggccgccgcgctcgatgtgaccggcgcccacggcaatactgtcgcctgaacaagaagaggagattgttgattatgaccaacgaagcaaccacgccgtccggccagccgctgggcatcagccacaagcccagcaagtcggtcgctatgttcaccaagttcaaggccgagaacaagcctgccttcatcggctacctgccctacggcttccccaacccggacgtctcgcttgacgccttcaagacgatggtcgagcacggcgtcgacgccgtggaaatcggcctgccgtactccgacccggtcatggacggcccggtcatccaggctgccgcctccatagccctgaacaacggtgagaccatcaagcgcgtgttcgaggccgtcgagaccgtggccaacgccggcggcgtgccgctcatcatgagctactggaacctcgtgtaccactacggcgtcgagcgtttcgcccgtgacttcgagaacgccggcggcgccggcctcatcaccccggacctcatcccggacgaggcgggggagtggatcgaagcctccgaccgtcacggactcgaccgcatcttcctggtctccccggactcgtccaccgagcgcctcgaaaccgtggcccgcaacgcgcgcggcttcgtgtacgcggccgcccgcatgggcgtcaccggcgaacgcgccaccatcgacgcctcgcccgaactgctcgtggagcgcacccgtcaggccggtgccgagaacgtgtgcgtgggcatcggcgtgtccaccgccgaacagggcgccaaggtcggctcctacgcggacggcgtcatcgtcggctccgcgctcgtgcacaccctgctcgcggacgacaacaagaccgcacgcgacccgaaggaaggcttgaagctgctcgccgccaagagcgaggaactggccgaaggcatccacaacgcccggtgaacgcccggtgcgcctcacgcgggttgtgccgtgacacggtagggtagtcacagagcatcaagcacaacccgcgcgtggacacaccatgagcaccagcaagtagaggcacgatgaatctggcttatattccctcgccgaccttctccaagttcgagatcggcccgttcactatccacatgtacgcgatctgcatcctgatcggcatctgcgtggccgtatggatcctcaccacacgttggaagcggtacggcggcaccttcgaccagattctcgacaccacgctcgtcaccgtgccctgcgcgctggtgggcgcgcgcctctaccactgcatcaccacgccggccgactacttcccgcccaccggcaacttggtcaacatccttaaggtgtgggaaggcggcatggccatcttcggcggcatctccgtcggcaccttggtggcgttcctgtggtgccgccacaagcactatccgttcgcgatcttcgccgatgccatcgcccccgcgctgcccgtggcccaggccatcggccgactcggcaactggttcaaccaggaactctacggctggcccaccacgttgccgtggggcctgaagctcaacgacgcggacgccatcggcaaatccgaaatctgctattccggcgcgcaatgcccggactacaggaccacgctgttccaccccacgttcctgtacgagatgatctggaacctcatcggcgccgcgctcatcatctacctcggccacaagctcgccgaccggctcaaggccggccagcagttcgccatgtacctgatgtggtacggcctgggccgcacctggatcgagaacgtgcgcatcaactactccacggtgatcctgggcctgaggaccaacgtgtggaccgcgatcatcgtcttcgtgctcggctgcatcctgttcgtcgtgctctaccagtacggtccggaccccaaggcgcaggcgcgcgggcttgcggcggtcaccgccgacgagctcgaacgccagagcatcgaagaggaacagcttcgccagaagaagcaggccaagcgcactaagtgacaccacaataaacagcgccgaaacagcgcgaaacacgggaccccaagtcccattgcacagataaggtaggaaaccatgagcaatatcgcaatcgcacccagcatcctgtccgctgacttctgcaacctcgaacgtgatctcaaggccatcgccaacgccgacctggtccacgtcgatgtcatggaccatcatttcgtgccgaacctgaccctgggcgagccgatcgtcggccgcatctgccaggtcaccgatctgccggtcgacgtgcacctcatgatcgaggacccggaccgttgggctcccgaatacgccaagctcggcgccgcctccatctccttccacatgggtgccacccacgcccccgtgcgtctggcccgacagctgcgcgagatgggctgcaaggcctgcttcgccgtgcgtccggccgaaccggtcgagccgatcttcgatatcctcgacgagttcgacatggtcctcatcatgaccgttgagcccggcttcggcggccagaagttcctcgacaaccagatggccaaggtccgccgcctgcgcgatgagatcacccgccgtggcttgaagacccgcatccaggtcgatggcggcgtgagccccaagaccgcgcacatcgtggccgaggccggcgccgacgtgctcgttgccggttccgccgtgtacggcgccgagaatcccgcccaggccatcgacgacatccgcaccaaggccgaggccgcgttcaaggcctgagctccaagcctgaaccgcaatccacctttcatccataaccgcaagaaaagaatctgaatcacatgaagacgtttgaatccctgttcgccgaactgtccgaaaaggcccagacccgccccgaaggctccctgactgtcgacgagctcgacaagggcacccacttcatcggcaagaagatcatcgaagaggccggcgagacctggatggccgccgaatacgagggtgcggaccgcaccgccgaggaaatgagccagctgctctaccacgtccaggtcatgatgatcaagcacggcctgacgcttgaggacgtctacaagcacctgtgagaggaacgcaaatgctgagaatcgcagtgcccaacaagggcatgctatccgaacccgcgtggaacatgctggccgaagccggctaccgtctgcgcaccaaccctcgccagctggtcgtgcaagatcccgacaatggcatcgagctgttctacctgcgtccgctcgatatcgccgtatacgtgggccgcggcgccatcgacgtcggcatcaccggccaggatctgctcaagaactccggtaccgccgcgctcgagcacatgccgctcggctttggtgcctcgaccttccgtttcgccgcaccgaacgaatccccaatcaccactctggaggatgttcagggcaagcgcgtggccaccacattcgataagctcgtacacgactatctggtcgagcacggcatccaggccgagaccatccacctggacggtgcggtcgaatcctccgtgcagctgggcgtggccgacctcatcgccgacgtggtctccaccggcaccaccctgcgcaacgccggcctgcgcgtgtttgccgaaccgctcatgcactccgaagcctgcctgattcgctcgccgcgtctgaacgagcaggatccgcgtctggccgtgctgacccgtcgtctgcaaggcgtgctcactgcgcatcagtatgtgctcatggactatgacattccgatcagcaaggtcgccgccgccgtggccgtgacccccggctttgaaagcccgacgatctccccgctgcacgacaaacagtggaacgccgtgcgagtcatggttcccaaggccaaggtcaaccagctgatggatgatttgtacgaagtcggcgcacgcggcatcatcgttaccgctctgcaagcctcccgcatgtagactgttagtcgatatgaccaaccagaaagtcaacgccagatacagtccggaagcacgtgacatctatttcaccgtgcccaatttgatcagcgcgctgcgaatcatctcgattcctttcatcagcgtgctgatctccaagcatgaggtgattgcggcgctagccctgatcgccatttcctcggcttcggacggactcgacggcatcatcgcgcgcagattcaaccaagtgagcaagatcggtcagattcttgatccgatcgccgaccgactgctcattttctgctcgattctggccctcagcgtcgccggcatcatcccatggtggatgctgattatcgtgggactgagggatctgtggatggcgattcaggtgctatggcttgcccagtacggttatggtccgctgcccgtgcatttcgtgggcaaggctggtaccgcgctgctgatgatttccatcgtcagtcttattttcgccgatttgggcaccagtacgttcttccacttgctctacatcgccgcgctggccgccggcatctggggcatcgccatgtattggctcgccggatatatctataccaagcagggcgtcggattgctacgcaaggaactgggggagaagtatggcgcttgaggccacggccccggtctcgttccccatacccaaggagaatgagccggtacgacgccgcgccgtgttctcccactcagtccgaggcgcggaatcgcatcatgcgctttccccggatgacgccgccgccatccgcaccagacgtcgccgtaaaaccaacgacgattcgcttcagctcatcgatgatcttgtcaatcgtccgatggatccgatgttctccgactcacgactggtccatgagcatcgttcgaccttctccatctggtttaatcgcatcgtcgtattcatcatctgcgtcggcgttggctttgcctgcagcctattcgtgcaacagttgcaatccgatccgcgtaagcaggtacggcagactttggccacgcaattggagaatcgcaactcgcagatagacgaactcaccacggacgtcaataatttgcgatcccaagttgacgaacagtccaagaaaatctccggcagcgtgaaaagcgacacgcttatccaagacgaaatggtcaatggtgccacggtggtcgaaggcgaaggaatcaccatgacgctggccgatccaatcgcggcaagccagtcggatcaatcctcctcgacgagagtcggcacctccacgaacatccgagtcatcaccgatctggatctgcaacaactggtctccctgatgtttcaaaacggagccgaagccattgccatcaacggtaataggctcggcgcgcaaacctcgatacgcaaggccggcgggcatattctcatcggcatgaccgcgatacaaagcccctataccattgaagccataggcgataagagcgccttggccgaagcgatgggggagaagagacttgcaagtctttacgattccttcaaggaagccggtatctacccgcaggtgagcaaatccaattcgattacacttgaggcagcagtcactggcgaagtgaagtacgcggaaaggaatgaataatggcagccgttctgggactgatcatcggcgtcgtcatcggcgtgttcgtcaagccggacattccgatcatcgtgcagccatatctgccgattatggtggtcgctgctcttgacgccctgctgggtgccgcgcgagcctatttcgagcgcagcttctccgaccgcgtgttcgtgatctccttcctcgccaacgtggtgacggcaacactgctcgtgttcctcggcaaccagctcggcgtcggttcgcagctgcagacggccgtcatcgtcgtactcggcatccgcatcttctccaacgtgtccgcgatcagacgcttcatcttccgaggctgacaagggtactgacgtatggcacgtaaagcacaatcagacaacatgctggagaaaatgcgcgaccagcatgcacaagacaaggtcaacgaccggatggaaaccgggtcgttccccacggtgcgcaagaagccccggaaggatctcaaccgggccagcaacaaatcacggctactatcctcgattctcattgctctgatgtgcgcgctgctgggtttcgcctacatgagccagatcaataacactaaatccacgtacgaaacgatggacgagagcgaactggtaaggctgctgaacgagtcgaatacgcaaatctcgaatctcgagcagcgtaaaacccagttgaacagccagctcaactcactgaaatcggcggctaacgagcaggagcaggcgcgtaagatcgccaagcaaaacgaagagaccagcggcttgatctccggcagactcccggcgaagggccaaggcgtgaccatccggatcggacgaggctcgacgactaaagtggacgcctcaatcatgttcaacctcatcgaggaactccgcaatgccgacgccgaggtaatcgccatcaataacgtgcgcgtcatcacctccacctacattcaggacgccgaggaaggcttgatcgtggatggcaccaccatcaagcccacatacacggtgaaggccatcggcaatccgcaggagctgtccaacgcagtcgatatcgccggcggtgtgggcgctcagctccaggtgaaatacggatccaacgtcaacgtgcagccttctgacagcatcattatcgacgaagtacgcgaagctacgcaaaaccagtatgcaaagacggtagaataggggattatgaccaacccgattcctagcgcaggcgaaaccaccattatcggcctgcccgcgattaatgtactgcccattaccaccaccggcgatcgaccgctgactcaagaggatctggacaccatcaccagattgtccgagggaacggcattgctgatttccgccaggggagcggtctcaggttctcgttacttgcttgacgaggatgaaatcaccgtcggtcgtgatccgcgagctgatattctgctcgacgactccaccgtatcccgtcagcatgccgtgttccgcagggtcaacggtcagttctttgtggttgacgcaggaagtctgaacggcacctacgtgaaccgtcagcgtgttgatcaggcgtcgctgaagaacggcgacgaaatcatgatcggtaaattccgtctcgtattcttcacgaaatccgccattatttcccaatagtccacacccagcacggggttagactgattgcagaaattgcaatcatgtgattacaccagtgtgagtcacatgcgagacacgcatgagttaggggagtgccatgggacagacagggctgcatcttcatgtttcgcttgaggaccgtcagaatctgaacgctgacgcgattcagggggagttgttctccaatgtcgatactgaggagatcaagcgcggctaccgtggcactgtggcctccaaggtggccggcatcacgtaccgacagctcgattattgggcacgcaagcagattgttgagccgtccatcacgccgtctcatggctccggttcacgccgactgtactcgtttaaggatgtggtgattctcgctgtatccaagaagctgcttgatgccggtgtgaatctgcagaacgtgacggcggccatcggattcttgactcaacgcagcaccgatcagctggccaatgtgaccatcatgtgcgatggtcaaaacgtgcacgaatgcactaccagcgaacagatgctcgaactgttgcaaagcggtaaggcagtgttcgccgtgtcggtgggttcgttgtggcaccagattgagacggccttggaacaggaagaatatattgatcttgaggctaagccgctgacgattgccacgggccgtccgattgatgaactgactgccatgaggatgcgcaagaagctcgaggcacagcgcttgcaacgcgcaaccgcctgatacatgtatggttgttggcgacttgccggctttggtcggcaggtcgctttgttgtatgtgttgcttttgttgcctgccatcttatgtttttatatgttgcggtgattattatgactgattggaggaccgggtgaacgggattgttgtcggattgttgccgggcgttctgtggatggtcgccgtcatctttgctgtgtccatcatcactataacggtcagccgaggccatctgttcacgccgaaacgccggcgaccgccggtcgatccggtcgactggtcgatggtgaaaacgcatttcatgtcgtttgcggcggcgctgattccgtttcccgtattgacgtttacagcggatttgatggatgctcgcatgctcgcgttctacgaccacgcgcaattgcccggagcaatcatcatattcgtgctggtgctgctggaactcatcgccatgtatctgcaggcacgcaacgcctcagaaaccgaaatggacaagcgtttgggcgttgcttctcaccggaataaggatgatgttgcgaagtagccgattctctgcggcgaggctaatccgcagctagatactactggttcggctaaaatcaccacatactattaaccgataatgtacgctgtgcgacagtgatttgaccggacttcaggaatggctttatttcaacggtttgaagccatgctaatcagcggtttggaccggagcctgccaaaggtagccaaacccgtatatgacaattggctatgggggtgaagcgacccacggcctcagcttgcattgccctttgccgcgggtcggtttcatcatacccggcactcctgcccggcgagtttcgccaagctggcgtcgggcacatcgaaccacgccccgcgtttggcgggcgacaccagctccgcgcccagaccgtgccccggcgtccatctgcggacgaaccccgatgcgtcgcggtaggccaccatgccatgctcagacttccaaaacccctgccattccggcgtctcgcggctcctgtcgaagtcgaagcagccatccctcagaagggccatgagatcgggttcgacgggttcgccggtcacagggtcgttgacgaccagactcaggtcggcagcgttgcgcctcacggcggagattcgccatgacttcggcagaccgccgggctcgaacgtcacgagacggtcgcccggcaccacgcgccaagtgtccgtcagaccgttgcgcgggtcgcggtcgggcaggtcgggcgtcgggcgcacgtcgtcggggccttggtcttcttggagtgcgatgccatgttcagccttcctgtagctgtggatggctgtgcgaggaaaggcggttcggaaggggcttggcgaaggggccggggtggcacagttttcggacctcccggaaaacgcatgaggcgtttttaaaggtggttttaacaatttgttaaatcacttcgcacttttgctcatgagttttgggaaccatggcattttgtgccacgagtggaaaatgagtcaaaactcttgtggcagtaaggctcaggcagtatttggaaccttcggggcaagatgggtgaaaagagtgctgtgccaccctctcagccctactcccataagggttttcggcatttttggggagggcgagcaccccggcgaagaggggtggcacggcggttttcgggccgaaatcgccggaacctcgaaaacgttggaacgacgccgttttcgcgctggcacagcgcttgcacagcggtggcacagcggtgtcgggccctgtttttcgacctttctccgcccgccccggagcgtcccgtcccggcggtcgcgggacagccttccgaaggaaggctggtttgatatgacaccccacatgattctgcaaacggcgctcggcatgctctacgccgcgctcttcgtcaccgcgctcgtcaggctctccgcttggctgctgcgcgtcctctccaagggccgcgtcgatctgcggtgcagttggagggccggcatgaccgtcacgctgttcacgatgttgtcgctcatggcgctctccggtctggccgacctgctggcggcgctcgctctgacactctgacgcgcacagcccaccccggcatgcgagggatgccatgtttcgacagaaaggtacctctagatggaacagatggaacatctgaacgtgaagaaactcgtcaccgcagccgtcgcctccgtggcggcgctcggcatgaccgtgccgtcggcatacgccggcgagatggggcaggcgctcaacccgccggtcgagcaggcgcagggtggctccacccgcgccgccgacgggaccgccgacaacaccccgtatctacaggtggacgggaccgaggacaggttcgccttggccgagggcagccgctacaccctcgtccaccagatgtactcgaaaccggccgacacctacaccgtccgccacggccttgagcacgacgtcctgaccaaggacgcctcgcgctccaccgggccggagtaccgcgtcgccgcgggggaccgcgtcgaggccatcggcaccgacgtgttcaccggcaaatgcgccgacggcagcggcatgaccttcgagctgaccgttccctataactactccgccgcttcggagaactccgccaaggcgaccctcggcaacggtctgggcgagatcgcgctgagctatgacgacgccaagaaggcttggaccggcacgaccgcgctggccggggagccggaggcgacgccgaccgccaaggcctccgtctccgtgaagccggagggcgtggacaaggccgtcacgaagacctccgacctgaacgtggcctcctccgaggacggctccacccgccgctactcgctgacgggcgacctcggcctgttcggcagggtcgatgcgaccgccgaggccaccatcaggaagggcgcaccggtgtccggcaccgtgaccatcggcggaaccggtttcgcgctgaaggccgacggcaagggcaactacaccgcgagcggtgccgccgccgatggcaccaaacccgagcgcgacgccaccgtgaccctgacctacgctgacggcgcggccatgaccctgaaggccagccgccccaacctagccaagccgaccacgaaggacggcgcttgggtatacaagggcgagaccacctacaccgccgacggcaaggaccgcatcgacctcaagaagggcggcgacggcaattggaccggcgtcatcgacctgaagggcaaggccccggcggacactttacaggcgtaccgcgagtggtccgccgacggcgttgactccccgctcagggagggctacgagctgacgctcggcaccgacggcatcagggacaccgagcccaagctgggcgtccgccaccacgagggcgaggccaagtggaccggcgacggcaccaccgtgaccgccccggtcaagtacgacgagggcaccgaggtgaccctctccgaggccgacggcaagggcgcgtggaccgccaccgcagccaccaaggccggaagcctgaccgactccaacgagccggtcgccaagaccgtcgccctgtccgatggcaccatgctggacatcgactacgagaccaaggtctcctcggtgaccgaccccaagggcaacgtgttcgtcaccctgaagggcgtcgccaagggcgagaccaaggagggcggcaaggtgaaggtctccgtgaccgcctaccgcgccgagaaccgcagggtctccggcatcaaggtcgagcgctccaaggccgacggcaccagcgaggagctggacgtcaccccggccttcagcgaggacgtccacgagtactccgtcacgctgccgcacgacgccaccggcgactcctacacgctgaacgtcgcgcacggcgttgacgccgacgtggaggccccgaccgccaagctgggcgggggcgcgagccgcatcctcacgcaggtgatcgagggcgtcgagtggaaggtcacggtgaacttccaagccgccgacatccagccggactccccggccaagctcaagggcatcttcgtgaactacagcggcgaggccaagaagggcaatctaatcaaggactgggacccgaaccggctcgactacacgatcagcgtgggcgagaaggccccgagcccctacatcaccgccgagtgggacgacaagctcgttgacgcgaaggccggcgacatccgccagaccgccgacggcaccgcccagagcttcgtggtgaccgccaagaccggcggcgcgacccgcacctacaccgtgaccgtggtccgcgagcgttcttggaagaccgccgccgaggagttcaagcccgccgagccgattgtgcgggacgcgaccgtggaggccgattcggactccgacaccaagctggtgtccgccggctacgagaaaggacggcaggtacacgccttcgacggacgacccgatcagggtgccggagggcggcgcgttctccgtggagccgaagaagggccagtccgtgtccatctccggcaagcgcctgagcggcatgacctacgagtacacggtcagcgtgctggcccccgacggggtcacgctgggcacctccacgtacagggtgctctacctgacctcgaagactcaggacgcgaccttgcagggcatcaaggtgaacggcaaggacgtggagggcttcgacccgtcgaagcgcgggtacaaggtgtccgtgccggacgtcgccaaggcgatggtgaccccggtgttcgaccgcacgctcggccagaccgttgacaccaagcgcgacggcgacgtggtgaccatctccgtgacctccgccgacggcctgaacaccgtcgagtacaaggtgacgctggtctccggcgcggtcgccatgagcaaggaccttgcccggaccggtgccgacgtggcgctggtcatggccgccgcgggcgcgttggtgaccgccggcgtgggcctgacactcgcggcccgcaggcgcgggaagaagaccgcgaccgaagccgtgaccgagaccgaggccgaaaacgggaacgagtgaccctctcccgtgaatcgtgagggcccgcaggagtttccgaacccctgcgagcccacggatagggtttctgcttggctgtggaaaccctttgttttgccgttcctggctttatttcaacgttttctggcgtctttcgctgagagaggcgtttcgccagatgactcacgataagtcagtatagtgcgtagttaggttacgctttaggttacgcactctgacggaagggtcagggcggttatgccgaggagaaaagccatgcgcagtgcgttcggttcgatcatcagaaggaagaatcggcgtggagaaattgtgcctcttctggcgcggtatgtgaattcgaaggatcctgccaagcgggtcgcaatgtcgtttcccgccgatgcgaagggccaggcccaggtgtggctggaacgcgcggaaaagctggtcgaggcgtataaaagcggggagtgcgactggggttagtccgcaggagcggaaacgggccgaggaggaggcccataggcggccgtccgtcacgtttgccgattactcgcagcggttcttggaggattaccgcacggcgtcgggggagaggccggccagtgcgacgatgcggaagaaaaaggaggccgtccgccatctcgatgaatatttcggcgacatgctgatcggagagatcggcgagagcgatatcaatagatggcttgatggtggctccatcaagggcaagtatctgccgtaccggtcatggaaccgtccccgcgcgtgggggcgggcccgacggttcatgggaacggccgtccgcccgtcgttcctgacggaccgccgagacgatatgggggtggcgtccttcagaaacgcggcgtgtcggaaaggaaggggcaaaggggaggggggtgatgtcgtggctgccgtccgcggcaagggaagaatcccggcttcgtacggcggaggggggtggcgcgtcgggtggaagacgtccctcgtcgtcgttccgcgttattctgccttccgcagtgagggaaccaagccgatccgtccggagagaggcgcgcatgccggcatcgtcgaaggccatcgtccgtggttggggagccgtcctgggcctggaggacgtccggaaggcctacgacgcgcgccgccgggcgtcgttcaggggaaggctgctgtccgtcgtgtccgtcgcgctcgtcgtgtcggggctggtggtggtgtccgtgccggtcatgctgcagtcgcggtccgccggggaacagtccgtcacgtccggccgtctggagaaaacggtcgcgggatggccgtatccgcgggcggagaacgaattgaaggaggcccgcgcgtacaaccgcgacctcgcctcgcatggacagtacgtcctcggcgaggccaaggacccgttcacgcagacgaagggttccgtctccgacaagagatacctctccatgctcgacgccggcgggggcgtcatggggtcggtcgacatcccgaggatcggggtcgacctgcccatctaccacggcacatccgaatccacgctcgagctcggggcgggccacctgtacggcagcagcctgcccgtcggaggcaagggcacgcacgcggtcatcaccgggcacaggggcctggtcaaggcattgatgttcaccaggctcgacgagctcaagaagggcgattccttctacatcaaggtgatgggcgagaccctgggctacaaggtcgaccgcgtcagcgtgatcgaaccgtccgacgtgtcgagactcaggatcgtcaggggcgaggaccgcgtcaccctgatgacgtgcacgccgtacggggtgaacacgcaccgtctgctcgtgtccggactgcgcgccgcgatcccggcggaggtcccggacgagtcacaggtcatcgacccgcgtccggttcctccgtccgtggtggcggcctacgtgctcgcggcgttgtgcgtgccgccgttgttcgcaagggatcccggtccgcggcgtcatagttcgggcgtgaaatccgattccgtccctggaaggaagcactgatgagaatggcagaaaacggaaaaaccaccggggggggggtatagattcctccttgctataatggtcgccctcgccatggtgctcgcgttgtcggtggccggcaccgcgagcggcgaggacatgccggccggcacgtccgcggcggaggcggcggtgaagtccgccggcaagacgggcgagattacgttccccgccggctcgtacatcgtcgacatgggcgacacctcttctgacgaggcccagctcaaaccatacggcctcatctacgatctcgtcctcaacgccaaggtcccggtgtactgggtcgtcaacgggagcaagaccagccagaccggcgtggacctcacctacaacggcaaggactacatctccggcccgttcgtcatatccggcgacgacgtcgatgacaacgtcagctcgatgctgtccaagtggcgcggctacggcgtgtccatcgacgggcccaccggcaccgccgtcaccgtcaataacagccggaagatctcctcggttccccgcgtcgtgctcgacaagcagaacggcaagatagccaaaggctacctcgtcaagtccggcatcctgcagaacgagaatgccaccgatgaccgcgtctacaaagaaaaagcgactccggcggacctggattcctcctgcgacgacatctacgtcatgccgcacgccgaaccgaccaccgcgacgcatggcccactcgcctccttcaacaagggcggcggctacatctgggccggatgccacgccgtctcctatctcgaaagcaataccagtggcaagggcgtggatgacgggtccatgttcttcctgtccaccaacggtctgctcatcggagacaagcacaaaagagcgtcgggcataagcggctcctaccaggtgacgggcgccgcgtcggacccgatcatgcagttcgtcgggaacacgttcgccgcgcacgccaacggagcggaagagatctacatgcccgcccccggcagcgcgtggcgcgccaccaccagggtgctggagaccgacccgaaccaggaggacgtgcgcaagggaagctcccccggcccggccgtgttcatggccgtgggccccggatacggcgactacagcaacggcatggtcatgtacgaggccggacacgaattcaaatccgacgccggccgcaaaaaacccggccccgaccacaacaaacccggcaccgaccccggcgccagccgcaacgccatacgagcgttcctgaacttcctcatcctgtccggagtggagaaaagcctcgacgtgaaggccatgatcccgtccgacgccacggccggatcgaccgtgcaggcttctgtgaccgtcaccaaaggcacgccgccatacacgtaccagtggcaatccgactgcaacgcgtcgttctccgacccggccggatcggccacttccatcacgttcccgaacgaaggcccatgccatgtgaaggtcacggttaacgaccgatgcggccgcgccacgttcgacacccggctggtcgacgtcaagacccgcaagggaaccgtctcatggcgcaagaccgacaccgaaaacaatccgctggccggatcctcctggaccctgaacggcccggacggccagtccaggaccatcacggacaacggcgacggcgacgaggacctgaccgacggatcgttcagggtgacgggcctcgacatgggcgcatacacgctcaccgaatcccaagccccgtccgggttccgaaaggatgacacgacacacctgttcacgctcgacaacacgcatcccgactggacgttcgccagtggattcgtcaacagcccgacacccgccaaggtcaccgtgaacggctccaaaaccctgaccggccgcgattcgaagaacggcgagacgttcaggttcacgttcagcccatccgaccagaccaccggacaggccatacgagccgggaccatcacggtatccggaacacggtccgtcggcggtctgcgggacggcttggccaaggacttcgccttggccacggcgaccgtgtccaaggccggcacgtacacgttcgacgcggccgaggaccggacggactgcccgggcgaccttgcctgctcgaaggccggataccggatcaccatcacggccaccggcggcaccgcatccaccggcgccctcaccgtccatgcctccatcgcaaggaccagggacgacgagggaaacacggccgacgccaccggcatcgcgaaggcggcgttcacgaacacgcgggtcgcacagagcgcgctgccgttgacgggcgcgtccgaggcccggaacaacacgatcctcggcctgtccttcatcgccgcggcgctcgtgctggccgtcctcggagcgaaacgctccagggcgtagcgacagatttcgcgcgccgcacgcgcggcgcgcggcccgtccggccgtccggccgaacggtcttccatgaaaagaaggagagttccctatgaaactcactaagatcacggcgatggtcgcggccatcgccaccgccgcgggactgggggccgtcgcggcctccagcgccagcgcggaagtgcagacgagcggcgatgagaccatcacgctgaacgccacgagcgcggaccaattgaccggccacacgttcaaggccgtgaaggtcgcgtcctacgacgtgtacggcaccgccccgaaccagagcgtcaccctcaagaccgaggacggcctcaagcaggatatcgccgactacctgaactatacgggcaccggcgatccgctcgcctgggcgcagcagcaggacaaggccaagctcgaccagtccacgacgagcccgtggctcggcgacggcaccacccgcaacctcgccgacaagctcgcgtccaaggccacgaccgacgtcaagccgatcctgtccgacagcaaccagcaggccacgttcacgctggccagcccgggcctgtggctgatcgtcgaccaagccgcgaccggcaagagcagcaaggccctgccgatcctcgccggcaccccgctgaccatcaacaacacggtgtattccaacggcaagatcgacatgaagaaccagaccgcgtcggtcagcaagaccgtgaccgaccagaccgtcgcagccggccaggacgcctcctacaagatcacgaccacggtcccgaactacgtgggctacaaggtcaacggctaccagttcaccgtgtccgataagttcgcggacaaggcgccactggcctacaaggccaacaccctgaccgtcaagatcggcgacgatgttttgaaggccggcaccgactacacggtcacaggcttcaccggcagcaccggcaacaccggcgccgcgaacaccccgacggccacgtatccgaacgatccgaccaacaacacgagcaagcaggaagtgccgggcaccccggtcaaggtcttcaacttcgactacaccctggtcaagaaggacaagaccaccggcgacacgctcgagggcgccaagttcgccatcaagcagaacggcaagtacctcgcctacacccgcgaccaggacggcagcaacaagtggttcaccctcaacgccaagccggaatccaccgccgacggcaccccccacggcgtgttcaccaccggcagtgacggcaaggtcaagttcccggcccttgacgagggcaagtacaccatcgaggagatcgcagccccgaacggctacgtcaacccgggcgtgtccttcatcttcacgatcgcggccaacctctccggcaccggcgcagcccagaccgcgaaaccgacctacacggtcgacgcggatgatctcaccagcgatcgttggggactggtctccaacggcaacaccgccgaagtggtcgtggagaacgtgaagagcatcacccagctgccgctcaccggcggcgcgggcaccgtgctgttcaccgtggtcgcggccctcctgatcggcgccggcgtgaccgtcggcgtcaggtcccgcaaggcgagcaccatcgcctgaacggtctgacgggcatctcctcggcccttcgggtccttctccctccggggatgtccattcgaaaaaagaggccggcctcccatggaaaccgccatgggaggccggcctctgccgcatatgtcgtctcatacggaaaggaacggcgatgagaagggagttcactcctgacgagatctcgtacctgcgcggcctgtgggccgtgtccaacgtcactccgacgcgcatcatctattccgacgagttcaaagaatacttcctccgcgagcacgggaaaggcagggggccgaccgagatcttccgcgacgccggactgccggtgctgatcatcggcaggaaacgcatcgaacgctgcaccacccggtggatccggccggaccatgtcgacgggttcatggtcccggcgccgccggaagaggacggcctgtccacggacgaaaggatcctcgcggcgacgcgggatcttctggacggcctgttcgagttgctgtcccggaccgaacggatcatccacctgctcgaggaggaacaacggccggaccggccggaccatgtccggtccgatgccgggccggacgatggacgcctatgccccgcgccgtgatggaggggtcccgtctccgacgaccgttcggcgggttccgccgccgcggccggtgtccggtgggaacgcccatgccgtccggatccggcggtggcgccgtacgggttcattcgaccatgcggcggaaaggacgcgccggcgtcttcccgccgcatgcccgcccccggatgtctgttcctccggttccagccgcgctgttccgtcgggtcgcgcgagcgtgggccgctgatcatgttcgacgatcacctgccgcgcccgaaggcggggcgggcgatctgtaaggcccgtcgaagtgtctgcgttcaatgcgaaggcaatggttcggccacgaaacgccgacttcggccgaatacgtcgtggggtggaatggcggcccgccatgtttcggatcgcgtccgttttccgtgaaggacggcgggggcggtgggccggacctcgcttcgatcggcgatgacgacattccatatatttatttaaataattagggtgtatttaagttttgcgtgataattgtcgtatgtgtacgccgaggtatgacgtcacgcttgaccggttcatgagttcatgagggtcgcgcatccgttgccgcgcccgcgccggagcccgccgtggccgacaaccacacgttcgtcaacgccctgccgtggatgtgccgcacgggagccccgtggagggacctgccggagcgccacggcaagtgggtcaccgtctaccggcggttcaaccgctggcccggggacggcgcgatggagcacctgctcatggaccgcgcgcacgagggggatcccacccggccgccggccgagtcgttcggcctgacgccggttgcgccgcccaagaggaaccgtacggccccatgggattgcgacagggaggcgcacaaggggcggaacatggtcgaacgcgtcttcaaccgcatgaagcgctaccgcaaggccgccacccgctacgacaggctcgacgaggccttcctcgccgacctccggctcatcctcatcgacacatctacctgaaaaaacacagccaaaacccaactagcgtaaacacaccctagccacctgcggactctaccgtgaagcctcatgccgccagtgggagccggaaaccaagaccgatcggtgccctcataccgttcgagccgtggagcaacgccacgcacaacgcgaagctgcaagtcaagctcgacaaatggattaacgaggaccagagcaggtcgggcctcgtgctggccggcttcgaccgcgacgacccggacggccccttcgcgctattgagcaagccgcaggacgtggacgtggtgaagacgctcagcggcgacaggaaggtggtcgccctgtccgcgtcgcagagggtcgcctccagcgccgccgcgaggaaggtcgccgcatactacgaggaccagttcggcggcaattggaggatgaccgagttcaggccatacgagggcgaggccgtgttcgagccgctggacggcaaggtcgccacggcgagggggttgctggcgagcaacgggttcaagtgcgagccgtgggacatctatgtgtcaaagcgccggggcggagggttcaagtgccctgagtgtggcaattccgatccaagcaagtgcaacgtgacgaagcgtacttgcgggtatttgggtaacccagttcagcgcccgatggttcatggtcgccatgaggagattgcgcaccgcgtcaagcatatgagtggtgagactggccacgtgattttgtctgatggcagtacaagggattggtacgaagagacgaagtagcgtatgctggacgccatcttcgaatatcaggagatgttcgaagatggcgttcagatgcaggccagtggagaggtgagtggttacatggtttctcgctggtcgagggtgaaggccgggtgcgcgttcgcgctggcgtgtgtgttgccttgcgcgtggacgcccggcgcgttcgcggcggatgacgggcgttggccggtggcgaacgatgtggtggctgccgcgtggaagcagggcattgatggttccggtgtgaaggtggcggtgctggattcgcaggcggtggaggattatcccgcgttgaagcatgcctcgatcacatacaagctgggacgattccataacgtggatgacaagacggtcgagtgcaaggtggacggcaagccgttgaccgcgacgatcaagtccggtgaaggcggctactactcctcgcacggcaccgacatgctggcatggatcgtgggtgatggaagcaactacacctcgaagtggcccggaatcatggggtcggcgcccaaagcggacgtgttgcatattacggatggggcggttaatgcggggcctgctgtgacaccttgcgatcagaaactcgcgggtgatgcgacaagcgacagtggtgcagatgtcaagacggcggtggactggggcgctcgcatcctcaaccgttctcagggaggtgctctcgtcagcacggattatgctgggtatgtggatgccctgcgtcatggggtcgtcatggtcgaaggacgtgcgaatgacatgaatcccggcttggatgatctgaccggcgacccgcgcagcatggagaccttccccggtgtggtgatggtgaacagcgtggacgagtctgggaacctagctcccacctcggatgttatggacggcaatgtggcggtgctgtcctatggcatgaacgtattagactcggtcaatcctctttcgaatgtctacgatatcgcgggcaatggcggcacgtcaaccgcggcagcggtgttgtcatcgtacttggcgctggccatgcagaagtggcccgacgcgacgggcaaccagatcatccagtctttgatacgcaacacgaagagcggcaagggcaagccggtcattgaccctgaacgcaagcgagggttcggtgaggtggacctgaatgcgttgctgacggttgacccggcccagtacaaggatgtgaatccgattctggagtaccagatgaaagcggccgcccaatacccggatctgaaggactggtacacgcaggattgcaagacgaacccggacggcgttggcaccgcggcggataatgtcccatgtgaggccgggctcatcgggcgggagtatgagcgtcagcaggcggcgtggaagaaggtggagcagtgccgttccgatggcggctccgactgcatacaatactccgcgacgaacaccgccaatggtgcgaccacgtcaaccaagacgctgggaagaaagggtacgttccttgtctcgacgtggctggcttacatgattgctggtggtgtgaccgccctaatcgccggagtggtgattgcattgatcttcgttcatcgtcggcgtcgcgctgactaatgttggcaggatggtattgtgagcggtaatgatttggtagcgtaggcgccacgcgtaaacggccttcggggcacagacctcttcggaagccaaggccacggttccgggttcccccggccgtggccttttccatcgttcgcttggaaggcggattatgaaacgtgacatctccggatggctcggcgtcgtcctcctgctgctcggcgggctgacgctcagcgcaccattcgtcctgcaagccatcgactccgccgggcagaccgcgagcgccgaggccgcagccctgcccacaccggacggcaggggatgatcgaggaagacaaggcatacaacgagggcctttcggcaaggccgcagtcggtgcttggcgaggccggggacaccttctcaaggacctcatacagcgggggggggacaaggagtaccgtgggctgctcgacgtggacggcaagggcacaatgggggcggtccgctatccgaggctgcacatagcctgccggtgcgccacggcacggactccgccacgctggagaaatcggcggggcacctctacgggacgtcgctgccggtgggagacgaatccacgcacgcggtcatcgcggcccaccggggtctggcggacaggctgatgttcacgaaccttgggctcgccaagaaaggagacctgttcgagatcgacgtgcagggggagcggctgcgttacagggtgacgaacagcatgggggagtccacgcctttttgcttgcgtatggcgagccattcgtccagcgccccgcacatcacatcgtccaagaccacgattctctcgccgctgtccgtcttgggcgggcacagccagaagccgttgcccagatcggtcacgtcctcgcccagaggccagtccgccttccttgagtccgggattcgctgcaactggtggtcgatcaccaaggcgcgtctgccgttcagcgtcgtcagctcgtccatcgtcagtccgagccgttcgccctgcctcagtccggtggcgaaggcgagcagccagttgagacgccacatcgggtcgggctcgttccttatcagctccgccgcctgcgcgggggacaggaccttcatcggcctgcgcctgcccgacaccgggcggaccatcttggccgggttcctccgtatgaggttttcgtcacgcgcggcctcaagcgcgttcttcaggacggaccaagtgatcgtggctgtcttcgggctgtagcacttcaggccgtcctgaatgtcggccatgtccttgtggcccagcgagttgatgcgcctcgcgccggctatcctgttcagccgcacgatggcgttctcgtagcttcgcctgctgttcggacgcaggttggcctcggcccgctcgtggtaccaagtctccagccagtccatgaggcg

SEQ ID NO: 1052 - DNA, 6157 bp, Unknown
  R13_10m  MAG No. k141_2534
gtgcagctcaattccttcggctgtggccttgacgccatcaccaccgatcaggtggccgaaatcctggcagacaaggcggacgtgtacacgctgctgaagattgacgaggtctccaacctgggtgccgccaagattcgactgcgctcgctcaaggccgccgtcgaggaacgcgaagccaacaaggcccgcgaagccgccgcggccaaggccgtgcaaggccccaagtccgccggattccgcaagaccggctccaccgcgccaacccccggccgccagattctgcttgacagcaccatggccgccaacccgaagctcaccaaggccatgcgcgccgcctccaagcgtgccgccgaacgcgacctgcaggccgcagtcgccagcaagaacggcacttcggacggcaccaccggcgtgacgaacgccaagaacgccaagaagtccggccacaacaacgccaccatgtcccgctacgctcatcgtgagaagttcgtcaaggacatgaagaagaactatacgattgttggccctcagatgagcccgattcacatgtccttggtcgaagcggtgattcgttccggtgggtacaagttcgacatcctgaagcacgcgagccgtggcgatgtggaaaccggcctcaaatacgtgaacaacgacgcctgctacccggccatcatggtcgtcggccagctcatcgacgcgattctggaaggcaaatacgatcccgaccatgtagcgctcgccatcacccagaccggcggcatgtgccgtgcgaccaactacttcggcctgatccgcaaggccttggtcgatgccggttacccacagattccggtcatcgccatttctacccagggcctcgaagacaaccccggcttcaaggccaccctgcccctgctgcaccgtgccatcaaggcgctgattctgggcgacttgctcatgaagtgcctctaccgcgtacgcccgtatgaggtggagaaaggttcggccaacaagctgtacgagctgtgggacaccatcgtgcgtgagaccatcgagcatcacggctattccaagaccgcagccaagacgccgagcatcaagaagggctatctgccgtataacgtgctggccaaggagatcgtgaagtccttcgacaatctgccgctgcgcgacatcccgcgcaaggtgcgtgtcggcgtggtcggcgagattcttgtcaagtaccagccggacgcgaacaaccacgtggtcgacgtcatcgaatcccaggattgcgaggccgtggtgcccggcatcatggaattcatgaccacccgcccctacatcaccgactggaacgagaagaacctcggcatgggcggcaacaagacggtttacgccctgatgcgcaagggcctcgacctgtacaacgcgccgatcaaggccgcgctggccacatcgaacggcaagttcaagcaggacgagccgatgcccgaactggtcaagaaggccgccgaagtcacctccatcggcgtgcaggccggtgaaggctggctgctgacggccgagattctggaactcatcgaacagggttgcccgaacgtgatctgcgcgcagccgttcgcctgcctgcccaaccatgtgaccggccgcggcatgttcggcaagatccgccgcctgcatccggaagccaacatcgtctccatcgattacgatccgggtgcctccgaggcgaaccagctcaatcgtatcaagctgatgatcgccgccgccaagaaggctcacaacgccaagttcgccgaggccggcgagccgcagggcttcacctccgcggactgatttatgctctggctcgtccgcaattaaggacgagcttcgctcgcgacatgctggttcgcctatcggctcaccctcgcctacggacagcccacagggctgtccgctttacggctcggcctctgtgaggggagctgtcgcgcagcgactgaggggagtctctagagcgagaaaccgggccggagcctgctatcggtttttcgtatagcgtattgcgggctttcgggcacgcgcgccggccggctcgaatacgatacaaagcatggttactccccgaatcagttacgcgcacctgctcgccaagccgaaccccaagcacgtcgaaagcctactcaagttctttgagaacggtcgctcccagcgtggcaccggtggcttcggtgtggagatcgagcacctgcccgtgcacaacagcgacgacactgccgtaagctactacgagccgaatggcatcgaggcattgctcaaacgcctggctccgtactacgacgaggagaaggaatactgggagaacggccatctggtgggtctcggccgttccggcgtcgccgtttctctcgagcccggcggacaggtggaaacctcaatcggcattttgaagaagccgagcgacctaaatacgctgtactccaagttccgtcgcgagctcgacccgattcttgacgatctcgacttccgcttggtcaactatggttaccagcccaaatccagctttgcggatgtgccggtcaaccccaaggatcgctacgatgcaatgaccgactacctcggccgcgtgggtcagttcggcccatgcatgatgcgttgctccgcctccacccaggtcagcatcgactacgtggacgagcgcgattccatcgaaaaactgcggttgggcaccgtcatcggtccgattctggcgtacttcttccgcaacaccccgtatttcgaaggtgagacgaacccatggccgttgctgcgccagcgcatgtgggattatctcgacttccagcgcacgaatgtgctgccgggcctgttcgacccgcgctatgggtgggaggattacgccatcgacgtgctgtccacgccgctcatgttcgctgacctgacccatacccctgaagctgtggcttctggagcaagtcctaaggaactgcatcgcccggccttccgcgagaacgcgggggaggtgtacccggaccgcgaactcaacccgtacgagatcaaccacatcatctccacgcacttcaatgacgtacgcctgaagaacttcatcgagcttcgccactgggattccttgccgatcgagcgtgccgaacgtctgacggagattgtgtcctctctgttctacgtgcccgagcatcgcgaccgcttggaaagctacttcgagggcatcagcgaggaagaggtgttcgaggccaaggccaacattcaggcccacggccgcgaagccacgccgtacggccagccgctcgacttctggaaggaattcctgggattggagggcctcttgtccgacattcccggcgatctgaagcaccccgacgtgttccaggagtaagcgaagaagcatatacagaaaaatctattgcgcgatatcggtgtcgaaggcatgacagaatgttttgttttggcaccgttttgcatatccggccaaggatattggatgtggttgcgcatgggagtggggagaatgcggatagactggcggatatgacatctgggaattcattgcagcataagcgtgttcgcaagtcgccgggggaacgccggcaggaaattctcgatgccgccgtgcgactgatttccgagcgtggctacaacggtacttctgtgcaggatgtggccgatgcggtcggtgttaccaagcagggagttttgcgatattttcctagcaaagataacctgcttgccgcgatgtatcacgagaattacaacacgtttggcagtgtggaagacttcatggcctccggcctgcctggttcagtgcccgatgatttcagattacccgcgtatctgaggttcttggtacattgcaattccacgcgccccatgcttgttcagctgttctcgatgttgcaggtcgaatcgttcaatcctgcgcatccgttacatgacgagtttgccaatcgtcgggattcaatatggcgatactattcgacatacaactggaacctgccttccgaattcacctcgtttgaggaggtccggcccacgttgcgccatgctctggagatcatggatggtgtgcaactgaggtggttacgggggccggccattgacttatgcgatgaatgggccgatctggagccggcgatatttccttcgccgatatgggacgggtatcgctgattcgctgtgtgccttgaactgaggcttgtgcttgatggcggcagtaagtatgcgggcgaacgaaggggtcgcatacatacggtcgttttggtgtatgtgatgcgcgcggcataagcgtgttgtatgctgtcaatagataaactaccaattggtaattaaaaagctgttcgatttcactgaggaaagcgacttcgtatgaccgacaacaccacgcctgccgcaactgctgaaaccttaccgtacaagaatcctgatttgcccgctggtgagcgaatcgccgacttgctctcccgtatgacacttgaggagaaggtcggccagatgatgcagcttgacgcccgcggcggcgatcttgaggatctcatcgtgaataagcatgtcggatccattctgcataccagccccgaggatttatctcgtgccgccaagaccgtcaatgagaagacgcgtctgggcatcccgttgattatcggagatgactgcatccatggatactccttctggcccggcgccacgatcttcccctcccagctcggcatggccgtcagctgggacgccgccaaagtcgaagccgctggccgcgccaccgccgaagaggtctcctgcaccggcgtgcactggacgttctccccggtgctgtgcatcgcccgcgacacccgttggggccgcgtggacgagacctttggcgaggacccgatgctgatcggcgaactcgcctccgccatggtcaagggctatcaaggcggcgccaaggccggcgaggccctgccgaagaacgcgatcctgccctgcgccaaacatttcgccggctattccgaaacccaaggcggccgtgacgcctccgaagccgacctctcccaccgcaagctcgaatcctggttcctgccgccgttcgagcgcgtggccaaagaaggttgcggcacgttcatgctcggctacgagtccatcgaaggcgtgccggtcacgttcaacaaatggctgctgaccgacaagctgcgcggcgcatggcaatacaatggcacgctgatcaccgattgggacaacgtcggccgctcggtatgggagcagcatgtcaagcccgattacgtgcacgccgcagccgacgcggtcaaggccggcaacgacctggtcatgaccaccccacagttctatgagggagccatcgaagccgtaaaaaccggtctgctcgacgaatccctgattgacgatgcggtagcccgcatcctggccctgaaattccgcctcggcttgttcgaagacccgcgtctgccggacgccgaacgtatcaaggcggtcatcggttcggccgaacaccagcaaatcaacctggagctcgcccgcgaatccatcgcactgctgcgcaacgacggtgctttgccgtttgccgcaaacaaggccaagcgcatcgccgtggtaggtccgctcgccgacgacgcccagaaccagctcggcgactggaccggcaactccggtcaggtttcctggatgccggatggccagcctcgagacatgattaccaccgtgctcgacggcctgacccagctcaccgccgacgattgcgaagtggtctactcgcgcggcgcgaacgtcatcgacctcgtgcctgaccctgccggcgaattctacccggacggccagcctcgcccgaaaatcggcgtttccgccgccgtcgatcaagcgatgatcgacgaagccgtggccaacgctcgccagtccgatctgatcgtggccgtggtcggcgacgtggtccagctggtcggcgaaacctgctccactgccacgctcgaactgctcggcggccagaacgccctgctcgacgcgctcgctgccgtctcgcgcgaaaccggcaagccgatggtcaccgtgctcatcagctccaagccgcaggtgttgcccgcctccatcgtgggggagtacggcgtgttcgccaagcgcgtcagcgaccctgaaaccggcaccggctccatcctgtgggcgccgaacccgggcatgcgcggcggtcaggccatcgccgaaataatcctgggcctga

SEQ ID NO: 1053 - DNA, 65461 bp, Unknown
  R13_10m  MAG No. k141_2631
gcccgtcgcatcatgaggtctgcgcacatcatggagactctatctaccgaaacccacaaacccagcaacagcaaggctttctaccaattcccagaatgagtgtaccactctgttcgccgctcaaagcccgccagaaggaaatttgcgcttttccataccttcacgccgacaagaggtgtcacgattacctatatctcccatactttctatgttttcttaaaaacaatctatacatctagcagaaccggggagaccgtagtcccatggtccgctgcttgcatctatgaggaagtcatacggcaggaaggctaccgtctccgacggcatatgcaccttcataagcggccgccacgcaaaaaagtggcgccgatcccagcgtcatcgaagactgagtgtttcaatatccggtgcggacttgtgtgcatcagacgtctgtgcgattgaagcaaaccgacatcgaatccataggccatacggcccggatcatttgaatcacgattcagagtcaacagatcgtcgacatgaaatgtgcgtgcggcaacgaaacgagtgaatgaccgaccgcaaaagccggattgcgggtggacaccttacaaggaaagctcgcgatagaccaggtcgtctcggattgcaaagccctgctgctcccagaagtcgttgccggccttgttgtccgcatatacgccgacggcaaacttcggcaacccgagtgcgcgaagcgcctcgaccgcatgcccggccaaaagtgagccaacacccatgccgcgcgcttcaggatggaccgcagtgtgatagatgcgtgaccgtctgccgtcatggccggcgaggatagccccgatgatgttcccgccgtcgccctcgtcttgctcaccacgattctgggcggttcccagtcgccgagtcttatatgccgttcaacgtcagcgagccaggcctccgccattgcggtgtagtcggcgtcgaatcgtctcgaataatgcttcggcaaatcgggccatttggcataggcccataccggcggctggtagcgtgcctccacatacctgcgtttttccgtccctagaggttctggacacgaccgaaccgaatcctacggcgcccgctcatcgcattcctccggatccctgaatcccaaagattccaaggattccaacgcattttgaggatcccttgtgcaatagacccgcgaaaagagcaaaagtgtaaaggaaaatggtcttcaatcccaatgattccaatacttccaacacttttcgacctgaaggaaaagtgtaagaaggtgtaggaagatgtaaaagtgtaaacaccgtcggaatcgacggagacgttctcatatggcacgccgatcgatcatcgaatgtcatgagtggctcccttcaggcatagagtggtgcaccgatttggcctaccggatgcaccacgtaacgtgccaccgatatcgtcgggccgaacaccctctgaagacactacaaggaaactattgtccaagccgttcggaatcgttgaaaggaagctgttttcggcaaaagaaaagggctttcgaatttcttcgaaagccctgctagcggaggatacgagattccggcggcgacctgctgttttcggcttgatttcaacgtttctgggctgccgcttaagtgcttcgccgcttaattcgccgcctctccggcgtgtcgtgacgggttgaaacggacggttatgaacaggtgttttttgggttgcgtgaaacaggggagactattgaggatgctttttccatgaagagcgtgtagttcaaccagtatatagaacggcctccctttgccagcagtagtgatgtgctaaagattacgattccgaaagaggtaatgcgatttgtctcccataggcaaagtgaaaataaaggtaaaatggccgtcgttaaagtccagatgataatacttagccagtttcttgctaattcttcggggaatctctttcgtgcttctaccataaaatgtgaatttgactggtatagcatcgtacatataaatgttgctgtagccatgactaatccggagagggtcgatagcccgatgaataaatcattgggactgccatctccaggtagttgaggtactggattgctgagaagccaccaagtagcggttattatggttgcgcctaggatgtcagtggcgggatgcgccataattccatttattaatgttaaatgtggcattaattactctttgaaatatcgtataaataagtctctttatcgactgaaacagtaattaaatgattgattaggccagtgaataatcgtggttcgtcattggatattgtaatctcgctttgttctactacaggatgggatactaaatttaattccaacagtttgtctgcgaaatcaggtccacttacttgaacttttctgttctgatttactgcagatatgatgaaatcttgcattatgtctttaaaaacgcgacgagcttttccatatgctgtatcgtctgtcaggctaatcctaatgtcgatatcaagatcggctcctactttttgtgcaatttcttgataaaattctcctgcgttaccttttatttcataagctttatcaataaaattttttgttgtgaatgatgctgtgagggaatctattccgcgaagttcttttttgaaacgctcgatgctatctgctgtgatgacgggaataacatcccattcataatcttcttcaggccagtaatagtttagtgcttttttgagggggtctacgcttttaccggcattgccacttactctgctgacaagagaatattttgggaagaaggcgaatgctgacgattttgctaaattgtttgtgttgctatatgcctcgctgtccatgaaatcagtgactctcttgtgttcctgatcaatgagctgcataaaatttggctggaattgttcaaaaactgtaagtactggataatgcttgtctgttacagaatcaaaaataatattatcgagtattttattttcccaagggaattcacgaaattcactgagacgcttcatccaattgatatgtcccgtggttccattgctgataccatcacgagacctcagccggagccagtagaactgcactgttctttgaatcacgcttgtcaagttgttcacctgcttagtaagtcatatctacctaatgccaatcattgtacttcatttttctggtgcgacgattgggatgaaggactctacggcccttcctaaagaaagtgtttgtggcagccgccgtagttgtattgagcgcatgctttatgtgtggaaaataacggggagaaatctgcccaatactccggggtagcgtggagcaggccggggaggagtatcctccctggtgttgttaagcggcgtcggcgaggaagatgtgcttgtggtggtattcgatgaattcgtgtgaaggttggctgattgtcggtaatgagatttcgcgtccttcgaagttgtagagccatttgtcgttgatatcagagtgccgaaccttgtcatgattgaccatgatgcgatagtcatcatcgatggagataaggccctgatcgaaggcacggtcgtggaaggcgttgagcagcagcccgttggatgcggcggttttctcaacggctgacgatgccttccacggtttgatgtggctggcgatcagcagcttaggaatctgcataccggttatacagcaggtgctgtggtagttctgcaatagtgagttgcggaaataggattggttgactcgctgaagtgttgttattggtcgttcctctccggtgggcgtgtgttcggcaacgagtagggtcgttgcggtttcgagaggggaataacggtcggaggccagcggtgctgggttgaagttgttcgcgtccgcttgcaggagcgcgtgccgaagtagattcagacattgctccatgaacgtatcggggtcttcggcataccactgccagacttgggagtcgagtttgctgccgtgcttcatgcctacgcgcccacgggccttgcggttggcatcataagctgcgatgttccagatcttcaacaccactgagctgggagtgcggtgcaagaacgatgcgagacgttgcacgtcaagtcctttgtcatcgcattcgcgtggtttaagcacgatgtacaaggcgaacgccatcattgtttcctcgcgtgaccaattacggcgaggtgttgatgtactgacgtctgatgccatgaatccaggatagtgcggaatggttcgtgtctgtgctttgtatgcggtatgtcttgtgagtcttagcttgtactcgctgcttcgtgtctgaaatctagtgggaagcagtggtaagcggactgattttcttgaagctgccgtaaggactatgctttcaatgattttggggtttgctttgcgtgctggtcgtgcgttctacagcgacaagagcgacaagagggaatctagtgagaagtgcgaggttgagggggtcaagcatgctaggaatcctaatgttttcaagggttattaacccattggaagagttcgatcggctttgaatcttcggcatatagagcgattacagagaatctagtgggaactagagcgaatctagtgagtctacatggaaatcaagtgctagtcggagagacgcgtcgaaatcccaataatttcaacgatttcaggggaatcagacaatgctgtcttacgacagcattgcggctagatggaaatctagagtgcgtacatggaaatccggtagggctgcatggaaatcaattcatgttaaccaatgggtgcgcgaagtatgcgtacagtccttgggtgcattgagaccagtatgaagagcagctggcattgatatgaactgatttttgttccgtatttcctctaactcgatgggagatgatggaaccatggcaaagggcactcgatatacgccggagttcaaggcgaaggcggtcagactgctggcggaatcgcgttcctcgtattcgccggagacgaacgcgatcgccgcggtggcgaaggatccggggatagcgccggaatcactgcggcgttggcgcgaccagtcggacgcgacggtcgcggaggagacgaggcagtcggccgaggacgcgatggcggagctgaggaggctgcgggccgagaacgcggaattgcgtcgggcgaacgagattttgacgacggcgtcggcttttttcgcggccgggctcgatccgacacggcgttgatggccgcgtacgtcgacgggcatgaaagccgtttcaaggtcgggccgatccgcagggtcctttccgaatcgttggactgcgggtttctcacgccgcgcggctaccgcatgctcgaaacgcgtcccgtcagccgcatgcgggcggggcatggggcgctggcccgcgacatcctccaggtccactcggatttcttcatggccgtgtacggttacgggaagatgcacgcgcagctggtcgcccagggctgggattcggccggggccggccgcgaccaggtgatgaacatcatgcgcgagcttggcatccggggcgtgcgccgcggcagaaccccggtgacgacggaacccgccaagggcacgggcggcaggccggatccggtggacgggaggttcgaggcttgtgcgccgaaccgcctgcacgtggccgacaccgcctacgtgcgcatggccaacggctcgttcggctacacggcgttcgtcaccgacgtgtacgcccgtcggatcgtgggatgggcgtgcgccatggccatgaacacgcaggagctgccgttgcaggcgttggagcaggcggtctcatgggccgcgtcccgcggcggcgcggatggtcttatccaccacagcgaccatggcacgcagtacaccggcacggtgtacaccaccagggttatggaatatgggatgctgccgtcgaccggcaccgtcggcgactcgtacgacaacgccatggccgaaagcgccgacggcgcgtacaagaccgagctggtatggcggcgcaaacccttcgcggatctgaaggacctggaattggcgacgttccggtgggtctcgtggtggaactcgaagcgcctgcaccagtccctgggctacaggacacccgaagcggcggaaaccgagtatcatcaacatcaagcggcacaagccgccccactataaggacggaacaaaaatcaggccacttcaccatgcgacttgcggccgtcgatatactcgacattgatttcaatgagctgtgcgttggcagccgcaacaggctggggaatagcggggcgttcgttgacgtttttctattcgactctctctcaagcggtgctggttattcctctgagctggcttctgagcatatactgaaacagctttttaacaagacaaaggatattttgacgaattgcaactgccaagatgcatgtttctcttgtctgaagcatttcaacaacaagttaacgcacagcaagctcgatcgtttcgctggactggatttactcgaatacgcaatatgcggaacgtttaagtcatcagtaacggcaggtgatgtggaagaggccttctctcaagtccgagaagtgttgaagttcgaaacgggtataacgacaaagctggagggaaacgagctaagggtcagcggaaaaggaattagccgcgctctcaggtgtctgccggatatggctcccaaaactcggggagaatcgggtgatgaattctggaagtatcagttgacccatgatgtgccggctgtcgttgaacagattctcgacaaatgaagtaactgatttggttcctccccgtagcgggtaggaccaaatcagattaggagtgcattcattagggtgcatatgtctcaagcattatgccgtgagctggtttatagtcccatagccttagccatatggttgatctgagcgcgtccttttgcggggctgattggctccggcctcgtgtggagtatcttattggtacgaaaatcctcggggtgctggtcaaaatagtcaattgccatcttgcagattgactgtagtgcatttatcgtctcgatcagtttcgggcagtcttgataagacattgccgaataatcgtaccttttcgttaggcgatgtaggaagtcctgtgttttcagtttggcggtattccgcacgccggggctatcgacaaggatgaggaatccgcagatcgttgccgcaaaatcatgtgtcaaagggtaagtgcggaatgcgtcgaataattgtttggggttttctctatggttgagctctttgacgcagtttttcacatacaaggtcggtttaatctgtttttcgataccgatcattaggcagttgttgtgcgaagaggcattgcgcataatccggatggattggaacagattcgtcgcgttgtctttgtagctccgctggtttaagtatgccttgtagagtttgcatagtgtactgaagtcaatcacttcccaaagattccaaattgaaggatcttcgaaatacttgttcagcaagccttcggtgtaattggagtgatgataacgtgagttcacatagtctccatggaatgagaattcaccggcttcgtcgaagttgtgcacgatgttgtagccatcttcattagcgtcttccatgatgagttgattgaaacgcactttcaaggcgtgttcgaggttgagacaaaggtagcttagtagcgttcgcaggtggcagtcgatggtggatagatctgcgagatatgcgaaatccagtccacggtaccggccgttatctcgctcgaaattgttttcgaaggctttgagcttgaagaaatacgtacggctggttaggaactcttgcgcgtctgcttccgtgtacagattaaatgtgacgccatgcgatttcagagattcgatctgctgacttacgctgtatttcggacgccgcatagtacctcataataaccaatggggcgcacgctacaagagcgccgccccacctggtaggacccctgacataaaatcaaggccttttgttcaatcagtcacaaatttacagtgcgaaatagcgcatgtcaagtatggagtgttgtcgctatgctcaatttgctgtgaacttatcacatccacggccatagtcttggaagccgctattatttgtacttccgccgagccatctcgcggcgggccttgcaggcccacaggcctcccttgccgatgagctcattcaattgcgtggcgttgagctgttggtagtgcaggtctgttgcgtagggagggagactcgccttccatccggcaatgtctgtgacggaaccgtcggcttcgcctgttgcgggatgatgagtggcgttctcgctcgcgccgtcttgccagttcagatgtcggttcgtttgccgtaaggccttgcaaatcttgcgttttctccgggatcgcccacggatcggcatcgtcggacaaggtgggaaacgccgtcttgtctggttcgtgcagaacgttgcaatagcttggttttgacgaagacggcaagatggcagtagctcttgtgacagcgaccggatccggcacagttgcttctggagtctcagtttgttcaccgctgagggtgtccgtggcttccgcattcaaatcttcagagctctcctgattcggatgatccgcataatccggcgacagccaccaccacatgttgccgtacttcttgcttgccagcagtggctttgggcgtcgtctgccgtccagaacttgctgcttgctgaactcgcctttcgcttcgttgattactctgtacgacggcacaccccaatacaagccatccggtgtgagctccttgttgtggtcgaagtagtcttggatgatggcccggccacaaccacaatggtcgctccggttccacatcagctaaacgggtcagcgaataggcgcggggcgtcagttcagtcttaagctcagactcaggctggctgctttcgcttggcaaaatctcaaactccaagccgctcatcgccgcgtcggaagcgtcgtgagcctcaccagccgcctggataaacgtcaacgaccgcacgaacggtgtcagcgtctgcgccacttgctccttccagcgagtgccggtgtcgtccttatccataatggcaaccacatcagctccactaagggctaagcacgctgaatcaagatccagtttcgcggcgaagttgccgccgcctcccgatgcggttacagcggcatagccgagcgctcgcaatgtgccggcatctttttctccctctatcagatacactggcttgcccgatgccacggcacgtttcgcgtcggcggccatccacaacgggtgcttgccggcggtgttgccgctttgcgagattcgcttggtgggagagcgacgaacaatcagaccgtccgcatattcatatgctgtgccgcgctcgctgtcgtagatcattgcttcatagccattggaacgagccagcgtagcgggagcgttcagcgcgttgagcacatcgtcggcttggcaagtgctgcagcggagcaatgtggcgctttccagcggggaatacagcacagtgagcgagtcagctgcgccgcagtttgggcacgtgccgtgcagcaggccggtgtttggctgaactgcaatagctgcgcagatggcggcgaacataggggatcggcctagggccaatggttccaagtatggttcgggcatctcgtactgctgtctgatttccgcagagttttccgtgtgtgcaggtgtaatcgtcgttgtctcatttctgctgagaagcggagcgttcgtgacattcgcatgccgtatggccgccaaatcggcggcagtgagccggctatcgcagctgtaactgttgtagccgctgtaatcggcatggccttgaggtccgctttgttgatcgaacaggtcgatgattttcaatccaagtgcaccggcaatggaagcggcatcgcagtgttccgctccgaagcagtgcagcatggttttgccgttggactggtcgtaggtgatgtgcagcgaagtgccgccgtctccgtcatgggcggggcagctgcactgagcgtgttgtcttccggaggtgtcgcgcggaagctcttggagcctaggatctcgagaatagcgtctcgcggcttcgagcactcgctcgtatgaggttgccatgctcactcctcacctgcgaattcgcgcacgctggtgagaatcaccagaaacgtgttgcctaccttgcgagcgcgtatctttccggttctgatcaatccgtaaacgcttttcacgtccttgtagcccagcatctccgccacttgcgctggcttggcggtgaggcgcgggtagtcattcttcgttggaattgcagccatatgtttccttgttctcgtgcggaacagagcctgaggagcgaagtgcttccgtcgaattcggacgcacttcgccctagatggttctgttgtggttgttggctgcaccggtgcatgttccccaggtttttgccggcccctgggaagctggaattcagaatatgacgttattccaaggagcgcaaaggttgaaaacggctgaagcttgaactagatgtgtggtcgtgaaatcgttggaatttcaacgaaaacaagtgattctgcgatgaaataaggcgttcagaataagacgaataggctttgttggttgcaatgagattggcttatggcatgttgtctttgatgagcccgtttgtcttggttgagtccagtggccttggagtttgttggcttctggcagaaattggttgaatttgttaagtggatttctccgtatccgcgcttgtgatctcaagcattccttcatactcgtcgaggttggttacgcgggtgtccttcagcagttcccgcagggacgggatacccgtctgcggggttcgtgcctccgtgtttttgatggcccgcagcttgcggaagaatgattcgacgatgctgatgtattccttggccgtccgtatgcgcgacaccgttttgccggcggcccacgccgccgccgtcaattcgttccggatgtcgcgcgcctccttcttggtgggcggcccgatgatgcgcgacctgtccgcggccttttccgggtcggttagggaatcgtatatcttggcgagtgttttcctgcctttgcggcggatgggttctgggcgcatgccttctccttggcggtcatggcggtgccggtgccgttcgctggcgaatacccgggggaggttgccggcggtagggtctgccggtttctcctcgggcccatccgaccgacgaacgttcctcggcttcctgtctatgcatcaaggagttgatcgacggttcgaatggaccttcatggcacccgtatgcgttcgtgtggcgtttatcggagggggtcagggggaaccttcgcgctgggccgaccggtattcgctgcgatgcgcttgcgatacggaggctgggattgttgcgaaccaaaacgaaaaaactgcgcggagaacatgaagggactcgaatcggcccactgacgggacacatgggacgcggtcggacttcgatgacgaacacacggcaggcgaaggctcgaaggcgttttcggaatcgtcggttccgatatgtgacacgcgcggcaggtcggggccaaaggtgtccaaacggagggtacctggagggaaccgacaatcggaaggaaccaaagcaaaaccccggaaaccgaatgatttcaacggtttccagggctccaatccgggcggaggatacgagattcgaactcgtgaggctgttacaccaacacgctttccaagcgtgcgccatagaccactaggcgaatcctccatgccttgcagcgcgcagttgaactgtgttccgcaggcaactcgaataagttaccacaggtttcggataagtgcacgcttcggcgtggcgcgtgtcgcgacgcggatgtgaagaatgatcactgcgagtgaaagactcactggaaagtcccgcgcaacccccgcacaaggaccgcatacttgtgcagggcccacacacccgcgcgcacctacacaaccgttgtagatgactttgttttagcttgtcgctagagcgaagtcatctgcatggcctcgttgccaaggccagctccaagcctcacgcgactctcgccgccacttggctcgcgtttcgccggatgccgcattgtcccgcctttggggtgggcctgtcttacgcttcctccacgcgcgtttaacgtctccggggcactcccggcgacttggatgttgatggccgcgttcacatcacggtcgatgacaagcccgcactcctcgcaatggtagacgcgctcggacaggggcagtttggctttcaccgtcccgcagttcgagcaggtcttcgagcttggataccaccggtcgatgacgtgcagtctcgcgccggcgcgtgcggtcttgtattccagttggcggcggaactcgcggaagtccgcgtccagtacgtgcttggcaagcctcctgttatggctcatgccctgcacgttgaggtcttcgatgctgatgtccgtgtaattgtcggcgagccacgtggtgagcttgccgatgctgtcggctcgttgggcggctatgcgagcgtggattcggcgcacgcgctccaacgccctgttgcaccgtttcgacccgtatccgtggttcgcgcccctgtcgcggcggctcaacgcctgttgggcgtggcggagtttccgctgcgtgcggacgtagttgcgtggattggggaacgtggtgccatccgacagggtggcgagggtcctgacgcccaaatccacgccgacctgacgatcatggttcttccgtttcctgtttttcacgggaacgctttcggcgggacgttcgacggtgagggccgcataccagaagcccgcatggcgactgacggtcatgcgcacgattcgtctgccgtggacgcgttcggcggcgttctccatgcagtgcatgcgtccgatgcgcggcagtctcaacgccttcgggtcgtcctcgataaggccgaagctgccggtcgtgtatgcgaaacgcgggacactggagcgtttcgacttgtatttcggccagcccaccctgcggcccgcgcgcctgcccttcctgctgtccgaccagttcctcaacgcctgggacagccattcgaacgcgctgctgtacgcctccttgctgttctcccgccaccacggggcgatttcgtccttccactcgttccaccagcggcgcatcgcgtacaacgtccagtccggtttctcacccaaggagatttggcgctggacgtgcgcgagcatcagattgtacgcgaaacgcgcgccacccgcatgggactccaacatccgtgtctgccgtggggtcgggtcgagacggattctgacggcctcatacgcgctcatcgcgcatcgcctccaacgccttctccgcacggtgttcggccccgcggcgtccgtacagccgggcgcagaacgaggtcagcacctcggtcacgtcgcgcaccagatcgtcgtcgagttccgtgtcgtccacgacgacgacgcgtctgccctgcgccttcaacgcgttctccaccagtcccatgttcatgcgggcgagccggtcgcgatgctccacgattatcgtgccgacggtcgggtcggcgagcagccggttgagcttcctccggttctcgttcacgccggagccggtctccgtgacgatttcgggatgttcgacgcccatgccaacggcgaacgccttcaaccggtcggcctgacgttgcaaatcgcccttccgcccaccgctggacactcgcgcgtagcagacggtacgagagcccgcgggactcggctgcgatgcggtctcgtatttcgggtcgtggatgagccacatgccggtcggcgtctgctccacaggaacgggcatggtgccctgacggcaccacttccacacggtctgcggatgcaatccttccagtctggcccattcctttaccaacatgagatttattatagtataagattacttaagaaaacaaaacagttcagtaacagacaacaacccccggtaaagaaatcaccgtatccgggtgaattttcgatgttcgcccggcgcgcgcccgcaatcgcgcctaggctgttgagtcatgaacgaggggacagcggccgacgtaaccgcagcacatggcggccggtcgcgccaatcgaagaaacactcaaagacgtaccgcagcatatccgcgatccttagttggctcacggcccgccgcccgaccacgttatccacatcgctgcgcgcgcgattcctcccttacctgctcacgctcgctatcgcctggctgccgtggctcatactcacttggccgggctcgatgcgcgacgatacgcttgcccaatatctgcaatcgtccggtctgcacaactactacacccagcatccgctgtttgatacgctcacgttcggcttgttctggcatatcggcagcgcactcggctcccctctgatcgggcaggccctgtacaccgtgacccaagcggttctactcgccgccgggtgcgcgcttctgctgtgctacatccgcaaaatcggctcgccgcgctggctcatcggtctcggcctcgtctatcttgccaccaactatgtggtggtcggtgcaatcaccacgatgggtaaggactcgttgcacgccgtgttctatctgccgttggccgtgctgttcgtggaggcttgtctgacgcgcggctcggtactggctcgccgcccggtggcattcgcgttcgtcatcctgttgttcgccaccatcgtctccaagcggacggcgctcataatcgtgctatgcgccggctgctgtttgctcgccgtctgcacgcccaaaggcgcgcggcgtcgtgcgttcgcgtgtcttgcggttgccatcgttgtggcgcagggcgtgtggacgccattaagcgcggccgccacgcatgcgaatcgatcgcccggacgtgaggtgtggggcctggtcacccagcccgtggcccggctcgcgcacgatgatcccagtgcgatagacaagattcagcggcagcggctgaacgcgatcatggatctcgactgggccgccgccggcatcaacccgcaccgcaccgatgagaccttccgcactctgcgcgagcaccctaggccaaccgcggcgcaacaactcgcggccctgcaggtctgggcgcagctcggcctcgcgcatccggttgaatatgccacggcctatgccggggtgactcgcggatggtgggacccgcgcgtcaatttcgcgtaccccactgattccgactacctgttcacgcctagctatctcaggcaatgggcgtctttcctgtctgaaggtgcttggaagcatacttccgacggcgatgccgataccgtggcggccgaacgacttgccgccatcgaacatgaccttgcgccgctgaggggtacctccgataagccgcaatggcagaaaaacatattgcgggcgattcatcggtgggtgcgttcggatggtcatgtcggtgttcgcaaaggcaatccgctgacttcgatggccctgtacgtcacgtggattccgctggctgctggtcttgcgctggcggtgcggcctgcgcgacgacgctacggccccgcactggccgcttacggcttgctggcattcacggtgctgtcgctgtatgcctcacccgtggcactattttggtatccgattccggtattcctcacgttgccgctttttgtggtgttgccgttcacattccgggaaagccatcctctctgagcatagttatctcagatagtgaaataattgcggggttgaaaagcactaaaacgccttctattacctcgcacccgtcaaaaaatcaagactgttgttcaagaatttttttctatagagttcatagttgtttttggaccattcgagtacttgaagtgagaggaattcagcatggttcgtcgcgcctgcgcgcagtccgctgaaatgaacacgatgcgggaacgtgatacgcgcgttgccgtttctcgcgtgcgcgcgaagtcgggcagcaccggtcgtctgcagtcggccacggtctcggctcgtgcatttgcggtcatcgtttttctgtttgcgatgatcgccgcgaccttcctcccctccgccatcattccgcagtccgcgttcgccgtgccgccggcaaccactgccactgctgccaccgtcaagagcgacgacaccaccagcgtcgattacgcgacctgggccgacgttgccaaggccgtcgaagcgcagttgcaggaaggccttaaggaatacaaggacggcaacccaatgggtgccaagtccgatttcggggctgcatacaccaccgtctacgtgacgtccaacttcaacaaagtggtgagcgacaccatcggcacagacaagcagaccgcgcagcagcaggccttccaggacctgcaaagccaggtgttcacgtcagaccaggccgatcagcttacccagaaggtcaacgacctgaccgccgacctcgacgccacggcccagcagctcgacgccaacaccagcctcgccaacccgaagcagtactccgaagacctccagaagcagatcgccaaggagcgcaaggagctcgacgccaagaagaagcgcaccgaggaaacggccaagacttggaaggaagtcgcggatgcgatgcttccgatcctggacaacgcctacaaggcctatgagggtggcgacgccgccaagggcgccacgctcgtgaacgacgcctactaccagcactacgagaagctcggcttcgagaagaccgtgctgagcgccatcagcggcaaccgcgtctcccaggtggaataccagttcaagctgtgccgctcctcgatgaacaccggcaagcctgcttccgaagtcaagaagtacatcgacgacctgaagaacatgctggccaccgatgccgccaagctcgacggcggcgcggccgatgaggagggtggcttcctcaagttcatcaccagctcggtcggccaggcgttcctgattctgatccgcgagggtctcgaggccctgctcgtggtcgccgctgtggtggcctacctcgtcaagtccggcaacaagcgcttcaccaagtggatctacgtgggcgtgctcgccggtctggccggcgcaggcatcgtggcggtcatcttcatgctcgcgttcggcggctccggcccgctgcaggagatcatggaaggcgtgtgcgcgctcgtcgccatgtgcatgctgctgtggaccagcaactggatgctcaacaagtcctcggtggaagcgtggaaccgctacatcagggaaaagaccgaagccgcggtggcctctgtctcctcgcaggtcgaatccggcgagaaggtggcttcccgcacggtgatttcgctcgctatgctgagcttcctcgccgtgttccgtgagggcgccgaaaccgtgatcttctaccagtccatctacacgatgagccaggatacgcatggcatggtggtcggcgcactcgccgccgccgtggtgctcgtgatcatcttcctggtgattcgcttcacctccgtaaagattccgattggcccgttcttcctggtcacctcgatcctcatgtccgtgctggtggttgtcttcgccggcggcggcgtgcacgcgctcatcgagggcgacctgctgcccgccaactacctgccgggcgttcccaccaacgactggctcggattctacccgtacgccgaatgcatcatcgcccaggtactggcagccatcgccgtcatcgcgctgttcgtggttggctttgccaaacagcgtaaggccaaggcccggcttgcggccggtgcgagcaagtcggacgcgaaggctgacgaggagagcgcgcaggcgtagcacaacgcccggtgcgaccatctcgcgcaacacaacttgcgacatggcaatggaagcgattccagcccacgccgccacaactaaaaacagataagtcgtgaataatccattcaccacaacagaaggaataagagaaatgatgaagaacaagaagcttgccgctctgctcggcgtgctgctcgccggctccatggctgtttcgatggctgcttgcggttccaccaacaacgcttccgataccaagtcctcgaccagctcctccgacaccgccaagaaagacgactccaagaaggccgacgccccgactgagacctccggcttcgaagaggtcccggtcggcccctccggcaccgccaaggagcaggacaaggccgctggcccgctgaccgtgggtgccgtctacttccagcccatcgacatgtaccctgcttccatgggtctgaaggctgctgacgcttccttccacctggaagccgacatccacgcctcccaggaaggcaccgactacggctacggcaagggcgacttcgtccctgaccttactgtgaactacaccatcatcgacaagtccaccggcaaggaagtcgagggcggccaggccacctccggtaccttcatgcagatgaacgcctccgacggcccgcactacggcgccaacgtcaagctcgacaaggccggcacctaccaactcaagctctccatcgagtcccctgagaagaacggctggatgctccacgttgacccggagaccggtgtcaagaaccacaagttctggaccgagcccatcgaggtcaccttcgacaactgggactacaccccgcgtcagtggtgattgaataagcagacagccccctcgtcagagggggctttacgccgctttagggagataattcttaggacggtctaaaaactcccctcagtccgctttgcggacagctcccctcagggaggggagcctaagatgaacagagaaaggacgcgaatgcttgaacaattcgtggcagtgatgccgggcaccttggcccccgcattgctggtgatgagcctgagcgtgatgctcacggtcggcgaggggcgagataagccgataagctcgcattggcgtctcatcggcctgaccgtcggcctgatcgccgctatcacattcgccggcctgcgcgcctcggccgtgatcaaccagcgcacgttcgtcaactatccggtgctgtggtgcgcgatcattgccgacatcctgaccatcgtcgtggtggtgttcgcacgccgcatcaccaccaattggcagcagcacaaggtgttcatgcacattgcgaacgccgtggccgccatcgacatcgcgctcaccctgttctacgcgctgccggacgtgatcctgcagctgaccatctgggtggagcccggcgacccgatcttcacgtccgacatgttgctgcgcgcgctcggcttcgcgctgggcctggccatgtcgatcatcgtggccgtgatcttccgcacgatgcgttcgaccgcggtgcgtgcctcgttcaccgccgccgttctcgcggtgctggtgattctgttcgtccagcacctgaccggtgtcatgcagatcctgcaggcacgcggtttcccgataggccacacgggattcgtggccctcgcctggtcgatcaaccacaacgactggatgatcatggcccaggcgttcgtgttcctgattccggccgtcgcctccgtggtggccggcttccgcatgccgctgaccggcgcgaacgaagccatcggccgcaagcacaaggcgttccgccgccgcgccgtggcctccgccgtctggagcctcgtggccatgatcggcgtcacgctgaccctcaccgtcggcgtcgccgcgacccatcagaccatcactctttcgccgccggaagcctactcgctcaaggacggcgtggccaccatccccttcagccaggtcgaggacggccacctgcaccgcttcgaatacaaggccaaggacggcaccgtcatgcgcttcatcatcatccgaaagaacggtggcgcgtacggcatcggcctggacgcctgcgagaactgcggtgacgccggctactacgagaaggacggcaagatcatctgcaagaagtgcgaggtggccatcaacctggcgaccatcggcttcaagggtggctgcaacccgataccattcccgtacaagaccggccacggcaagatcaccattcagactacggatctggacgcgctgagcgcccacttccagtgagtcaggcaggagacaagaatcatgttctttctgcgtatgattactcgctcgttcacccgacagctgcgccggcgcctgcttatcgcgctgaccgtatgcctgtcggcgaccgtgtccgtatcgatgctgggcgtcgtgttcgacgtgggcgacaagctcaacgccgagctgtccacctacggttcgaacatcaccgtgcagcccaaggcggacgcggtcgtttccgacctgtacaacaccgagtcgggcggtgcggcgtccaccagcgacccgaccgcctttctgaaggagtcggacgcggccaagatcaagacgatcttctggtcgttcaacatcaccaacttcgcgccgcagctcaacatccacgccacggtgaacggtgccaacgtgccggtcgtcggcacgtggttcaacaaggacctcaagatctccaccggcgagaccaccgtcgtgggcgtggaaggcatgcgctcgtggtggcagctggacggcaagtggcccaaggacgattccgaccagggcgtgatcggcaagacgctggcctccgaactcggtgtgaccaccggcgacaccatcaccctcaacaagaccaccgcctcgggcaagaagaacgagcagaaaatcaagctcaccggcgtctacgattccggcgacgaggacaacggctcgctctacatcgcctcctccacggcccaggtgctcgccgacctgcccgattcggtcgacaagatcgaggtcaaggccctgaccacgccggagaacgacctggcccgtaaggccgccgcgaacccggccgcgctgagccaggaggaatgggagacctggtactgcaccgcctacccgagctcgatcgcctaccagatcgaagaggtgattccgggcgcggtggccaagcaggtgcgtcaggtcgccgcgttgcagggcaatgtgctgcagaagacgcaggccgtgatgattctgatgaccgtgctgagcctgatcgccgcagccgtggccgtggccaacctgatggtcgcctcgatcggcgaacggtctggcgagctggcgctgctcaaggcgctcggtgccaccgatgccgcggtatcccgcctgatgctggccgaaacggcggcaatctcgctgctgggcgcgattgtgggcgcgttgcttggttccggcgtggcccagctgataggccgggtggtattcggttccggcatcacgatgcggccgatggtgttcgtgctggtgttcgtgctgctggctgtcaccgtgctgctggcgtccgcctcctcgattcgttcgattctgaatctcaagcccgcggaggtgctccatggccgctgagtttatctacgtaggtgtggaaggaggaaaccgatgaccaacaccggtatgttcttcagaatgctgttcagcgccgtgttccgccggcgttcgcgcgcggtgatggccgtggtggcgtcgctggtcggcgcggccacactgttctgcctggcgatgatctgcctcgccgtgccgcagcagatgaacgaggagatgcgtgcgtacggcgcgaacctgattgtcacacccaccgaatcgaccaatgccgacggcaaggccggcatcgacaaggcgatggtgcagcacaccactgaaatggtcaaggcgaagggttccgcgaaatacgccacttaccgctacgagaacgtgcgcgtcaacgcctcgccgtacgtgatggccggcgtgaatgcggcgcaggtcaagaacctcaaccatcactgggtggtcgacggctcgtggccgaccgacggcaaggtgctggtcggacgtgacatcgccgacgccatcggtctgagaatcggctccgccatcaccatcggctaccgtgcatccgataacgccagcaccaacggcacttcgtcgaactcctcgatcgaccagcaaaccaaagacggccgcgtttccagcgacatcatggacacctccggcaccgaattccgcgtggccggcatcgtggacaccggcggcagtgaggactcgatcatctacgccaccaacgccgacgtcaacaagctcaccggcatcacgcgcggcgtggacgtcatcgagtattcggccggcgccagcgacctcgcaggcctggtgtccagcatcaacgacatgacctccatgcacgtcaaggcgcagcaggtcaccaagatcaccgcctccgacacccgcatcatcaccatgctgcagacgctgttctggatcgtctcgctggtggtgctggtgctgacgctcgtcggcgtcggcaccacaatcagctcgatcgtctcgcagcgacgcaacgagatcggcctgcgcaaggccctcggtgccagctcgcgcgccatcggcaccgagttctacatcgaatcatcgctctacggcctgatcggcggcctcatcggcaccgcaatcggctacggactcgccagttggctgtgcgtggcggtgttcgaacgctccatcggattcaactggtggctggcgctgatctccgtgctgttcagcgcgctggtcgccatcgtcgcctccatcccgcccgtccaccgcgccacccgcatcgaccccgccgtcgtgcttcgcgaagaataaagaaagagaaacgtcatgctacttgaactcgaccacatctcgaagatctacggcgacctgcatgccgtggacgacctcaacctgaccgtgccggaaggcgaatggctcgccatcgtcggctcctccggctcaggcaagaccacgctgatgaacatgatcggctgcatggacacgccctccaagggctccgtgaagctgaaaggccgcaagctggaggacctgaacgccacgcagctggccgacgtgcgcaagaacctcatcggactggtgttccagaagttctatctggtgccgcacctgaccgccgtggaaaacgtgatggtggcccagtactaccattcggtggtcgatgagaagcaggccatggaggcgctggaaaaggtcggcctgaaggaccgcgcccaccacctgcccggccagctctccggcggcgagcagcagcgcgtgtgcgtggcccgcgcgctgatcaacgacccgaagctgattctggccgatgagcccaccggcaacctcgacgagaagaacgagaaaatcgtgctcgacctgttccgcaagctgcacgagcagggcaccacgattatcgtggtcacccacgatgcgcttgtcgccagctgcgcgcagcgcgagatcatgctcaaccatggcgtgctcgtcggtgagaagtggaatgacgaggatgcgcgcaaggcctacgaggcggccggcggcaagcccgcctccacgggtgcacaggtcgagggcgcgcagaacggcgagaccgccattggtttcgctgaccccaccaaggccgcgaaaaccggcggcgaggagtagggccgtcaggggcatcgagcagtatgtgaggaatacatggcaagctgatggtctctcccccagtcagcttcgctgacagccccctcgtcagagggggcttaaggagcgtgaatatgaccgaaaagaatacgttgaagaaatccgcgacattggcggcggccggactggtcgtggctggcgcgctgctggccgggtgcggcgaatccaaggccacgccgatggacgatgcgtacgccggcaactcgggcgagaccgagaagtcgcaggaagagcagtcgcaatcccagtcgaacggctccgatagctccgacggctccgattccggctcatcgcacaacgacccgtccaccaccacgtccgacaagaaggacaccggcaactacaaggacggcaactactcgatcaacggccagtacggcccggtcggcgaggattccatcgacgtccatctgaccatcaaggacggcaacgtcgagaccgtcaaaatcattgggcacccgttcaccacgatttccaagaaccatcaggacgacttcgccaaagccatcaacggcgtagtggacggcaagcccctgaagggactcaaagtggacaaggtcgccggtgccagctggacctccgacgccttcaacaaagccctcgaagtcgcccgccaggaggcttcgattcaggagtaagaccgctacttcagcaatgctggccacagcagatcggccatgcgcgaggcccaggcggtgtcgtcgtccatcgctttgccctcgatggcctcatacgccaccaaagacccgataatcgtggacaacagcaacttctcgtcaacgtcctcgcgaaacacgccctgcgcgactccctgcttgaggaacgcccccacacgctccagccacggggtcaccacctggtcgacgatgtgctggaagaactcggcctcgctggacaatacaatgcccacgcgcttgacgtcgatgtcgttgtcgtgcacccaatcgaccaatcgctgcaatagttgcgtgaaatgctcacgcgtggggctgggcactgggtcggaatccgggatggccagatacatcgcgctgatctcgcgcagcagctcgtcggcattatggtatcgacggtaaatcgtggttttggccacaccggagcgccgggccacctcctcgatggtcacgccgctgataccgcggtccaccgcaatctgcagcgtggctcgcatgagcttgcgatccgtcgcctcgcgcgtgcgctcaccgcgcggtgtcgccgtcgtacctgtcatctccgtcatctcttctcttcgaaatatgctcccgtacgctcccgctggcgggagctggctggcaaagccagactgagggtggtaagtccatgccgtttgtaggcaacccccggataatacctactagcccagcactttagtgctctcgactttggccacataccactggttgaaccgcaccagtggcttcctgagcaacagtccaagcaacagcagcggcggcacgaatgccagcagcattccggcggcccgccagtaatccatgtcgtagatgccggcgatggccgcacgcatcatcgtcaccgcatgggtgagcggcaagaacggactgactttggcgatgaagtcgggcaacatctgcaccgggtaggcagcgttcgcacccgaaatctgcacgatgagcataagcacgccgattgccttacccacattgccgaaactcaccaccatcgtataggtgaagaacgagaacaccaacgaggccagccatccggacaacataaacagcagcggatgcacggcctgcacgcgcaggaacagcagatcgccgccgagcgacaccgtggattgcagcagcgcaatcagcgcgaacaccccgtaatgcccaaggaagagccgatgcggccgcggatcgcccaaggctttgcgcgtccggcgagacacggtggttttcagcgtcaccaccatcagcagcgcgcccacccacagcggcagcagcgtgtagaacggcgccatcgacgaaccgaaattcgccaccgggaatacggccttgcgcctgagctgcaccggcgcggccaacgtactggccagcgtttcgggatcattgcccagcacctctttgaccatgctcatatcgccactgtttagtgcgtcgctcagtgtgctgttgaacgaagccagttcggcaccggcggaacgcagtttgccggacaccttgcccaaggtggtgcgagcgtcgccgagcatatcgctggcgtcgtcggaagtccttttcaggtcgccgagcgtggagcccaactgggtggcgccggaactcagtatgccggaggcgtcagagacggtggacgacagggagtcgatttgcggtttcaccgtggccgtgaaatccgacttgatattggcgatactgttctgcgcttgatcggccagatccttgacctgcgcatgctgatcctgcgcgtcctgattaccttggcgaatatcggtcgccgccgtattcagcgcttgccgcagcctgttctgccgtgcgattgaacggtcaatcgccgtgatgatggatgagtcgttgcccagtatgccggccaacgtgttgcgaatttcagtgtatttctccgtctgcttgccaatggccgtggcttgacggtccaattcgtcggcggccgtggtggcaccatcattcgcgtcggaatacagcttgtctatggaatcggacaccgcgccgaaactggaggcgctcgcgtccagtgagctgctcatcgcgtcagcggtggtgcccagggctccgaccacgtcggtgactccctgcttggcgctggcgagatccttgcctccttgtttggcggcagaggaaacctgagtgatcagcgagttcgaggtgtcaagcaaggcgccggccgtatcggtcaatgcgctgtatgtgccaagcaaatccgccgtatcgtcaagccgtgtggcgaaatcggcgatattggcgttgaaggtattcagttgctctttggcttcgggcttggacagctgatcggccagcgaagacgcgatttccagccctgccgaagtgatggtcttggcgaacgtggtgttgatttccgccgccacctcgtccgtgccctcgttgagcagattcggtgccagcgcgttcttcttctcgttgcggtaataggtcagttcggcatgctgcacatcgtcggagaagaaggtcatcatgtctttgctgaacgacttcggaattacgatggccgcgtagtatttgccggatcgtgcgccctcgacggcatcggctttggacgtgatcgtccaatcgagctgactgttggcgcgcagcgcgttcaccacctgatcaccgaccgtgactttcatcgggatcaggtcggaacgatacccctcatccacattcgccaccgcgaatttcaggttcttcatattcgagaacgggtcccagcatgcggccacgttgaaccaggtgaacaggccgggaatcatcaccaagccgatcacgatgatgatggagaccacgttgctggtcaggcgtttgatgtcgccggtaaatagtttccacatggtgttcatcgtgcgtgcctgccttccttggtcggcggaatagtggggatgattgcggtaacggcggcgctcgggtccgcttcttcgtggcgttcggcggaggtgtcgcgacgcttggccttatgcccgtacagcatggcgcggatcgactcgtcggaaaggttgccgagctcggtttggcggcggatggaatcgcgcatgaattccacgaccatcaggaagcccatgatgatgagcacccatgccagccatgtgcccatgaccacgattttctcgctggtggtcagcacaaacacgataatgagcgcggccggcaccatgaatccggcgataagcgcacccagcagcagccggggatactggtaggcgaatttggcggcccgacgttcgatggcatgacggtattcgtcgcggtcggccagtgccgcaatggcctgagtgacacggtattcgctgccaggcaggtgcaccggctcgccgataatcatgtcgctttccttgatttcccgcgcgaacaggcggttgagattggccagtttcggccgggcgccgaggccaagcgcaaaggccagaaccgcgaaaaccagcaatttgccgatataggcgaaccagaggccgtcgtagaagccgccgatggtttcacgcattgcgtcaatcgaataggtgaacggcagcagcggatagatggcgcggaagaacgcgggcatcatttcaatcgggtacaggccggaggcgcccggcacctgcagaatgaccagcgccacgcacacgcctttgcccacgtgcatgaacgtggtggagagggcgaaaatcaccgacatatacaccagtgaggtgatgacgcaggtgagcagaaacaccggggcgctcgcgcattgaatgccgatgacaagatcgccgatggccgtgaccaggccttggacggcagccagcgtggccagcagcaggaaacggccgagatagccttgggttggcgtgagatcgtcgatgccctcgtcgtcggtttcgagtttgggaatgaccacgagcacgaacgcgcccacccacaaagacagggtggtgaacagcggtgccatgccggaaccataggaggcgaccgggtagacggcccgttcgctgataacagtgggggagagcatgaagtcggcgattgtggcggcatccagtttgccgtcggtgccgatcagggaactgagtgaactggagatgctcagggctttgatgtcggtggtcagcgtttcgagcttggtttgcatgccggccagcgccttatcggtgtcgtgcagggcggtcaccgtggtggaggcggctttgtcgagttgatcgagggtgctcttcgactgatcgatgagtgagccttgcgacgtgatgtcggtcgacagagtgttggcggtcgagctgagggtgttgaggccggtgttgagctgaggaatggcgccggaggtgatggtgccgcgagcggtattggcctcgcgcaccgtggtttgggtggcggtattgagatgctgcgccaatccggcggtgtctgtggaggcattgccgatagtggtgttcaggctatcgaggttgcccagtgcgccggcaagctcgctattgcggctttccagtgtggcaatggcggattgcagcggttctcgatcggcgttcggcagccctttgagttggtcgatgatgtcggcgttcgcttggttgatgtcttccgccgtattgatcagtccgcctacctgctgattggcggcgctgatggttccggctaccgtgcccacgctttggttggcctgtgctgcggcctggctcagcaggcttgagccttggtcaagcgcttcggacgtggaggtgacgaagccgttcagactggcttgggtagtgccgatcagggtggagacgccggccagaccttccgcggtgtcgatgccaagtgcgcgcgcgtcgtccagcgcctgacgtgcggtgcgtgtctgctccggggtatcggtgagtttggtggtgagcttggcgatggtgctgcgtgtgtgctgtacgtcgccggaggcctcggcaagggccgtgagggccttggctttggtggtgtcttcggtgctgatggctttgccgccaaccgtattgatgacttcggtaagtacttcggatacggtggagacgaatgtggaattgaccgtgcggtccacagtggacgcgcctacgtcggtgactttgggggcgatggcgctggctttttcgttgacgtaatactccagagtgggccgactcttgccgccggtcaccacgccggcgagatcgtcggaaaagtctttggggatgatgatggctgcgtatgccttgccggattccacctggtccatggcctcggcttcggtgacgaaggtccagccgagctggtcgttgcttttcagctgcttgacgatttgatcgccgaggttttgcttgccgatgagcgcgttgtcggtgccgtcgtcattgttggcgatggcgacggtgatgcctttggtattgccgtacgggtcccagaagccgacgatgttgtaccacgaatacagtggcgggataaacaccatgccgaacaggatcacccatgcggccggcaccttgaacaggcgcaggaagtcgcgtttgaggaccttgaagatattgcccactgatacctccggagcttggtgttgcttgattgctacgttttccgtagcgatacgttaatcgtagcgctacggttgtagtagcgtaatacggctgccggagattattggggtgattgatgatggttttggcggaataacgccgctgcctagcggcttatcgtgtgtcgctgggcagtgtgcctaattttttgtggctggggtgctgtgtggccgggtgtgctgtgtgtgttggtgtgaggctgccctccatggggcggtaaaaccttcattgggtggtaagtggcccatggggcggtaaaattcccatggggcggtggcttaaaatggctttattccgtggaatgcggttttgggctaaccgccccatggggtaattaccgcctcatgagagagagctaccgccccatgggtaaaccgttgtatcagctttcgatggtgccggattggccatcaatggccgactgctcgttctggctggatgactggtcggagttggagttaccggaagtatcagaacctgtgccggagctgctgccggtgccggactggccatcagtgccttggctggagcgaaaggcgttctggaacttattgacaagatttctggatggtttttggatgtttcctgaaagcgatagcgggctcggtgtccggcaatgtagacagacatgtaccggctatccatcaagttcggcaaaactgcaatcgggtgatagtgtaaggggacgctatgtggggaggaaaccatggttgaattcaaggacgatggcacggccactacccctggcaagccgcgggagaaccgtgacgccgagtccgcagtcgtggctgatctggtggccgtcgaactggacgacgccggcttgaacctgaacgccaagcgattaccgattctggcgcgcatctatggcgcggtcgtgctgctggacggactcgccacattgccgattatggtgatttccatcctctatgccgtgcgcgagattctggatggtcatgtgcacgtcgatgcgatgagcctgactttcatcctgtccgcgattcatgcggttgtgctggtagtcagtgccgcatgcctgattgtgttcggcgtgatgctgctgcgcaatcatcgccggtatgccgcgcgctggacctacgtgctgatgccgttgacgttggccgacggcatgctgtcgctggccctgaccggccttggcttcaacctgctgctgccgctgattcagatgattattctcgtcgtgatttcggtgaccgccgatccctccctgagcgaggaacgccgtttgcagcgcgcgctcaaacgcatggacgatcgcgatgattatgaatcggcggtggcggccggcatgctgggccgcgaccaatccggcaagggctatattgcactggacttcttcaatatcttctggctgtttaccatcgcttcggtgggtggcctgattatggagacgatctaccatatggcgctgtataacggtgaacttcaggaccgcgcgggtttgctgtggggcccgttctcgccgatttacggctgtggtgcggtattggtaaccgtgtgcctgaatcgcctgtggaaggcgaatccgttcttgatcttctgcgcttcggcggtgatcggcggcgcgttcgaatactgcaccagctggttcatggaagtggcgttcggtattaccgcgtgggattacaccggccgttggctgtccatcgacggacgtacttcgggccaattcatgttcttctggggactgattggtgtggtgtgggtcaagtggctgttgccgcgactgctggctctgattaatcgcattccatggaaagtacggtattcgctgactgcggtatgcacggtgctgatggtgatcgacattgccttcacgctgatggccttggattgctggtatgggcgcatggccggccagccgcaggattcaccggtcgcgatgtggttcagcgaacgctacagcgacgcttacatggccaatcgcttccagaccatgcatatcgacccttccaaggccgggcgtatgtgaatggctggcaagtaattacgcttcgcgggcagaaggtgcgtagaacctaagacagccttcgcgtgtgggtggtaagtgggatacactttcaagcgttgaaggaatgattccctccgctgatgtgctgttttgtgacgcgcgtgatgacgatgggacaatcaaacgaaaggcaaggcgcatggccgaagctacagcaaacattggtgtgattggactggccacgatgggctccaatctggcgcgtaatctggcgcaccatggcaacacggtggcgttgttcaaccgtcactactcgcgtaccgagaagctcatgaacgagcatggcgccgaaggcaacttcgtgccggccgaaacgctcgaggaattcgccgcgtccctgaagcgtccgcgtaccgccatcatcatggtcaaggccggtgctccgaccgacgcaactatcgcgcagctggaagaggtgttcgaaccgggcgacatcatcgtcgacggtggcaactccttcttcaaggacaccatcaagcgtgagaaggaagtacgtgccaagggcttccacttcgtgggttgcggcgtgtccggtggtgaggaaggcgcgctcaacggcccgtctctgatgcctggtggcactgcggaatcctggaagaccttgggcccgattcttcagtccatcgccgccaaggtgaacggcgaaccgtgcgtgacccacatcggcaccgatggtgccggtcactttgtcaagatggtgcacaacggcatcgagtatgccgatatgcaggtgattggtgaggcgtatgacattctgcgccgtggactcggcatggataccgaggagattggcgacgtgttcgctgaatggaacaagggcgaccttgactcctacctgatcgagatcaccgctgagattctgcaccacaaggatgccgagaccggcaagccgttcgtggacgtggtcgtggatcatgccggcatgaagggtactggtacttggaccgtgcaggctggtctggaatttggttctcctgtggctgctatcggtgaagccgtgttcactcgtgcactgtcttcgcacggtgagctgcgtgaagacgctcagaaagaaggtctggctggcccgaacaagaccatcgatctggccggagaagacaaggccgcgttcgtcgaggacgtgcgcaaggccctgttcgcttccaaggtcgtggcctatgctcagggcctgaacgagattcaggacggtgctaaggaatacggctgggatatcaacctgtccgaagtggcccgcatttggcgtggcggctgcattattcgcgcccagttcctgctcgaccgcatcaccgaggccttcaagggcgataatttgccggcttccctgttgttcgatccgtacttcgagaagatcatcggcgaatcgcaggatgcatggcgtcgtgtagtcgtgcgtgccgtggaggccggtatcccgaccccggtgttctccagctccctggcgtactacgatggtctgcgctccaagcgtctgcccaccgccctgacccagtcccagcgtgacttcttcggtgcccacacctacggccgcgtcgacaagcccggcgtgttccacaccctctgggcgcaggaaggccagcccgaggaacagcaggcttgagcgtctgcgacaatctgtgggccgggcccctcattcagggtccggcccacaggaggcgccatcacaactcggtgacggtttcttcggtggagaaccaggtgaactcgtccactccgttggcgtaggaggacgggtaatccgggttgttgggccgctcgaagacatgggccagcgattcggctttgccggcaccggcggcgaagaaccatgtacggcgcgagcgggcaatcagcggcgcggtcaacgagacgcgcaacggcggcatcttgggggagtggttcacacccacggtgagcctatcggtaaccttgacctcatcatgacccgggaacagcgacgcatagtgaccgtccggtcccatgccgagaatcatcagatcgatgaccggttccggccccaattcattcaccaactcgcgctcatagtcgctcgcggcatcgtccagcagcgcatcattcgcggcatcggcggcggcgcgaacggaagcgtcatcactatcggcctgatccatcacatcggcgatgtcatcggctgaacgggtatcggccgccatctcatgaatattcgattcaggcagcttgccatccgccaccagctggtcaagcagcaggcgacgggcctccagagcattgcgatcggtgtcgtaagccggcacaaaacgttcgtcgctccaccagaaatgcacgcgcgaccaatcaaccgcatcagccagtggatcgttcagcgccaaacccaacggctgtgcggccgaaccgccagacagcgccacatccacacgtgtgcgatgcgtgccatcaggcaatcgttcggcgagcaaatcgagtagcgccaagacaaaacgttgcgcgccagcctgaatcatcagatctttattcggatacacaatgagttttcgagttgccatgtatggtccttatatggggtatgtgtcgtactttgcaatgtggattgtgttgtcagttgacaacgcataatacgggtggcatgccgggaatccagccatttgcagcaatgaaatgtgttgtcagttgacaacacaatgtacattgtgcgacatcgcatatgtcactttattactccgcggtcatgagcttcgtcatcgcatgaggtaggaaacgatgagcaacggcgttggcatggctcgaccacaattgccgaactcatgccaacgccgctgtggcaacggttctaccgacttcagtgacgaatcagatcccagccttcgttgatgacctcggcgtagatctcatcgggatcgatgcggcgcagttcctcggtcagacagtcctcgatggtgcgcatcggcacggacacttcctgcggagtctggccgggcagcgagatcagcgcttggtcctcatacgggcgttccagtgagatcacaccgtcctcacgggtcaggtacacgccggtcacggcctgcgcgtcgggcacgaactcagtttcgactggtacgccgagtttcagacgcagccatgcgcacagcatttccagaggcaggaagtcggccttgccggtcaccttcacggcggtgatgggcaggtgcggcggctggtcgagcatcgaggcgagcattgcgcgccagacggtcagtcgtgtccaggacaagtcgatgtcttccggtgtccaattgcggcgcaaacgctcgatcgtggcctccggattattggagtgcagcgcgtcggtgatgcgactgcgggccatcgcacccatcagatccttggccgggttcgacggcggtgtggtcggccaccacgccactacaggcgcatccggcacaagcagcgggataaccagcgtatccgggtggttgataaggccaccgcgcggacgcaagatgataatctcaccggcaccggcgtccgcgccgaatcgcacttgggcgttcaggttggaatcgttcggatcgttcgggccgtcggtcaaatcgacggccggattatcgcgattcgcgctcacctcggcggccacttcggtctcgttcggttcgccttcgccggactgatcggcaggattggtatccggtactacggcaatcacgcggcacgggtgctcacggctggccgagttcgcgatttccagcgcatgctctaggtccgcgtcctcggtggcgatgagtagcgtcagcacgcggccggtcgccgattcgccgcgctcctcgtgcagctgttcgattttgtgcgcaatctcgcgggtgcgggtgttcggcatatcgatgatcatggcatcctccagtggcggccgtcgcgcgccagcatttcgtcggcctgtgccggaccccacgtaccggcgcggtaggcctgcggctggccaagcgtggaccagaattgttcaatcggatcgaggatctcccagctgaggttcacctcttcggtggtcgggaacaacggcggatcaccgagcagcacgtccagaatcagtcgctcataggcttccggcgagttctcggtgaaggagcggccgtagctgaagtccatgttcacgtcacggacctccatggtggagccgcccggcaccttggctccgaagcgcatggtaacgccctcgtcgggctgcacgcgaatcacgatggcgttcttgccgagttcgcgcacggcggtctgctcgaacggcagatgcggggcgcgcttgaacgccacggcgatttcggttacacgcttgccgaggcgcttgccgcaacgcaggtagaacggcacgccagcccagcggcgggtgtcgatatcgaggcggatggcggcgtacgtttcagtggtgctcttggggtcgatgcctttttcttccaagtagccgaccacttcgtgcgagccctgccagcccttggcgtactgaccgcgcgcggtgttggcggcgaggtccttgggcaggcgcacggcggaaagcaccttggtcttttcggcggtcaggtccttggcggtgaagctcaccggctcctccatggcggtcagagccatgagctgaagcaggtggttctggatgacgtcgcgtgcggcgccgatgccgtcgtaatagccggcgcggccgccgatgccgatgtcctcggccatcgtgatctgcacgtggtccacatagttggcgttccagatcggctcgtacatggcgttggcgaaacgcagggccagcaggttctgcacggtttccttgccgaggtagtggtcgatgcggaacacggagctcgggtcgaacacttcggataccacgctgtcgagttccttggcgctggccagatcatggccgaacggcttctcgatgatcacgcggcgccatgcgccctcggacgagcgcgacaggccggaggcggccaactgcttggcaacctgcgggaaggcgcgcggcggcaccgacatgtagaaggcatggttaccctgcgtgccgcggtcgcggtcaagctcctgcacggtggcgctcagacgctcgaaggcctccggatcgtcgaacgtaccctgcacgaagcggatgccggcggccagattgcgccaagtcgactccttgaacggcgtacggcaatgcgcccggacggcggccttgacgaattcgatgaaccgctcctgtgtccagtctcggcgggcgaagccggtcaggccgaagctcggcggcagtaggccacggttcgccaggtcgtagacggccggcagcagtttcttttgtgccagatcgcccgtgacaccgaaaatgacgaggctgcacgggccggcgatacggggcagtctgaggtcgcgcgaatcgcgcaggggattgctccaattgggggattcactcataatgtacaagggtagtcgccggcggctatctatcgttagaggcgatatgcgatttgggctgcgatttgggccacattgcgtgtgctgtgccgtgcgttgggccaatcgcgtacgcaaacgtgtacgcaacgccgtagttgaaatatcccaaaacggtgtgtattttagaagagttgcccctttagctcaacggttagagcagcgtccttttaagtcgtgggttgtgggttcgaatcccacagggggcacaacaaatccttggaatcgcaatggttccaaggattttttgtttcgaccagcctggctcctagagtggtgccccatgtcatgcaccacgattcttgtcggcaaaaatgccagttacgacggttccaccatcatcgcccgcgatgacgattcgggctcgggccgttacgatcccaagcgcttcgtcgccgtcgcccccgacgaccagccgcgccactaccgcagcgtgctgagccatgtcgaaatcgaactaccggacaatccttgccggtacaccatcgcaccgaacgtgctgaataatcgtggcattctggccgaagccggtgccaacgaacacaacgtggcgatgagcgccaccgaaaccatcgctgtcaacgagcgcgtgctcggtgcggacccgatggtcgagttgcggccggctgtcggcgggccggacagcaccgattatcaggccgagcagcccggcggtatcggtgaggaagacatcatcacccttgtgctgccgtacgtcaccaccgcgcgcgagggcgtcgcgcggttggacgaactgctcgaaacctacggcacctacgaatcgaacggcgtgattatttcggatgcggacgagatctggtacgtcgagaccatcggcggccatcattggatcgcccgccgagtgcccgacgactgctatgccacgatccccaaccagctcggcatcgacgacttcgacctcgccgatgcgttcggcgagcagcgcgaatacctatgcagcgccgacctgcgcgagttcatggccacgcatcaccttgaccgcacaatgggaacgtcggtctcttccaacggccgtcacgtgcatagcgccggattcggaataaccgttgcccttcccacccgcttcaacccgcgcaaggccttcggcaccgcgacgccgaaggaccatatctacaacacgccgcgtgcctggtacatgcaacgccgcctcaaccccagcgaggactgggattcgccggccgcccgctacacgcccgaatccgacgacatcccgtggtgccgcgtgccggaagacaaggtgagcctcgaagacgttgatttcctgctgtcctcgcacttcgaaggcacgccgtacgacccgtacggcacgaccggcacggcggaatcgcgccaccgttaccgtccgatcggcgtgaaccgcaccggccatatggtggcgattcaggtccgcccgtatgtgccggcggccaatcgcacggtgatgtgggtatcgttcggctccggtccgttcaccgccgccgcgccgttctacgcgaacgtcaacgacacgcctgcctacctgcgcgacaccacgcccgaagtctccaccggcaacctgtattggacgaaccgcctgatcgccgtcgtggccgacgcgcattggtatgagacgaaccggttcatcgagggctatgcggaaggcgtgcgcgcgttcgggcaccggctcatcgagcgcacggatgagcagttgcttgctcgaagcgatgccgaatcgacgggtacgaatgcatggccgctcgatggcggccacggcgatgagaaggatgtgcagggcgtggcggatgtgctcgaagcggccaacgacgagatggccgactacctgcgcgagcatacaaccaagctgctgaacgacgtgctatacacctccagcaacctgatgcacaacagcttcgcaatgtccgaccgttgggccgagtagcaaaacctcggctggggaggtaatagggatgccctgctgataacgcgtcagcagggcaaagccgtaatccgaatcagttgaagccgacgatgcgttcggcgatgagatagccgttgcgcacgatccagcggccggttttaccaggcagattgagcgcgcgggacatcagcttcgagcgcacatccttgccgatggccggagaataggcgtcaatcgcatcccacagctcggttttcttaacgtagttggccggatcgcgcgagagaatcaggaacgccgaggtaacgcatgattcgatcgtcaggaagtgaatcatgtaccggtacagcccctccggcaccgtaccacgttcgggcgtggcctcggtcatcagccgattgacgagccgcagctgatccacacgcttaatcatcacgtcggtctgcacgctctgaccctcgcgcccgatgaagtagtggtagaacggcacgtcgagatattggatgcgcttcacccacgggaacggctggtacgagtaatagaaatcgacgtagaacgtatgctccggcagcttcagcccggaatcgcgcaccacctgcgtgcggaaagtgagcgcatgcatgatgatgtactgcgccagaccgaacttgcccaggtcatcccagccgagcacgcggccggcctccatcacatgacggaagttcaccacgatcttgtggcgcttggtcactttgtcatacacatagttggtcaccagcatgtcgatcggctcgctggcctcacgttgcgcgcgcaacgtggccagaaccgtgtcgatggcctgcgggtcgacccaatcatccgcatccaccaccttgacatacatgccggtcgccgccgtgataccggtgttcaccgcgccgccgtggcctttgttctcctggtgaatcgcgcgcacgacacctggattggtgcgttccagtttgcgcgcgtactccagcgtgccgtctttcgaaccgtcgtccacaatcagtacctcgaggtcgctggtgtcgcttgccgaaagcagcgagttcacgcaacggtcgagataggactccatattgtatgcggggatcacaaaggtgagcatctttgccgtgctggccatgaaagtcttacgtcctcacatatttagtcgttatgttcagtttcctgttcaaaccgtagcacttcgtctcccgactcggcagagtgttgcgcaacctgtgcccctgaactcgtgttctgcaaccctgaatcttccccgggggcgcgatcggaatccgattgggcggaacttgtctggtctgaatccggaccgccggaatcggactcgcgcttggctcggcgctcggcctccttccgcgccttggccccctcaaagaacaactggggcttggagtcaagccggctcaggccatgccaggccaaatccacaatgtatgcggccagctgctccttgctcacctttggtcggtcggcccagtactgtccggtgaacacggtcatgcccaccagcatctgcgcatagtacggcacgcctttggtggagagtttctgccgtttgaacgtttcggaaaggatgtcttcgacgcgcacggcgatgtctcccagcagtgagctgaacgagccggacggttcggtgctgggcgagtcgcgcgccagcacctggaatccctcggcgtcctcttcgatataggtgagcagtgcgagtgcggtgcgttccacgatctggcgtgggtgcacggtcggatcgtcaagcgcggcggtgagcacactggtcaacgcgcgcatctcacggtccacaatgacggcgtacaggccctctttgccgccgaaatgctcatatacgatcggcttggacaccttggcgtgcgctgcgatctcctcgacgcttaccgcctcgaagcctttggcggcgaatagcgagcgtccgacttcaatcaactgctcgcggcgctgcagcgacgtcatacgtgaagaattagccatacacgtcagtttgtcacgaatacaggatgaattaggggcctatcttcagcagcttttcaagcgacaggtacattgtccgaaaaaacaggcatgaatgccgtatgtgtcatacaaatgtggtagaacataggtcatgagccggcaaagtgccagttcagcttgaaaggaggttggcatgatgagagcgcgtatttccatcatcggtgctagtcatgcttgggggggggctcctcttctgagctgatacagtcggtcggccttcggagaaccacgaagaaggcaatctaatggcaaatacatacaagactgacattgctgtgttggacaatgattactccggtggagtaatcgcggcgtataacgctgcaaagcagcagttgtctcaggtgcataccgcgaatttggagggcacggatcgtgctttgccagatgatctgggcaatcaacttgatggtatgtacactaagttcactcaggaaaagcctcagaagctcgcagagctgacgcctaagcgtgacgatttgaagaagcgtcaccttatttttcttgcggtaaaactggctctgattattatcggcttggtaatcgccttctccaatagcgatgctgcaggattcggatgggttctgctgattgctggtgttgtatgccatttcgtgttctcctctatggatcagaaggctgcatcggctttgtctgatgaatggcaagcattctttgccgcatatcaaggtatcttcgggcacaaggagacgttgcactctccggcaacgggcttgtacaagaaggttgatgatttgtatcttcgcagccttgatgatcagcagcgtggttttgagcttcagaatcgtcagatgcagaagcagatggaagctcagaatgagcagcatcagcaggcaatggcgatgcaggctgctcaaatggcgcaaatgcaggaaatggtcaacgagcagcgttataccaattcgatgctgcatcgctgaatatcatgcctactgtcaacagtgagatggaatgccccggttgcggggcttccgtctctttgcaggataaagagtgtgcgttttgtgggcgcaaactcacttttacctcactgaacttcaaagaagtacgtcgtactacgttcaaggaatccgcaaaattcctaaatgcatataaaaatgcattgaagggttccccggacaatcctgaagtgcttgcttctttgggatacgtattgcttgatcgtggacaatacgaagaggctgccgacgctttggacaaggcgtgtagcaatggcgcagatgatccagatgtattgttccaggctgctcttgctcactttaaaaccaagaagccttttcaaatcaagctcaaggaagctgaatcgattatagccagacttgattcagccatcactatggaggcacggccacaatatctgtttgccaaggcgcagctcatcaatctgctattcgagcgtcgtttcgttcgatacagggaaagttcggcgagcatcttgcgccaagctgatgccgcaggacttactgatgccgatagaacagatatcgaatcgttgcttagggccaaatagacgctctgcggtggctcgtaagaaataaaggagactattgccatgacggcatatcgtattgaagacctgttggaataccgcaaggaattggccatgaacgcttgcggcatcttcgatgaagaggaagtcggccgtattgagccaatctcctacatcgagtatggtgccggccgtacattcgtcaccgtatggctgttcggcaacaagaaaatctactctgcgatgatagagctgttgccgggcgaatgggaggatcctacggttccgcatggcaaggccttctttgacgtgtaccgcttcaagaacattaacgacattcgcgtagacaactatggctgcgtgattacgttgaaaacgggcaagaaacttgagctcaaatcaaacagcctcgaaggcgcggattcattcctgttctccgcgcgaggattggtcagcctgtgggatgagtacgacgactgaaatatgtgtcgtgatgcgtgacaatacgcatttggtttttgccaattttgcaaagcagcaagtaccacaaccaaaacggtaaggagcgcaatcatggcgctattcgcaaagaacccaaatgaagtgaactatgccggtggcgagaaacatttcgttgacgttatcaaaaatcgatccgacaacgataccttgattttccgcaatccggaagaggatttcaatcatggcaccacgttggtggtgcagcccggtgagcaggcggtattcgtcaatgaaggtaacatcgagcaggtattcgattcaggtacgtatacactgactacttccaattacccatttatttcgcgtctgcgtaatgcgctgtcgggtggtatctcgtcattccattgcgtggtgtactttgtacgcattgcatcaagccgtgagatcacctggggcacggatactccggttaaagtcatggataaggcatatgccgaccagttcaccggcgtgggcatagagactgaggtcggagcgcgtggatcttaccgcgtcaaggtatccgacgcaggcgtgctcctgacgaatttgattggcggcaactatgacctgtcccagcaggagagcttgcgtgacttcttcaggaaccagttcctaagccatattgtggccctcctgacgcaggaactcaccaactggaatggcccattgattagcgctccggccaatgtgctgacttatgctcaggctattcaggggcaactggcgccaatcgtaggagaatatggccttgatttgttgaacttcaacatctcggggatgaagatattcgacaacgaagaacgccgccaagctcaggaactggccaccaagaatcgtgaacagtattacggcaacatggcagccggtgcaggtgaagcggctcgagcacaaggccagcagcaggcataccagacgcttggcacgaattaccaacaggccgagatgctgcgggcaatgaatgctaccgcggcaaatcccggttcagaaggcggctcattgatgggtgccggcatgggactgacgatgggtgcaggactgggacagatgttgccaggactgatgggccagactctacaagccgctgcaggcgcacagcccgcttcggattcgcagaccgcgggctcggctccagctggcaaagaagacccagtcgaaagactgacaaagctgaagaaactgtcggatgccggactcatcagtgctgaggaatttgagtccaaaaaggcagagatcctcaaggaactgtgagctataatgacgcgatatatttcttcgattattgtgacggtgttcttcgccgtcgcagctttggctttcggtttccaactgtccatattcgcattcgcgccgcttgcccagtacattgttctggtcttcatgctgctgtttgtcgttttgacgtgggtgtcggattggaacgctgcgaataatactatcggcgaaaatctgtattaccgagtaattgccgagaacggtgttttcccgattgccggatatgcgattcagtgcgtgttcgccatcctgtacggaatcgcgtggaacacggtgccgaacccaatatctacttggttgcgtttggtgttgcccaagggactgttcatccccttgattattgagctcatcatcaccgcggtagttgtggtgctgtggatgggcaacaatcgcgccaatggacatacggtgactcagcatgtcgagcaacacaacaagattgcgcagcgtgaccagttcaaggggcaggtattacttcttaagcagcgtgtggatgaaagcgacgcggataaggctgccgccatgaggattatcgaacagaaagtggcttcactgcctctgaatccaaatccatcgacgacattgttctatcagcaggctatgcagctggtaattaccgctaatcaatctccttctgatgtctcgctggagaccttggaagggattaaacatgcgataacgatgattcgataatcgcgaataacaatttgttcagccctaccgtggatttctaccaaatctgcagtggggctgtgtcatgcgtagacttggcaaatatggatatgaatactgtgctcgccgttgccggcgtgattgtagtggcgattgtggtaatcgccctgagcatctggttgggcaagtcccgcaagcgcgatttggatcgtgcgatgggcaaggttgcccccgacaataagaagacccgcgacgccaaggccgccgccgacgctcggctggccgccgaagccgaggaagccaaggctgcgactgccgcggccgccgccgagtcggccaagtcagccgaatcggtcaaagccgagtccgcgtcagccgcgcaggccgaacccgaaccggcagctgcgcccaagcccgagccccaacctgcctccaagcccactcccgccagatccgagccccccgaatcggtcggctctcgactgacccgactcaaggccaaactcgccaagtccggcaacccgttcggcaaggccctgttcgacatcctcgccaaagacaatctctccgaggccgattgggaagacgtcgaagacacactgctgcttgccgacgtcggtgcggatgcttccgcccaactggtcgatgacctgagaaccgacgcccgcatcactggtaaagccgacccagccgaagtacgcgccacgctcaaggagaagctgctcgatctggtcggtcgagatacggaccgccgcctcaatgccgaaaagccgggtgccgccaagcccagcgtcatcatcatggtcggcgtcaacggcaccggcaagaccaccacggccggcaaactggctcgactgttcgtggccgaaaacaagcaggtcatgctgggcgccgccgataccttccgcgcggcggccgccgaccagttggaaacctggggcgccaaggtcggcgttccggtcgtgcgttccgacaaggacggtgccgacccggcatccgtcgccttcgaggcatccgccaaggccaaggaagcgaacgcggacgtgctcatcatcgacaccgccggccgactgcagaacaagtcgaacctgatggacgagctcggcaagattcgccgcgtcaccgaaaagaacctgccggtggacgaggtgctgctcgtgctcgacgccaccaccggccaaaacggcatggcccaggccaaggtgttcgccgaagccatcggcattaccggtgtggtgctctccaagcttgacggttccgccaagggcggcatcgtgatcagcgtgcagaaggagctcggcgtgccggtcaagctcgtcggtcttggcgagggcccggacgatctggcgccgttcgatcccgaaggcttcgtagacggcattcttgcgtaagccaacgtccacgttgtgagagcgcaaaacgcgcgacttacctatagaccaagccccgaatcatgctcgaaacatggtcggggcttcgtcatatccgttggaatcgcgccaaaatttcctcgagcggccgcacgtacgcttccagccacgcttaacaatcgcgtaacttggcgtaacgaaaccaaaacgagaccggttttaactgacaaactgttagcccccataagggggacggtattgtagagacaaataagacgccggccgcacaaagcccccggtgccatgaacgaaagagagggaggtagacatgggagcgattgattccggtaacaccgcatggattctgacatccgcgtccttggttttcctcatgacgcctggtgtggcgttcttctacggtggtatggttcgcgccaaggccgtactgaacatgctgatgcttgaggcggccgcgctgtcggtcactatgattatttggactttgtggggttggtccatcgcatacgccggttccgacatcggaggcatcttcggcgacccggccagcggcttcctgctgaaggactccatggtcgcgcaggacggcgtgttcaccgccaccggtctgaacgacaacaactacccggtttccgtggacgttgccttccaggtcgctttcgcgatgattaccgtcggcctgatctgcggcgccatcgccgagcgtgtgaagtacagcacctggatgatcttcgtggcgctgtgggttaccttcgactacgctcctatggcccacatggtctggaacggtggtctgctgtctgctgacggcgccatctccaaggccatcggcgcggccgcccacgatttcgcaggtggtaccgtggtgcacatcaacgccgcagtcgccgccctgattatcgtgctcatcatcggcaagcgtaagggcttcggcacgcagccgttccgcccgcacaacgtgccgttcgtgatgctcggcgccttcctgctgtggttcggctggttcggcttcaacgctggttccgccttcgccgccaacggcaccgctggctacgcttgggtctccacttccgccgccactgccgctgccatgctctcctggggcttcaccgagaagattcgctccggccactacaccgctatgggtgccgcctcgggtatggtcgccggtctggttgccatcaccccggccgccgatgtggtttccccgctgtgggccatcgtgatgggtgccatcgctggtgttctgacctgcctggcctgcggtctcaagttcaagttcggctacgatgactccctcgacgtcgtcggcgtgcatggcgttggtggtttcaccggtactgtcctcgtcggcttcttcggcgaaggcaccggcctgctggctggcggcgactggaagcagctcgtcgttcagctggtcatcgctctcgtcgccatcctctactccgcggtgatcaccgcgatcatcgccttcgctctggagaagaccatcggttggcgcgtcaccgaagctcaggaagtcggcggcatcgatcttgccgaccagggcgaacgtgcttacgattttgctggtactgccagctctgttctcaaggaggtgaggtgagatgaagctcatcaccgctatcatccagccccataagctcgacgacgtcaaggaggccctcgcggccgccggagtgcacggtctgaccgtgtccgaggccaacggctacggccgtcagcgcggccacaccgaggtctaccgtggcgctgagtacaccgtggacctgattccgaagattcgcgttgaagtgctgtccgatgacgcggatgccgagacgctggtcggtgtgatcatcaagtccgccggcaccggcaccatcggtgacggcaaggtgtgggtcgctccgctggactccgtggcccgcgtgcgtaccggtgagaccggttccgccgcgatctgataacacagacgtccatgcctagaaggggatggactgcatgggaaaggtccccgcacgccgcgaattgacgccgtgcggggacctttttggcaatgaaagatgaagcaatgacttcagcagtagatggcttgaaacaacgattcatggatatgagccagccggatgacgatggtgtctaccggaatggtgcgaccaagcgtaaagcccgcacggaactggccatgcaatgcctcacggagctgtggaatgcggcctgcaaggatgtctctttccccgtgcccgactccggcatcggcttcgccgcggtaggctcgctggcacgtggtcaactgggccccagctccgacctcgacttggtcatcatctacgagcctcgcacgttgaacgaccagcagctcaacgagttggccaacaaactctggtacccgctatgggacagcggtctggacctcgaccactccatccgcacgcgcgcccaatgcgaggaagtcaccgaccatgaccttcccgccgccatgggctggctggacgtgaagcccatcgccggcgacactgctctgattaccaccaccgccacatccatcctcgaacgctggcgcaaggccgcccgcaagcgcctgcccgaactgctcgactccgccaaagcccgactcgacgaattcggccgcctccaatacgtcaatcagcccgacatcaaggagacccgtgggggtttgcgcgattcggtgctcgtctccgcgctcgccgtctcatggctggccgaccgcccgcacggcatctacgacgaagccgtggaacgtctgctcgacgtacgcgactgcatccatctggtggccggcaaggataccaacctgatgctgacgccctatcaggccaaagtggctgccatgcttggccttgccgatccgacttggcccgaaaacgagcgtgccgcctactcgatcgacgatttgcagacgctgcttgcccgtatcggccggcgcatctccttctcgcttgattccaccgcatcccgcgctggacattcgctgacccacgaaaagccgcgattcgcgttcttccagatgttctctcagcgctctggcggcaagcgtgaagccccgcaattcgacgtggtggctcccggcgtggccaagcacgaaggcgaattggtgttggcacccggtgccgagcctgccaaggatgccaagctggcgttgcgtatggccgtggcggccggcgaattcggtttgcccatcaatccgtctaccttggttaatctgaagcactgcccgattcacgacaaccagtgggatgacgaatcgcgcgagctgtttattcgcctgcttgcatgcgggccgaatcttatggaagtgtgggagagcatcgacttcgtggacattccgggtcgatggatgccggaatggctcggcgtccgcaaccgtccgtccgcctcggccgcccaccggtacaccatcgatcggcatatggtggaggtcacgtcgcgtctgggtcgtgagacaccgtccgggggacggtatgatgacgatcatttcaaggcgttgctgttggccggtattacccatgacatcggcaagcgcgcgttcgtggccgatcacgccgccgagggtgcccgccatgtgccggtgattctcaagcgtatgggctacgcgccggacatcgtcgactgggccaccgtgctggtgcgtgagcatttgaccctatccgaatttgccacgggtaaggacccctatgatccggccgtggcggaggagttggccgaccgcttgcaccacgacaagatgctgttggatatgctgttcgacctgacccgggccgacggctcctcgctcggtgccaccgccggtgagaccatcaccaagcaatacggctggtccaagtggcgcgaacaaatcgtgcgcggcatgtattccgccgctcgcgccgcgatgtaaacggaatcgcccagcacttcgcgcggccgatacctacttcatccatgcgtccgagcgcacgcgcagcccgttggacaggccgcgcccgcccatgagcaccacgttgaacgcggcccagagcacggcggtacgcatcaggtcgctcgtcagcgccggcgtcaccatattggccagtatgagtatgagcgtcacatacaccacggcggtcagcgtgcaggtgcctgccagatagcggtagtcgcgcgcgccgataagaatgccgtcgattgccatcatccagccttgcagtgggaagaagatgcccatcgtcaccatgccaacggcaatcaacgtctgaatatttggcgtaggggagaagaagtgcccggcgaacaggccgactaccgcaaaagccgtgccgattaccgcgccggtgaccagccccgcacgcccggtcgcccgcgtcaaccgccgcgcctgctgcacgctgccagcgcccagcgttgtggccaccagcgtctggccggcgatgcccacggaatccagcatgttcatcgcaaaattccaagaggagttcacggcctgaaacccggccaacacggcagtacccatgcgcgcggcacaggcgaccgtagccaccatggccgcacgaatcgccaatgtacgaatgaacaatggcagtccgtcgcccccggctgccgcaataccggccaaacgaggccgcagactcgcaccgtccgcccgggaccacagaatggcggggattaccaggaacagccccatgaaccactgagctatcagcgtcgccactccggagccggcaatgccccaattcagcacaataacgaacaacacatcaagcgccgtgttcaccaccgcgccgcccaccgcagcgatcagcgtgatacgaaccttctgcaatcctcggaaaatgccgttcgccgcatataccatcagcatgcctggcgcacccagcacgattgcgcgcgtataggtcacggcttgttccaatacttcgccctgaccgcccagtgcccggcataatggctcggcagccgcgaacaatcccaatcccagtacggtgccgatgctcaaggccagccacaggccgtcaatgcctgcctgcagtccctcgcgacgacgacccgctcccagcagatgcgccacctgcgcagtggtcgagtaggccaggaatatgcatagtccgactgccgtgaggatgatggtggagccgattgacaggccggccaacgccgcatccccgatatggccgacgatggctgtgtcgataaggatgaaggtcggttcggcgatgagctggccgaaggtcggcagggccagcgccatgatccgacggttggtggagcgggcgtcggccgggccgttgctggtgtttgtgtttgcgccggcatgcggggttccgaagccatcgcggcgtgtggtatcgccggaactggtggctttggcgtcggaagagtttatgtgcacgctcacacgcatatcacgcctgactacattgcgcaagcacctgttgtggacgcggaatgttatccccagactatccaccaagttatccccagtatgtggataacttagtggattatccccagaattatccccaaaatgtggataactattttttctatccacatttgacgcttcagcgtgtcgccgcgctgaccgcaaggtgaaccaacgatgaaattggtgcgcgatgattcggcacgacttgcactttcatgcgttcattaggtcgattgtgcattcattaggtcggtggactttgagagatattgatcgagcgcctcagaatgccgccattccaagcgcatggtttgtggtgttaccaagcacagtgacctaatgagtgaggaatcgacctaatgaacgtagtcgtgcgatatcttccgctcgccacgccacctcctatacttgagggctatggcagaaggaagtgaacactcgtatcagaatgggttcggcagtggctcggatcgtggcgatcgtggcgaccgcgcgggccggggcggcgcgcaggcggcggcagctggcgacccgattttcgaccgcgtgcccccgcacgatgacgacgcggaaatggccgtgctcggcggcatgctgatgagtaaggatgccatcggcgaagtttcgcagaccattgacgtcaccgatttctaccagcccaagcaccagacgatctacaacgcaatcattgatctgttttccgccagccagccggtggacgtggtgctcgtggccaaccagctgttggcggacggcaacctcgacaaggtcggcggcgcggactatctgcacagcctcgtcgcatccgtaccgaccgccgccaatgccatgtactacgcggagatcgtccatcagcgggccattttgcgcaatgtgatcgccgccggcaccaaaatcgcccagctcggttattccgccgagggatcgcaggctgaggatgtggttaacctcgcccagtccgagatctacgagatgtcgatgggcaaggtgcgtcaggactatgccgccatcggcccggtggtccacgacgcgctcgaccagctggacaaactgcagcagggtctcgtcaacaagggcgtgccgaccggattccgcgacatcgacgacgtgacccagggcctgcagcccggacagatggtcgtcgtcgcaggacgtccggccatgggtaagtccacgctcggcatcgacttcgcccgcgccgccgcgttgcaccacaacatgacttccgtggtcttcagcttggagatgagcaaggtggagctcgctcagcgtattatctccgccgaaaccaatattccgatggccgccctgcgccgcgccgacgacatcacccccgaacgctggaacaccctgaaccagttctggaccaagatgcagaatgcgccactgttcattgacgacagcccgaacatgagcctcatggagatccgtgcgaaatgccgtcgtctgaagcagaccaacgatctgaaactcgtagtcatcgactacctgcagctgatgacctcgggcaaggccgtggaatcccgtcagcaagaggtgtccgaattctcccgtgccctgaagctcttggccaaggaactcgaagtgccggtcgtggccctttcccagctgaaccgtggcccggaaatgcgtaacgacaagaagccgcagctctccgacctgcgtgaatccggctcaatcgaacaggacgccgacgtggtgttcctggtccaccgccctgacttctacgacaaggaagaccgccccggcgaggccgatatcatcatggccaagcaccgtaacggcccgaccgaaaccttccacctcgccttcctcggtgccacgtccaaattcaaggacatgtcgcaggactacaacagcaatcagggggtgtgatgatggcaagcaacgtttcacgcgatgtttcgcaagaccaatcgtccgtggtgcagacccgcaaaccgtggtatgcgttcgccaccgtggccgcaggccgcttcgtgcggtttgcatcccgcgtcaccaaacatggcggttcggctttgcccggcaaagtcgtagaaaagattgaccccggcttcctgacccgtacgctcgggcagttgccgcttggcgtggtattggtgtccggcacgaacggcaagaccaccaccacccgcatggtcgcctcgatgctctccgatctgggattgaaggtgttcaccaatccgaccggctcgaacttcgtgcgcggcgtggtctccgcactgctcaccgaagtcactttcggcggcaaattggacgcggacatcgccgtactcgagctcgatgaggcgtacgccgtccacttcgtcaagcaggtcaagccccgttatgcgttgctgctgaacgtgatgcgcgatcagcttgaccgattcggtgaaatcgacaccacggccaaactgctcagccatgtggctgcggcgactaccggcactgtggtactgaaccgcgaggacccgcgtatcgccgcgctcgccgcgaaggccccggctggcaccacagtgcgatacttcggcctcgccgacgatttgcgccactatttcccgtccgatgacgacatggccacgaccgtgtcggtggaaggtatggccgggccgctcccttcagtcagtactcccctcagtccgcttcgcggacagctcccctcggagaggggagcttccgcaggcacggcagaactccccgccgacgtgacacttaccgccgtgggcgaccacaaggccaccttccagatggacagccaggactacgccaccgacgtcaaacttgaaggcgtctacaacctgtacaacgcggccgccgcgctcgccgtggtacgtgcggtgatgcaagacaatgccgccgcatccaaggccactgccgcagccaacgcctgcgccgtgtccgccgacgagctcatcgccgccgtttcccgcgtcacgccggctttcggccgtggcgaggtcatcgacgtcaacggttccccggtcgaactgctgctggtcaagaacccgatgggcttccgcctctcgctcgccagcttcgacccggccaacgcggacaccatgatcgccatcaacgacgaatatgccgacggccgcgacatgagctggctatgggacgtggacttcacctctttgcgcgcgtccggtgtcgccatggtctccggcgtgcgcgcctgggacatggcattgcgcttggggtatgaccaagtgccagtcgccgatacgaacaccgacctcgaacaggcggtcaccgcattcgtcaacgccaatcccggcacacgcaagcacatctactgcacctacaccgccatgctcaaaacccgcgccgtactgggccgcatcaccgaagtacgggacgctggcgtgggcaagtaaccaccctctagcgcccgcgcgccacctcccgcctgcaggaggacatggtgaggaataagacttccccttagcgggaagacatcgacaaggagaacgtgacatggccagaacaatcgatgtggtgtccctgtatcccaaagacatgaacatctacggcgattccggcaacgtgctgactatccgccgccggctggaactgtacggttacgaaccggtcgtccaccagtacaatcaaggcgacgactggcccgaccaggtggaccttattctgggaggcggcggccaagacaccggccagaagaaaatcatcgacgacttctaccatcgcgccgacctgctgcgctcgcttgccgcagacggtacgccgatgctgatgatctgcggcctgtaccagctgttcggcgagtactttgaaaccgtggacggcacccgtctggacggcatcggcgttatcggtgcttataccgtgggccagaacgtgcgtatgatcggcaatcttgttgagcattccgaccagttcggcgatgtgattggctacgagaaccactccggccagaccttcctgcgcgaaggcgttcagccactcggcaccgtcgatcaggacggccgaggcaacaatggcgaagaccataccgagggcgcgcgcgtgcacaacgtgatcggcacctacatgcacggctcgttgctgcctaaaaaccccgccatcagcgatttccttatcgaaaccgccgtgactcgtcgttacggtacgttcgatacgtccgatcagacccccgaacaagccaaggagctcgcccggcttgatcaagtagccaccaacgcgcgcaaggctgccgccgaacgtcctcggtgaattctcggtgagtcctcggtaagtaccaatcagcgaaaaatcagtcgaaatcagtctgagggtctagtacattgccctgttgtttgcgctaggcttggtggtacgagacatggcaccaggccatgtcggacctcgaaggaggggtatcatggctgattttgatcttctgggtgatggcctgcgcaaggtcctgctggcgggcatcggagcccttgccaccggatatgagaagagcagcgagctcgtcgacgaactcgtcaagaagggtgagattacggtcgagcagggcaaggcgctgaacaccgagctcaagcgcaaggtgagcgagacggtggatgacgccaagaaggccgccgccgaagccggcgacaaagctgctgccgcagccgacaccagtgccgccgacaagcccgccgacgagggcaaggccgagtgaccaagctcacacgcactacgccggaatcagagtcgaccccgctttccagcagggtcgaccctattctgacgcctgcgaaagccgaacgtgaggcggcggcgaaccggtccgtcgacacgccggacacgctcaagcgggccgttaccaaggcgactccgagcgtatccgacgaaacgctggcattgttcggacgcaggaacgatttcgccacgcgctaccatctgacgcgccgtggcaagatcaaacgactggggcagatcaccagaatcgtcgagcaattcgacgtgctgcacggcctgactccggtcaagatgcgcctcatgttcgaggcgctcggccccacgttcgtcaaagtgggccagattctgtcgatgcgctccgagattctgccgcaaagcttctgcgacgaactcgccaaactgcgcgccgacgccgacccgatgccgtattccacggtgttggatgtgcttgccgccgaatacgggcgtcccgccgacgaggtgttcgcgcatatcgatcccaagccgttgggctctgcttcactggcgcaagtgcatcgcgccacgctgaaaaccggcgaagatgtggccattaaagtgcagcgcccgggtgtgcgcgaaatcatggcccaggacgtctccatcatgcgctccatagccaaggccgccactaaggtgattcgcacctcgcagatcgtggatctgaagggcgtggtcgaggagctgtgggacaccttcgaatcggagactgactttctgatcgaggcccgcaatctcgccgaattcaagcgtttcgccgcccgattcaaatacatggactgcccgacggtgtacgccgaactgtgcaccgagcatgtggtggtcatggagtacatcgacggcatctctgtctcccacccgggccagctcatcgacgccggttatgacttgaaggagatcggcaccaagctcgtcgacaattacgccacacagattctcgacgacggcttcttccacgccgacccacatcccggcaatatcctcatccggggcggccagatcgtacttatcgacctcggtatgaccggtcggctcgaccagcgcacccgtgcagtcctcaaagaaatgattttcgccgtcgccaaacaggattcgcccgctctggccgaggggctgctgcgatttgccggcaccgaggccgatccggaggactatcccgcgctattggccgatctggacgtgatcgtcaaggaattcggcaccgtggatctggccgaactggacattgccgctttcctgaccgcactgacgcagatggccggccgccacaacatcgaggtgcccagtacggtgaccaccgtcggccgcgcgttggttacgctcgaaggcttgctggacgagttcattcctgatgtgaatatgatcgaaatcatttccgaccatatcgccacgtcgaaatcgctgaagaacgccaccaaagacgagatcaagtcgctgggcgttgaggggcatcaggctttgcatgccacgctcggcaccatgaccgaactcaagaccgtggcccgtatgctgacccgtggtcagttgcgcgtcaacatggaactggtcggctccgaagagccgttccagctgctttcggatatggcgaatcgtctgacgatggccctgattgtggtcggtttgttcgttggctcgtcgattgtctactacgccggcatgaagccgattatcttcggcattccggtcatcggcttcatgggctacgtcgtggccttcgccctcggcgtatggatcgtcatcgacatctacttaaagggccgcaaaaccaagaagcgatgaggcgccggcgcaacgccttcccgtatgggtatgatggaatgtcgattcaccggggaggacagcaatgatggcatacatggagcataaggacctgacgaacgaggtcatcgagcgcgggcgcgcgaatgagatcgccgatggcgtgcatcgggtgctcgaccgtatcgccgaggctgaggccgtcgccggtcgcaggagcgggtcggtgcggctgctggccgccaccaagacccgtgacgtgggtgagatcctggccgcgatcgacgccggcgtgcgctgcatcggcgaaaaccggccgcaggagattatcgtcaaagcgccgggactggcccggctgctggccgaacgtgggtattcattgggcgtggttgagaccgagggaggcgccgcggccgatgctgcccaccacattcccttccatctcataggccaattgcaagccaataaaatcggcaaggtgctgccggtagtggacaccatcgaatccgtggattccatcgaactggcggaaaagatcgcccgccgtgccaccatgcgcggcatcacggtcggcgtgttgctggaggtgaacgaatccggcgaggaatcgaagtccggctgtgcacccagccacgccatcgacttggctcagcgcatcggtgcgatgggcggactgcgcttgcagggattgatgactatcggcgcccatgtggatgatgagcgcacgattcgtgcgggcttcgcgcatctgcgccgcacgcgcgaccagattcttgcctccggtgccgaaggcacggccgactgcaccgaactgtcaatgggcatgacccacgacatggcctacgccatcgaagaaggctccaccatcgtgcgcgtcggcaccgccatcttcggcgagcgcgccttcatctgattggagctatacgaaaaaacgccgcttgatcaatagccaagcggcgttttttcgtaaggattttcggcgtatcaatcacgcatagatattgcgtggacgcatgtcctcgggcaggccgtcgagcagaatcgccacggaaccttcctcgaacacggagcgaatacccgcggccagcagcggtgcgcaagacagtacggtcatattcggcaggcgcttctcttcgggaatcggcacggtgtccataaacacgatttcatgcgcgccgcagtgagacaggcgctccacggccgggccggagagcaggccatgggtggcgaccagcgtcaccgacttggcgccggattcgttcagggtgcgcacggcttcgcagatagtaccggcggtatcgaccatgtcgtcgatgaccacgcagtcgcggccgtcgacatcgccgataatgccatgtgcctcggcatggttcggacgagtaatatcacgctgtttgtggatgaatgccagcggcagattgcctagcttggcggcccactgttcggacaccttgatacggccggcatccggggacacgatggtggtgttgcccagatcaagggtggaacgcacgtaatcgagcagcaccggcatggcggttagatgatcgaccggaccatcgaagaaaccctgctcctgagcggcgtgcagatcgaccgtcataatgcggtctgcaccggcggcgtggaacagatcgaaaatcagacgggcggtgatgggctcacgaccgcggtgcttcttatcctggcgcgagtagccgaggaagggcgccaccacggtaatcgacttggcggaggcgcgcttcaaagcgtcgatcatgatgagctgttccatgatccacttgttgatatcgcccgaatgacactgcagcacgaacacgtccgcaccacgcaccggttcggtgaaacgcacgtacatctcgccattggcaaagtcataggacgtggtttcgaggatttcggttcccaaacattcggccaccttctcagctagctcggggtaggcgcggcccgtgaccaatacgagtcgtttatccggagtgccttcaagaatcgccgacatgcgttcgcatcctttgtttgagtcgctgtgtgatttacgccttaaccagtgtacaagcaccccgccgcagcgaacgccacggcggggtgcctatttcgtaagagtgttgagattgccgaaattattcggagaactcgacactgaccttattgtctttgatggtgaaggtgccgtataccgagaaagtgctggaatcgtcttccggttcccagccatcgctgtaacggtactcgtaattcgccgtcacatcaccttcgtcggtgctgaacgagctatccgacaggctcacgctggtgaccttcggataaccgtcaatcgtccacttgaagttgcggtatcggctggaattggaggtgtagtagccgaacgggcagccctgcggttccgcatcggtggaagccgcgcattcatccagcttgctcttcaccgccgtgtcgatttccgacgtcaacttgtccgtaggctgagcgtcaagagtgccgctatcggagctgttggtgctcagagacacggtcttggcggtgtaatagtcggacttcaccacgccaactttgtagacaccggggtacaccttgagccggtagttgccggtttcgtccgcgtcgttgttcacggcgttcttgggcgttacggtcacgccattgacggtgatgctgcccagcgagcttggcgcatataccgaaatggtcttgaccaacggttcggcgacggtccagttcttgaagatcaggaacttgctgccgttggccaccatcttgatggaatcgccggtgacctccttgccttcaagcgtgtacgtcagctgggcgctcacggtgccatcggcattgttggaagtctgcgagatgcgcgcgttggtgatgtgcgtgttctcgcccgaggatgccttgctggtcagcagtgcgcgctggttcgtatccacgtgaggatcggcgatggtgttggccttgtcgtagtcgccggaggagatggcggccacatagctgttcgccacgctcttcgcgctgaacacggcggaagacagcacgccatacacgataccgaacagtacgaggaagccggccacggcaccaacgatgatgaagatcttcttctgctgctcattcatggtggtggaggtcgcgccaggtgcggctaccggtgccgctccgggagtggtgggagccgcggttgcgaatgtggtgcccggagcacccggggcagcgggcgcgggtacaccgacaccagcaacaggaggctggccggcggacgtcggcgtgacgttgacgtgaggctgcgcagcgtttgcgcccgtacccacaccggcgctcggcgtgccccacgtgggccacttgccgaccattgcgccgctggcatagatgtagtcgaccaccggctgaggcgtagcacgcacagtgccgcctacaagcagtgcccgcagtcccggcatggaaaccaccatggtcgggccgaacgtcagcgcaacgacctcaaccaggaatgcccacaggcccatgaccaggaagtaccacatggcaggtccgatggtctgaacttgcgtgacggaggtgcggttgcccatagtacccatcagcagcgtggcaatcgcccagaacaccatgatggcgatcggggctttccagcagtgctgccagcccatgtaggcacggtcgtacaggttgcgtgcggagacgcgcaatgccgtgtagaaggtgaggaccaggaacacggcgaacaggatccaaataggccatacggtaacgctgaggttgatgctgaacaggctgagatcctgcggcagctgaccggactcggtcagtgtaatggcgccgaaggttccccaggtaaagaagaactcgccgatcatcagcagtgtgaccgggaacgtcagtatcaggattccctgacctgaggagaatgccacggcgaacagggccaccaggccgacgatgaagagcaaagccagctggaagctcaagacgctgaccaccgtgcgcgtgtatccgcgaacgcggtgtgcccactgccaagtagctccgaacacattcttggaatcggaagcatattgggccagtgcatagccggccagagcgccgagcgcggagagcaggtaggccataaagaacgtacgcactgtggcgccggtcaccttggccacgatggtggtgccactggcgagtggtgccgccgcgatggccgcaagcagcgtgatgaccacggccggcagcaatccggtgataaagccggagatcaggccggtgaacttgaatcgaatgctcttggaacgggccagcatgaatgcgccgaatgcggtgccgaccagcaatgccaagccggtgagccccagtgggtacgacatcatgttgctggcgtccatgctggaggatgagaggtcgacgatgtcgaaatgaataccgccagacaggcccatgaccaacgataggaacaggtagtggaagaagttcatgccgttgccggtgatgaacatgccgccaacggcttggttcagtgttgaatcggccccgaggctgggtgctgcggtgctcatggaattcattgcgattgcagggaaaatcgaaagcaccaaggcggctgccgtaccgatgccggccgcaatgccgatggtctgcatgttgggggcgccgaacagttccttgaccagtgggctggaagagatgggttgtgccggagcggcgggagccgacgatgggccgggctgccctgggttcggaatggccgtggtcggtgcggtgaatgccggtccgcctgcgggctgggcctgcggctgtgcagcgggctgaggcgtcggctgcacagccgctgcgccgggcaacggaatcgatggtgcgggagccgcgggctgtgcggtcgtgggaacggcgccggtgggttgaccgggcgtgggtgcggcgggcgtcgctgctgctggagctgacgccgcggcaagatggttgccgcaggaaccgcagaattgcgctccttcgcgcacagctgcgccacaattaggacagaacatatagtccccctttcttctgatgcttcttcgagcactatcgtacccgcaaaatcagcgccatgaccatagggcgaggctcgaaatggacaatactgggtgatggcgcgcgggcttggcgcgcgggcttggctgcgcgggcttggctgcgcgggcttggccaaaatggtgggcatcgcgaaaccggcaggaatatggccataccctgtcccgccttatatatagactgtccaagttgcccgaagatgcggtgccggtttggtgctgcgtcatgggctaacacgcatacacactcctgccacggaacgtccgtggccgaatagtccgaaggaggtgggtgatgtctgcgcacaagtacgaactgatgttcatcgccgatcctgagctggatgagcgcggtctgaagaagctgaccgagcagtatctggaactcgtcaccaaggaaggcggctctttcgatgagcccgattactggggccgtcgcaagctcgcctatgagattgccggtaagaccgaaggcaactacgtcgtggtgaagtacaccgccgagcccgctaccagcgatgagctcgaccgtgttctgaacctcaacgaatccgtgatccgtacgaagatccttcgtaagggctgaatcaagcgtttagtcagctgaacagctggtattcaaggtaagtaagaaggaccgttatggcaggcgaaaccgtcatcaccatcgtgggcaacctcactgcggaccccgagctgcgcactattggcagcggcgcgaccgtggcgagcttcacgattgcttccaccccgcgaacctggaatcgtcagaccaaccagttcgaggatggtcaggcgctgttcatgaggtgctcagcttggcgtgacctggccgaccactgcgcccagtccctgaagaagggcatgcgcgtgattgccaccggccgcctccagcagcgttcctatcaggcacaggatggttcccagcgaactgtcgtggagatgcagctcgatgaaatcgggccctccctgcgttacgccaccgcacaggtgacccgccagtcgtccggtcagggcggcttccagggtcgttccggtggtctccagggtggtcagcagcctaatcagggctatggcaatcagggtggccaaggtggttatgccggtggccagggcggttacaacggtggctatcagggtggtggcgctggatactcccagcagcctgccgctcccgccaacccgtccgctcctgcggccgacccgtggagcaatgccggtgcatctgatgccggtagcttctctacgttcggcgcttcctccgatttcggcggcggcgacgattccgacccggagttctgatcagtacttacctccccgctgccagcagcaatcaatatcaagatttataaggagaacatcatgtcacgtaagaggccgcaaccgccggtcaagccgttcaagaagaagccgaacccgctgaaggccgccaaggtcaccgagatcgattacaaggacgtcgcgctgctgcgcaagttcatttccgatcgcggcaagattcgttcccgtcgtatcaccggcgtgaccgtgcaggaacagcgcgagctctccaaggcgatcaagaacgcccgcgagatggccctgctgccgtacgccacctcgggtcgctgagttagggaggctttgaacaatggctgaaaccaaggttattctcaccaagaccgtgtccaacctgggccactccggtgacgttgtcgacgtgaaggccggctacgcccgcaactacctgttcccgcagggcctcgctttcgcgtggaccaagggtgctgaggctcagatcaccgctatgaagcgcgctcgtctggccaaggccgtcgccacccgcgaggacgccgtcgccgccaaggccgccatcgagggcactaccgtcgagatcgccgccaaggtgtccgagtccggcaagctgttcggtggtatctccaacgaggccatcgccatcgctctgtccgacaaggccgcggtgaacccgaaggccatcgaggtcgagaccatcaagaccaccggcgacttccccgccaaggtggccctccacccggagatcaccgcttccttcttcgtgaaggtcgtggccgagtgagtcattccggcctagtgctggaatcacacagaccaagagtctgagcttaagcatcatcccccgtgcggttcgcgccgcatgggggatttttgtattggtgtttaaaaacgctggaaataggcgcgacacgccgagagttgcatccgcttcaaatctgagtatattta

SEQ ID NO: 1054 - DNA, 19986 bp, Unknown
  R13_10m  MAG No. k141_2636
accttggtgtctggccgtataagagaatatttgcggcggtcatggaccaggtgagaagcccggtcccattccgaacccggaagctaaggcctggcacggcgatggtactgcactcgacagggtgtgggagagtagcacgccgccgcatcacacgtacaggaagcccctcggagcacacgctccaaggggcttttcgcatacccggaaccggccccggcccgaacccgcatgggcaccgggacctccccacatacccatgagacccacgcccgggaccattcccggccagccccgacggcgaggccgaacggcgcggcgcgtccgcgaccgtgggagcccgacgcccaggccccccggtccgccgcgcagacagctcccctccagaggggagccagaaactggcttggttatggggtcgctctacactggcttctgctatgcattacttcacccctaaacgttgcgccacgtcgaataaaatcatgtaccacgataaggcgcaggctcagcgtgccgctgatcaaagcctgatcgagcgtggagccgagctatgggtgtaccgttgcgaatattgcggatgctggcacctcacacatcgcgatccacaatccagttaccggcatgtaccgctgaaccagcaactcaagccacacagtcgtaaaaagggctacaagccacgtagacgttagcgtcagaagctccacaggcctcgccaacgccgtatctgaggcaggttacggtccaaacacgccaggtcgtaggctgctaagcgttcagggcgctcggacacactccgtccaacactcacatcaccttggtgctttcaaggttgcggataacccaatcgttgaagcgaattaccggcttgcgcaacataagtcccaacagcaatgagggaacaaggaacagtgccagtttgcccatggaaacccagtattccatgccgaatgagcccgccatggccgaatgcatcgcatccaccgcataggggaacagtagccatttagaaacgacctggaagaacgtcggcagtgtttcaatggggaatgtgccgccggaaccggctacctgcataaccagcagtactacggcaatggctttgccgatatcaccgaacgatagggccagcgtatacacaatattcgagaacaccagtgcagacaaccacccgaccatcaaaaactgaatcggatgctcacactgcacgccgagatagaacatatcgcccaggcacaccagcgtaccttgcagcaaagcaaggaaaccgaaaatcatgtatcggccgaaatattcgtggtgcaagcgtaaaccgaactgccgcgcattgccggaagactcggcacgcggcttcttcagcacatccaacgcggcggccggtccggcaatccgcccggcaatcatggcctcgcgaagacccactcccgaaccgagcggcagatcattgcccaaccctaagatacgggccttctcatggtcggaaatcgatactttcaacatggcgaccagaatgatcgcaccgacccagatagacagaatcgtgtagaacggagccatcgcggaaccatagttggcaacgggatagagcgctatgcggtcgaccgctacgggtgccgccagcatggaagcaatggcatcgggcttcgcagaggaaatcacagacaggtcgttggtgccgccactggtgatagaggcgagttgggaagacaagttgtcgagtttcttcgccgaacgggtcaaagcgctagctgcgtcagtcaaggccgactggatatccgtcaggctgtctgaaacgccgccagaaagacctgacacgctgctgacggtcgacgcaagcccgtcgattacggaacttgcctgcgtggccacttcgtccatggacgaggtcagattgttcagttgcggtttcagcgtgctcttgtacgtgtctgaagcctgagtaatcgattgtttggcggcggcgatttgtgatttcagatctcgacgcgctgtatcggcatcggcagtaccatttgctatgtgcgtggccgcatcgcccaacgcggtggcggcttgctgcatgctctgctgcgcctttgtggcttggtctgcagccgcgttcagttgagcggcaacggtatctccgcccacgggcagtgaagccgcttgtttggcgagatctcgtaaagcggcggcatactttccaaagctgtcggcctgagcctccactttggattgcatatcggtcagcttgtttgatatctgcgaggattgtgagcccacatcggcaaaagcggcatcgatctgcttggcaatggtgtcgtaggatgaaccggcctgctgcaatgccgtaccgacgccatcggtggctccggacaatgccttgtcgaggctggagacgccgttgcgggtctgtttcaacgcctttttggttgtggccgcagctgagcctgttgatcccagcagcttatcggtggaatcaatgatgctgttggcggccccgagcagattggcataggaatccatctgcgacgcagtaccggtcaaacgagacgacatggtggcaatatgactggaggcgttgttgacgtactgctccatttgcgggctttgcgcgtaatcggccacgttggaaaccaaatccagcgccacgctcgccaaggtcttcacaaatgtctggtcgatggtcgtggccacggtggtagcaccctggtcggtgatatgcggagcgatcggattgattttctcattgagatagtattcgagcttggcgtgcttgatcttcggtgaaaacagcgtcatcatatcggagctgaagctctttggaataatcagcgcggcatagtattcgcctgagttcacgccatcgatggccttagcacgatccacaaactgccagtcaaggtcatgattggccctgagcgtattggtcacggtttcgccgacgttgatggtgatcggcatcagatcggacttatagcccttatccacgtttgccacggcgaccttcaaggccttggtgttgccgtacgggtcccagctggcggcgatgttgtaccaggcgtacagtgccggcacaatcaccaatcccatagccacgattacggcgatcacattgcgggtggcttggcgcacgtcacgtacgaatattttccagataagcttcatcgtgcgcctccttgcccagactgcccagactgaccggactgctcgaactgtgcggtgtgcgcagtcggctcggcggcctgatcgccgaacagtgtgagtcgttcagtggtttcgccgatatccggattgctgcccatcgccgcttcgtgacgtccgtggccgtggaaacgccgccacacatatccgttgagcatcacattgcggaactcgtcggcactcatggcactgacgccaagctgcatggcgtaggtttcgcgtgcgtattcaaccacaatgagataggcgtcgataagaataatcgacagaatccaggaggtcagcatggcgattttctcttgggtgacgaacagcagtaccaggaatacgaacgggagtacggtcagcaatgtcagaccggcaacgatcatctttgggtaccgcgcgaagaaccggtgcgcgcgatgagcgatgatatcgcgcagttccttgctgtcggacaccgtgcggaatacggagttcaagctcacctgttcgttcaccatgctgttgtgctcggtgatcatcaggtcggtatctcccaaacgatggtcgaacagcgcgttcaggttcatcgcataccggcgtacgacaagtcccacgaaaagcgccgccggcagataccagaacaggtgcagcatgtcgagccagtaatggttcgcgtacaggccggcgatcgggccgcgcatcgcgttgatgccgtaggtaaagggcagccatgggtgcagttcgcggaagaagttcggcatcatttcaatcggatacaggccggaggcaccgggtatctgcacaatgaccagaattacggcgatggctttgccgatatggcggaacgccacggccagcgcgtaaataatgttgatgtagacgaacgaacagaagattccggccaagatgaacagcagcggatgctcgcattggatgccgagcaccagatcgccaatggtggcgatgatggcttgcaggaatccgatggtgaccagcagcagccagcggccaagatatgcttgcgtagcggtgatacggcgaatgcctttgcggtcgacctcaagcttgtagatggcaatcagcacgaaaccgcctacccacagtgccagattcgtgtagaacggggtgactgcggacccgtaattgtcggtggcgtacacgactttcgtggtcagggtgacgggattgcccatgaactcgccgaatcccttgtcatccagatgcagcgtatcccggattttctggtaagcggcggaactatcgagcgtggcgatatcggtgcgtacggtggcgacatcgctggccgcctggcgcagcgaatcctgcgtgctgccgatggtggttttcgtttggttcagggtatcgacaagctggtcgaacagcccgtcggcctgatccaaggtgccggacaacgaagtcaacgtgccatccagcgtgccgttcagggcggcgaaactgttcaatgatgaggtgagcgacggcattacggtgccggtcagcgagccgcgcgcggtattcagcgccgcgatgccgccggtggtggtgttggtcatggctccggaaaggttcgtggtggcgtctttgccggagttgatgaactgtgtggtgtcggtatggaaggtgttgagctgtgtctgctgtttgctgatcaatgagtcgagcgcatcgatttgtttccagatgttctggccgaccgggtcggtggtgtctttgccgatgccggctttggtcagcgcgtctttcagatcgctgattgacgtttgggtggcgttcagtggggccgaaagtgtgttggtgatggtgtcgacggagttctgcgcgctgttgaaggagccggtgatgctgccggcggcgttgttgacgtggacggccagtccggagagttgtgctgaactgctgtcgagcgcgccgaccagtgtggtggagaaggcttgtgacccggcctgtgtttccgccaacagtgtgccggactggcgggaggcattctgcgcggccgcgacggtctgcttgagtgaggcggtggtctgtttggcgtcggcgagaatcgtgtctgattgggccagcgtgtcctgtaagtcggtgagtgaatcctgaacggtgttcagcgtggacatcaccgtattgagatcatcgatcgtatcgtgctggactttgccagtggcttggccgagatcgtctccggtttcggaaatggccgaggcaacggtggtggctaccgtggtgacgaaggcggagttgatctgctcatcgatggtggtggcgccggtgtcggtgattttcggcgcgatcgcgttcttcttctcgttgacgtaatatttgattttcggctgtttggaggttccggtcaccgattcgaccaagctggcgctgaaatccttgggcagcacgatggctgcatagtatccgccggtctccacgccgtggacggcctgttcctcattgtctacgaagcgccagccgagttcgtcgttctgcttgagtttcttgacgacctgccggcccgcatcgagatggccgaccagatcgttggtgatgccttggtcttcattggctacggccacttgcagattgccggtggctgaatagggatcccagttggcgagaatgttgaaccatgcgtacagcgagggcagcattgctacgccgagcgtcaccacaacggcaacgggattgcgtaagatacgtctgcaatcgcgtagaaagacttgccaaaccgtccgcatccagtccctcttttccggttcgtagtcattgcggccacatgcagtctattcccaccactggtgcggatactgctggtttggcgggttttcttgcaaaactggccgttggttgtccgcataatgggactgatatgtgaacgtttgttgatggtgcgacaccggcgggatggttgtgcaattttgccggtatccggtgatgaaatgttgaggtgttggaactgagtcgtcgcagtgctgagaccgagacgactcagtgacgagcctatccgaggctatctcgttggttctggtctcactgatccagacggaagccctgagcggcggccttgtcgagcagtgtctgatggctgacatcctgccgactgatcgtggcgacctgatcgctgaaagcgtccaccggacggtcggcttggcgcagatcgtagtaccggtgaacttcctcgtcgaaggcgggcagctggtcgagtacgccatcggcgtcagccgggtaggtgttctcgaagaactgcatcgtgcgcggcatgcgcggcttgacggtcgggttctgatcgggcttgccgatggccagacccagcaccggatacgtgtattccggcagattcagcacgtcgataaggccggggatgttgttgagcagagagccgagaatcacgcagcccagtcccagcgaataggcggcggtctccatggcgtgcagggccagcacggcgtcgttctgagcttgggtgaagcgatagctgtacttgagatggaattcgtcggaagcgggatcgatacccttgcgttcggcgatgcgtgcgttgcggtgctcgtcgatgacgaacacgtacagcaacggcgcggtggcgatatacggctgatggccgaattcggcgagcttggctttggtggccgggtcggtgatacggatggcggaccagtcgttaaggaactggctggacgcggcatgttgggcgacggtttcgagcgtggcgcgggtatcgtcgtcgatggcctcgtccttgaacttacggatggagcggcggcccagaagagcctcgattgttgcgttgtaaccatggctttattgtcgcacggcagacgccggacgccacggtggattacctcacagtgaaatgccgatattgtgtggcggaactgtgctggactgatggttcctgtcgattgactgatggttccttgacgaaattccagcgatgagtcatcagtcagccaacagaaaccatcatccaaccgggggattagcggctgggcttgcgatggcggtggtcgacgaacgccttggagccccgatccgacagctgcgaaaccactgcgccgagtgcggccgaaacggcggcgaatgccagactcattgccagactttgcggcgcgtctgccgccagtcccttgcgcagattgcgtttgcttgtgcccttgtcccatatcatctggaatgctttgccggcaaccaagcctgccagcgctgggactgccgacttgatgagcttgtcgcccagagaatcagggtcgttgagccggtcctcgcgcagcctgttgaccttctcgtcgatgcggtgcaggctgtcgaccgcgcggtcggcgctggaggggaagtcggtgttcgtttcgtcgctcatgactctcagtctaatagcatctcaatcatctcagcgcaaaagatgggcgttaatggtggagtcatgaacgagcgcagactagagtggaggcatgagcgaacagaacgtgaacggcaccgttgccgtcgagaactctcgtggcggcaatggatttttggtgttgctgcgccacggccagaccgtgtggagcgaatccgggcagcataccgggcgcacggacatcccgttgaccgcggtcggcgagcagcaggcagcggatgccggaaggcgcctgcgcgaggccttccccgaaggattcagccagagctgtgtgttttccagtccgctgaagcgggcgtgccaaaccgctgaattggctggttttgcggaccacggtgtgttggacggcatcgctgaatgggattacggccgagccgaggggcgtacgcgccagcaggtgagtgaggccagcggttttgaatgggatgtgtggcgtgacgggccgcgctcgctgacgcccacgctggagggcgactgggtcgagaccttgccttcgggcgaacaggtgccggtccatgccgggcctggcgagacgctggaagaagcggcggcacgcgccaagagcgccatcgacgagattacgccgctgctgaaagacggccataatgtgctgttggtggctcatgcgcacatcctgcgcatcctcacctcgcaatggctgggcgtggacccgcatttcgcacggttgctgcgtttggatacggcgcactactcggtgctcagcgtctataagggagataacgtcatcgaacggtggaacgcctagccccggttgcgctgcgattgcgctggcctgcccgctactgcgggcgggcctttattgtttgtggcgggaattgcggtatgtcgataaatgatttgcaaacgatagcgtcggcgtgttgttttttgatgggtataagtggcaatcgattgccatgaaagatatgttagcgctctcatgattgcgaacgcttgcattgcgataatgaggcaaaaatgactgaattaatgggatatttgttgacaatggcctgaaaatgatgatttatgacgcgccgatattgctatcgtttgcaaaaagaagcaaaccgttgcacaatagtgcatgtcgatagtcgtaaaggtgcgtgctagcgtacctgtcccgaccggggacggccgggtcgacgatgaaagagaaaggttcgatgatgaatcgtacagtcaagtcagcagtcgcgatggcggctgtcgctgcgatgtccctcggcgctttggcggcctgcggaagctcgacctccggcgatgacgccaagggcaaggtctactacctgaatttcaagccggaagcggctgatcagtggaccgctctggccaaggaatacaccaaggaaaagggcgttgaggtcaaggtgcagaccgcggcctccggtacctacgagcagaccctgaagtccgaaatcgccaaaaccgaagccccgaccttgttccaggtcaacggcccggtcggctaccagaactggaagaagtacaccgccgacatgtccaatacggatgtgtacaaggagctcaccaaccaggatgtggccctgaaggatggcgacaaggtggtcggcgtgccgtacgtgatggaaacctacggcctgatctacaacaaggacatcctcaacaagtacttcgcgctggatggcgccaaggccacgtccatggacgaaatcgacaacttcgacaccctgaaggccgtggccgacgacatgcaggcccgcaaggacgagctcggcatcaagggcgcgttcacctccgccggcttcgactccagctccgactggcgcttcaagacccacctggccaatctgccgctttactacgagttcaaggacgacaacgtcaccgagcagccggccaagatcaagggcacctacctgccgaactacaagaagatcttcgacctgtacatcaccgactccaccaccgaacccacccagctgagcgccaagaccggagatgatgcgaactccgagttcgcgctcggcgaggccgccttctaccagaacggcacctgggcctggaccgacctgcagaaggccggcatgaccgacgatcaggtaggcatgatgccgatctacatcggcgtcaagggcgaggagaagcagggtctgaccaccggttccgagaactactggtgcatcaatgacaaggcctccgacgccgacaagaaggccaccgaggacttcctcaagtgggtgatcacctctgataccggcaagaaggccctctctcaggacatgggcttcaccaccccgttcaagaccttcgatgacgtcaaaagcgacaacccgctgaccgaggccgccgtggaagaccaggagtccggcaagacccaggtttcttggaacttcaccatgatgccgtccgaggaatggaagaacaaggtcggccaggcgctgctcgagtacgcgcagggcaccggcaagtgggatgccgtcaagaccgccttcgtggacggttgggcttccgaatacgaggcctcgcactgagtctcatagagtcccatagccgataagtaacaatccgcggcgcccctgcctttccttctccaggggcgccgctttgtattgctgagtctcgcacaaaatcgtccgccgcagaaaagtgtgaggcacgcacccgctcaatcgcacgctgtggggccatgaatcggcgatttttcgccattctccacaatgtgcgattgagcgttattgtgcggttgcctcacactttttctatggtgggctttgttgtgtgagcctacttaacgcgggaggtggaggagcggaccttcagctgggccgggaacacgatgtagggttgctcaatcggcttttcgtcaatgagatcgagcgtcatgcgggctgccacgcgggccatttccaccggatcctggcggatggtggtcaggccgatatcgccggtgtagaaactatcgtcgtagccgaccagcgagacgtcgccgggcacggagaatccattgcgctccagctggaacataagcggcaaagcgatgccatcctcctggcatgcgatggcggtgggcatctcgtcttggctcatgagttggtcgaccacgtcgctgatttcataacgtccatcgtcatcgaccttgcagacgatgacctgcggctcgatgccttccctgcggcagcaggcggtgaatgagtcgaatcggctttgcacggagaagctcagcgacacctcgcgattggtgctgatataggtgatgcggcgatgtccgagattgataagatggcgggcggccagcgtggagccctgcacgtcgtcgatattgacggcggcggtaaagccgcgggcttcgggctcgactgaattgatgccgacgatcggcacgccgaccgaagccagttgcgcgatttcgttgttgtcgatatcgaaagacgccacaatcacggcatcggcgttacggcgtaccggcaacatctcgaagaattccttgcgctcctcgatgctggaaatctggaataccgaaatatcgtagccctgcgtgtgcagcacctcgttgagcccctcgatgaccgaggcggtgaaccacaggcggatatggccgctcatcagtactgcgatgcgcagggcgcggccggatttcagggccgcagccgagcgggagagtgaaaaattgagtttgtcggcgatggcgagcacgcgctcgcgggtcttggccgacaccagatccggcctggtgaaggaacgtgagacggtggagatggagacgccggcctcgcgggcgacatcctgaatgctcgtagccattgcagcccccttgcgttgaatggaaaatcgcaatacacatgcacaactgactacagtgtacatgctgattgattgatttgcggcgatgacaacgattgtattacaaacgtttgcaaagtgtttatgacggcgtcagattggctttatatagccattatcttagttgaaagaagattgctggagccggagtatgctcgagcttgaaacgctgaaaatgataacgtttgacatataatgattcgatgtttactatgaacataggcttgaacgagaacaggccgtgcatgcggttctcgatcggcaggctcgcattgagttgaactccgcagccggcgcacgatgcagtgtcgcaacgcagcggactcaaggaggaggaaaagtcatgatcagcatggctggcaaggcgatacgcagatggtgggcgctgttcgcgctccccacattcgccgcattcatcatcgggttcctggtgcccttcatcatgggcgtctacttaagcttttgcgaattcaccaccgttaccgacggtgaatgggtggggcttaagaactatggcaaagcgttgaaagacaaggaattcctgcacgcgctcggcttctccaccgcgtttaccatcgtgaccaccatcgtgatcaacgtgatcgccttcgccatcgcctacatgctgaccaaggcgatcaagggctccacgctgttccgctcggtattcttcatgccgaaccttatcggcggcatcatcctgggctacatctggctgctgctcctgaacggcgtactggcccactggggccgcgccctgacctataaggcgtcctacgggttctggggcttggtcatcctggtgtgctggcagcagatcggctacatgatgatcatctacatcgccggcctgcaggccctgcccaccgatgtgctggaggccgcggccgtggacggcgccaacggacggcagaccatgttccgcatcatcatcccgctgatgatgccgtccatcaccgtgtgctccttcctgaccgtgaccaacggtttcaagctctacgaccagaacctcgcattgaccaacggtgcgccgagcaacatgtctgaaggtctggcgctgaacatcacccgcaccttctacggccgtatgggctgggaaggcgtcggccaggcgaaggccgtgctgttcttcatcctggtcgcggtcatcgccctgattcagaacaagctcaccacgagcaaggaggtggcagcctgatgaacgagaacaagcctgtgaagcatggcgcattatggaccgtgctgtttgccgttgtctccctgttctgggttttcccgatcgtcctggtgctgatcaactccttcaagcagaaggcgtacatctccaagaacgcgttctccctgcctgccggcaaggcgtttgtaggacttgagaactatgtgcgcggcatcgagaccacgcagtttttcgcctccttcggctggacgctgcttatcaccgtcggctcggtggtgctgattctggtgtgcacctcgatgtgcgcatggtggatcgtgcgcgtgaacaactgggctgcgaagctgctctacaccctgttcctgttcaacatgatcgtgccgttccagatggtgatgttcaccctctccaagatcgccgacatgctgaagctcaataccccgtggggcctgtgcatcgtgtacctcggtttcggggccggtctggccgtgttcatcttcaccggcgtgatcaagggcatcccgcaggagcttgaggagtccgccatgatcgacggcgcgtcagtgccgcgcatcttcttccagatcgtggtgccgattatgaagccgtcgatcgtctcggtggccatcctcgaagccatgtggatctggaacgattacctgctgccgtacctgacgctcgacctcggcaagtacaagaccatctcggtcgccgtgcaatacctcaagggcggctacggttccgtggatatgggcgccatgatggcctgcctggtgctggccatcatccccatcatcgtcttctacttggtatgccagaagtatatagtctctggtgtcatggcgggagccgtcaagggctgacgactcgcgtcgtcagcccatggctggaagcccagtgggcttccagcaggctccaggatgagccgcgacagcggcgaagctaatgatgagcctcgtcgtaggcgagtccgtaattgcagggccgaaggcggagcggtcaagggctgagctccaccaatccggctcccctctttgaggggagccggattggtggaagccgactgaggggagtatcctgagctccatcaagtctcccctcagtcatctgcgatgacagctcccctcagagaggggagccacaggcgacacaaggagtagttgatgaactggctggcaccggactcgaaattcatgcgcgcgtggagcaatcttgttgacggcgtatggatcaacattctgatgctggtcacttcgattccgctcatcaccatcggtgcggccctgaccgccggccatggtgcttgccgccgctccatcgagggcgagggcaaaggcgtaaccgccaactacttcaagtcattcaaagccaacttcatcaaagccacactgctgtggctgccgttcttggtggtgctgattgcactggtctggtcatggatcgtcctgcagatcacgccgctgctcatcatcaaattcgcgctgaccatcctctggcttatcggcttcgaatgggtgttcgcgcttcaggcacgcttcgagaacaccgtggccggcaccttgaagaacgccttcatcttcggcatctcccacatcgcgatgaccgtggccctggtcatcgtggatgccgtgttcgtggcgctgctggtggccagctggttctacatgcccggtggactgttcctgctggtggttcttggttacggcaccatgctgatgctccatatccccgtcaccgagcgtgttttcaatccatatctcattgactaggcgggttctctcgcgaatatgcggcgatcttcgaggtctgagcgttctctgtccacgcaagcgcggtaaagataacaaattgaggctattcgctgtttgtggtgggtgatggtcaagtggtggtgacggctttgaggtcgagtctgccgcaggtcaggtagatcatggtggcgaagtagtccatgtcgcggaagcctctcgcccgtcgtttgacgttctggatgacgctgtcggcgccctcgagcacggcgttggtgtacgggtgctcgaagtatgcgacgatctcggcgaagtggcgtcggatcatgcgggcgaagtccttcatgggctcgagcctcgagtgcatcatccacgagcacaggcgatgcaggcgcacccatgcctcggacggggtgcggctgtccgtgtggatgtcctgcaggacctcgcgcatccggcaggcgcggccggtcttcaaccgttgcctcgtcaggttgcgcttggtctccacctgcagttcggtcaggctttcctcgttgcgcagccacaggtacttggtccgtttgagcagcgggttggagcggccttccgtcttcccggccttgtcgacggcctcgttggcgtgcctggccacgtggaacctgtcgacgatccgccgcgcatggggcagatgctcacggatgcccttccggaagcccaggctcatgtcgcaggcgaccagacgcacatattccgggaccccgttgtggtccatgaaatcacgcgagaaccgttcgaccgtggccgggtccttgcccggcgtcacgttgatgacatcgtgctccacgagatcggcgaccacggtgatgtaattgtggcccctgcggctggtctcgtcgatgccgattggcccgtacccgcacctcgtcacagcttgtataatcacgattatactaatcgtgatacaataaatcgtgatgcgatagaaatacgccggcgtatggcataaaggaggcgggcagcatggcattcatcggacgagacgatgacctcaagcaactgcaggaatgtttcactgagcgtagggcacagcttgtgttcgtctacggccgcaggcgcgtgggaaaaacagagacgcttattcaactcgcaaaagacaaggaaaccttattcttcgcggcgcagaatgccactaaagatgaacagctggcatcgttctcccgtctcatgttcgaggcgggtgccccgggcaaggattatctgagtcaatatccttcttgggaaagggcgttaaccgagttaacccggctgccagagccgagcgatggcggccgcaggcttgtgatattcgatgagtttccttatctggtcaaatctgatccgtcattgccgtcagtgctacagaatctttgggaccacacgttgcgtcatgcaaatctgatgattgtgatttgcggcagtgccatgagcttcatcgaaaaggagctgttgggagaaaaatcgccgctatatggtcgtgcgaccggcatcctgaagatgctgccgatgccatattgggatgcagcgcaattcttccccaactatagtagcgaggataaggcgctgacctacgcaatactgggcggtatcccgcgttacctagaggaatttgacccagatgagaccatagacgcaaatgtcaagcggcatattctgagacgcattgctccgctatacagcgaggttgaatttttgttgcacgaagaactgcgggaaactgcgaaatataacagcgtgatacgggcgatcgcgctcggcgcaacttcgctgaatgagatcgcgacacacacgatgatggcaaacgcaacagtatcgtcgtatctcgccaatcttatggaactggggattgtggaacgtgagttcccagtcacggcgaagcctaaggagcgggcgaaaggttcgcgtgggctgtatcagctgagcgacaatttcttccgattctggtattcgtttgtctttccgtatcgttcggaattggagcggggcgatgtggaaggcgtatacgagcgtcatatcaagccggtattacatgattttgccggcaaaccgttcgagggtctgtgccgtgaatggatgtggcgtgagagtgctgctggacggttgcccttccgtgcgcgtgcggttggccgttggtgggatcgtcaggatgagatagacgtgatggccgttgacaatgcgtctgatgctgccattgtgggcgagtgcaaattccgcaatgcgccggtggaccgttccgtgctgaatctactgcgagaccgtgctgcgcgaaccggtatcggccagcgaacatacctgctgttttcgctcggcggtttcgatcaatcactggtcgacgatgctgcggcgtctcaatccgacgttcagctcgtcggcatcgatgagctgtttcatgaatgaatcccatttgcgaatagctctcactgagtgctcatcagtgagagctattcgcaaatggagccttacttcttcgcctgagtgagctggtaggcggcgaagaggatggccagccagatcacgccggcgatgacggcgatgcggtagctggtggagaagcacatcagcaccacgaccagcgccaggaacgccagcaccacccacggggtcaccttggcaaacggcagtttgaagtgaatcgcgtccagtgcctcctggccgctcagaccggccagctcggaatcctcgggagcgccgcccgcggcgaccaccttacggaacttcatttcggtgagcatgatcatcgtccagttgatgatgccggcaatggtggcaatcgacatcaggtagttgaacgcgaactcaggccacacgaacaccacgaccacggcgatggcggtgatcgcggcggacgtcagcacgccggccactggcacgccgcgcgagttgagcttgcccaagtaagcgggcgcattgccctgcttggccagcgagtacaacatgcgggagttggcgtacaggccggagttgtagacgctcatcacagcggtcaggcacacgaagttcaaaataccggcagccgcgtgaatgcccacggaatcgaagatctgcacgaacgggctggacttgccatcgatggtgttccacggcactacggccatgatcacacccagagcgccgatgtagaacacgaggattcgccaaataatatcattggtggcgcgcggaatcgtggtcttcggatcctcggtttcgccggcggtgatgccgatgagctcggtgccgccgaagctgaacatcaccacaaccagtgccatcagcaggccggtccaggaaccgtcggaattctgccccatcaggccgttcgggaagaagccgttacccacggtgaaccagttcgcgaagcttgcgcgcacgccggatgcggtgggcaggacaaagatgatgacggccaggccgccgataatcatggcgatcacggccacaatcttgatgatggcgaaccagaactcgaactcaccgaatttagagacgcccagcaggttggcggcgcagatgatcaccaagaacacggccgccgatacccatgtcggaatcgccgggaaccagtagttcacaaacgaacccaccactgatagctccaccatcgagacgaggatgtagttgaaccagtagttccagccggaaataaagccggcgcgcttggaccagtagcgggtggcatagtagctgaacgcgcccgccttcggatcctcaacggacatttcagacagtgcacgcacaatcgcgaaaatcgcgaggccgccaaccaagtaggcgagcagaatcgagggtccggccagcgcgatggattcactggaaccatagaacaggccggttccgatggcgccgcccagcgcaatcagctggatgtggcggtttttcaatgacttgcgcagcgtggccggcaccggcacgtcgtcggtttcgcgcggcttcttaggcgcatcagtagtactcattgtgctcttctctcacatttcttgggtttggcgcacgcggggcttgccgtgatgcgcaacgttcgttattctatgccgccgtatcgtctcagaaatggtcaatcgtctatttgtgcgctattgcaagcgcgggcgtgggcgcggccggtgagcaggcgaagctatagcgagcgatgcttatgaaaccgcacgcttcactgagttcactgagttcaccgaattcactgtgctcactgcgtggcaggcatacacatggtgaagatggtgtgggacaccgattcgggagaggccgcgagatcggtggcgagccaatattgcaaaagcccaatgctgccggacacggcgaatcgcatacgcatctgcgcctcggctgggtaacccgccgaagattgcaactgttcgcctacaccgcgctggctgtaaatcaatcccagcagctgctgctggaaaccgatatccgctttcgggctcatcagcacttggagatgattgcgattgtcggcaatgtactggcagatgcgctcaataacatgctcgatgccggcaggatctggctgggcgagtagctgttcgagtgcggtggtgacccaggccatggtttcgtcttcaatgtcgtgcagcagttcctcgatgctcgcataatgcgcgtaaaacgtggaacgattcacatcggcccgctcgcacaacgctttaacggtgatggagccgagcggctgatcgcgcagcaactcgataagcgcgtcctgcatggcacgtctcgtgtagcgggtgcggcggctttccgtcaattctttggccatggccttctccccaagttccgacaacccacaatccaactgttggttgcagaaccgacacagtgttgttttacttgagtatagcaggaagttctggcggggcctatggggctaggtggctgccacgagcgcgttggaggtgtgcgatggcgtatatcgaattcgaccatgtggtcaaggaatatccttctggcagcagtgtgattcgcgcgctcgacgaggccagcttcaccgccgaacaaggcgaattaagcgtgattctggggcagtccggtgccggcaaaaccacggcattgaacattctgggcggcatggataccgccacaaccggccgcgtagtggtcggcggacgcgatattacgggtctgcggaaaaaggaactggtgacctaccggcgcaacgatatcggcttcgtcttccagttctacaatctggtgcctaaccttaccgcgctcgaaaacgtggagctcgcctcgcaaatctgccctgaccatttcgatccagaggaaacgctgcgcaaagtcggactgggggagaggatggacaacttccccgcgcaactgtccggcggcgaacaacagcgtgtatccatcgcccgcgcgattgccaaaaagccgaagctgttgttgtgcgatgagccgaccggtgcgctcgattacgagaccggcaaggaagtgctgcagttgctgcaggatatttgccaaacacaaggcatgaccgtaatgatcatcacgcataattccgcgcttgcaccgatggctcacaaagtgattcgcttccgctccggcaaggtgaccagcgaggaggtcaacgcaacgccgcggcccatcgccgatatcgaatggtaggtgattggcgatgctcactgcaagacactctgtgaaacgccccgtgaaacaagcgaggcgattcgtgaaacaacctgtgaaacattctgtgaaacggcggaacctcgacgatagcggcggtcgaggag

SEQ ID NO: 1055 - DNA, 3731 bp, Unknown
  R13_10m  MAG No. k141_2946
cacggctgaagcatatgaccattcaggcatggtgcccattccaatccggcacggaatacggtccgttcgtcggcaacgagcatttccccgagctgaacgccgaattgacccgtcttgccggcaatccgttggtgtgagcgtgagatgacgagaccactgccgttgaggcgcgtgttcagcgtgcatacatctcaacgtcggtcaatgctgtgtcgatgccaacattcagtgcctccgggcgtgcaccatctggcgaaagctgatgtgtatgtccatacagcagtctgcgaccgtcaaacggcaacgccttgccgctgaacttcgccacatcatcgggccaactgtatgccagatcctcccgatacgggtaatgtgaaagattgaccgtaccgagtccctcaatctcgaccgtatcgtgcggctccaaactttcgaacaggttgagtgcggggcggtcttccagccaccagtcatcatggttgccgatcacaccatgcagatgagtgcaattgagcgctcgcaggcagttcttcagatgggtcagcgatgtgcggaaaccgatatcacccagaatccacagctcatcatccgggccgaccgaagtgttgatatgatccacaatcgccttgtcatgcgcatccgtatcggcgacctgacgaaacgtcagacccgcgccgaacgtctcctccttggcctaatcctcggcggtcttgcgatcatgcgcgcgcagcacctcctcatagcgcgagtgcgtcggatcgaacgtcgtgaaccctcgcaacaccgtgaccagtggatgcccgaaatgcgtgtcggtcgtgaaatacctcatgacagtcgcctccccttttcggcgtgcagcaatcatttcccatcctaggcgcagccggcacctgtcggttcgtgttgccataatgaggcgcattgcaggggaacccgtgaacgcaagctgccggccatcgtggcggcgaacgggttgagaaaggcgctgtgcctgacccttggaacctgttggccaacaccatcgaagggagcaacgatgacttttgacgccgtcgcattcggcccgatcactctgaaccacctgccgccattcgcccagcgcctacgacatgcagtacacgtggaaacccgaatgggatgtgtgaggagttcgatggatgagcggtgggcgcgtgctttgcgcgccaaaggcattgatattgacgaggctgaaggtgctggtgggaaacgggcgcacgacggcaaacggcataccaacatcacgggtactggtcgacgctccgagtcccagccggctgccgggctccgcggtcgatccaataccagtacgaatctgccggggccgaaggtgacggcacgcgccacgccattcaaggccaccggtcataagggcggcatcagccggcaggggaattgagctgatcgcagaaccatcgcgcgatgaatgggcgtggccaacgccattccgccattgttgagccgcttctacttggaccggtacctctttgaacggagatattccatattgaagctattccggcatcatatggcacgtaggaaatcccggatatcggcgatttcctcatcacagatggcatgggccatgccggaatactcgcgataggtcagatgcccggcccgttcaaggacctgatgggccgtttgctggtcgggcatcggaatcgtgcggtcctgcgcgccatacgccaggaagaatcgggtaggggagtcaagcgccgcctgttcctcgcccatgaacgaagggctaagcaggatcgcggcatcgaacaacgtcggatgcaccttgaccagacgatacgacagataaccgccttgggagaaaccgatcaatatcttcctgcgatgggcgaatgccgaggcatccagcagtgaagccaccgcatccccgaccgccgcgcattcgcgttggcgctcgtccacgccgcagccgtcgggataccagtaattgccgcccatatagggcctcgcgtaggtggcacggaacgagatatagctgggtacggcggcaattgcggacggggccgcatcggctcgcgtcggcgcatatacggcgtcgagaatccgcaccatctcgctttcgtcgttgccgtaaccgtggaacatcaggaaaatggggtcattgccgccggcatcgatctggcttgtcatctgcattcgcatcgtcatcacctcaccaacgagcttacatgcattagacttgtagcgattgacccaccgagcacgcaaggagcaagttatggagccgaggcgcgggcctctcaccgcaggcgagaaggtgcagttcaccgaccgcaagggcaagaagatcaccgatcagcttgtggctggcggctccacgcagaccgagcatggcctgattctgcatgacgatgtgatcggcaagaccgaaggcaccgtgatcctcaccgtgcacgccaagcgtgaggcgcaggtcaaccaggtttatcccgagaaagacaagaacaagccgtggaagtcgtcgcgcgccatcggcggctgggaatatgcggtgatgcgcccgcgactggccgattacgtgctgtcgatgccgcgcggcgcgcagatcatgtatccgaaggacatcgcccaggttgtccagctcggcgacatccgttccggcatgcgcgtgcttgagtccggtgccggctcgggcgcgatgagcgtgaatctgctggacgccgtgggcgagcgcggccatctgaccacgatcgagctgcgccccgaattcgccaaagtggctcaggccaacgccacgctgtattacggtgaagcccccagctggtgggatctcaaaaccggcgacttcgactccgtggccgccgaactgcccgaacactggttcgaccgtatcatgctcgacatgctcgacccgtggaacagactcgagcaggcataccgcgtgattgcccccggcggcgtgttggtcagttacgtaactaccaccacgcagatgagccgactggccgaagccctgcgcgcggccggctgctggaccgagccgcagatccaggaatcgttcgaacgcacatggaaggcccaaggcctcgccgtacgccccgaccaccagatgatcggccataccggtttccttgttatctcgcgcgccatggcctccggattcgaggcgctcagaaagcgcgatcgcgtgaccaaggacacgcagaccgacatcgactcgctcaccgacgaacagcgtgaggcgcagatcgaggaactggaactgcgcgacatctccgaccacaaactacgtaaggtgttgcgcgacctcgaccgtcaggtgggagaactcggcaacacgcatgaataaccgcccgacgatgagtttgtgaacgctcacacacctctatactggaagcaacaccacaccgccacaccgggcagacggttcgtgaagggagccacggatgggcatcaagctgagcaaagtcgccaaagcagcgaaaaaatacgaccatatcctcatcatcatgaggcatgccaaggccgagccgttcggcgacaagggtgactcggagcgcgagctcaccgacaaaggtctgaaacaggcgaaggccgtgggcaagggcatcgagtcgctgggactggtgcccgaccagatctcctgctcgtccgccacccgcacgcgccagacactggaccgcatgctcaagacctttggcgacaagccgatcgtcgactaccgcatcagcctgtatgacgggggagtg

SEQ ID NO: 1056 - DNA, 30179 bp, Unknown
  R13_10m  MAG No. k141_3195
accgtcaccacccatggcgaggaacagccggaccaaagctacacattcaactggaaataaccgctccgaacatcatgtctctcccgagagtagtcctcacaaccgggcaggtcccacaaggagcatagctcatgcacccaccgcccggtctcaagcacatgagacacttggagccatgactaccatcatcatgcgcacctccgagggcgacatcaccatcaacctgttcgacgacaaggcctcgaacaccgtggccaacttcctgggcctcgccaccggcgagaaggaatgggcggacccgtacaccggccagccttcccatggcaagttctacaacggcctgaccttccaccgtatcatcaagcagttcatgattcagggcggttgcccgctgggcaccggtaccggcggccctggctacgagttcgacgatgagatcgacccgagcctgaagttcgacaagccatacctgctggctatggccaacgccggtctgcgtcgcggcatggacggcaaggtccatggcaccaacggctcccagttcttcatcaccaccgtgccgaccccgtggctggacggtcaccacaccatcttcggcgaggtcgccgatgacgactccaagaaggtcgtcgataagctcgaagcactggacaccgatccgatggatcgcccgctcgagccggccgtaattctgtccgtgaacgtggccgagtaagaccgacacatatacagcaaaggtcctgattggtattccagtcaggaccttttcgtattcttggctccctctctgaggggagctggcgccgcagacgtctgaggggagttccgcaagcccgcgctgctcccctcagtcagcttcgctgacagcccctcccggaggggagccaagcaacggcctacttcatcttgcgcagtcgaggttcggcggattccttggcaccggtgatgcggtacacgtcgaacacgccatcaatcttgcgcacggctgccagcaacgagttgagatgctgcggatcggccatttcgaagctgaactggctggtggccacgcgatcggaaccggtggcgatcgtaccggaaatgatgttcacgccatggtcggaaagcacacgtgtcacgtccgaaagcaggtttcgtcgatccagcgcctcgacctgaatcttgaccatgaacaggcccttggtgctggtccattcgacttcgaccacacgctcaggctgcttgtttttcagatcgatcatgttctggcagtcggtgcggtgcacggatacgccctgattacgggtgatgaagccgatgatattgtcaccgggcaccggcatgcagcaacgggccagcttgatccacacatcgcccacgcccttgacggataccccggtggagctgctggaagtcttgcgctccacgggcttgagcggcagagcctcctgctcgacctcctcatcgacctcgtcggcacccgcatccttgaccagatgcgagatgacgttctgcgtggagatctgcccatcaccgatggcggcgaacacagcgtcggcgttcgggaaattgaggtcgtcggccacaccgatcaatgcctcggtggtcagcagcgcattgaccggcaagttacgtttgcgcatagcgcgggtcagttcgtcgcggccttcctcaatagcctcggtacgacgttccttcgagaaccactggcggatcttgtttcgtgccttcgggctcttgacgaagctcagccagtcgcgcgaaggaccggcggtatcggacttggaagtcaggatctccacggtgtcgccgttgtcgagcgtggtgtcgagcggcaccaaacgcccgttgacgcgcgcgcccatcgtacggtggcccacttcggtatgcacggcataggcgaaatcgaccggtgtggcatgggccggcaaagagacgatcttgcccttcggcgtgaagacatagacttcggacgagccgaggtcttccttcagggaaccgaggaattcgttggaatcgggggtttcgctggtccaatcggcaagctgctgaatccatttgagattgtcggcttcggaaagctcctggttcttctcgtcacgcctgcggtcggacttgtccggcgagctcagggcgcggccggcctggccgttttccttgtatttccagtgcgcggcgatgccgaactcggcgcggcggtgcatgtcccaggtgcgaatctggatttccaccggcttgccaccggggcccaccaccgtggtatgcagcgactggtacatgttgagcttcggcatggcgatgtaatccttgaaccggccgggaaccgggttccaccgcgcatgcacggcaccaagcgccgcatagcaatcctgaatggtgtcgacgatgatgcgcacaccgaccaaatcgtagatgttcgcgaaatcatggccgcgcacgatcatcttctgataaatcgagaagtagtccttcgggcgtccggtgacgtatgccttgatgttctgctcgtcgagatcctcgttgatctccgccagaatctgcttcaggtacacatcgcgctggccggctcggcgagccaccagcaccacgatctcgttgtagatcttcgggtagagcaccttgaagctcagttcctcgagctccgtcttgatggcgttcataccgagtcggttggccaaaggcgcgtacacgtcgagggtttcacgcgccttcttctgggcggacgtggtcttcacatagcgccaggtgcgggcgttgtgtacacggtcggcgagcttgaccaccaaggtgcgcacgtcgcggctcatggccaccacgagtttgcgaatggtttcggcttgggcggaatcacccacttcaagttgactcagcttggtaacgccatcgaccagaccggccacggtgtcgccgaattcggcgcggcattgatccaacgtatagtcggtgtcttccaccgtgtcatgcaacaggccggccgccaccacgatcgggcccatgcccaaatccgcgagaatctgggaaacggccagcgggtggatgatgtacggctcaccagacttgcggcgctgggcggagtgctgggtaacggcacgccggtaggcacggtcgagaatggacaaatcctcatcgggatgatgggacttgcataccttcttgattggatccagcggattgagcggatcggcactgatctcacaacccaacttacgggcggcgtactgctcgccatcaatctctgccatgccagtcacctccctcgtcatgaagttcattgtagccgcgaaccggagccttgtgcatgcacctgttcgccatcattggttccgcaaccgtcgttgccgtcatcaccttggtcattcaaccggcccaatccggtcaggacgccactcccgtcgaaccgaacccacgttcggcgcgatcggatccgggcagtgtctcggccgggatgaaccgggcctcaacataccgctgaatcaccaattgagcgatgcgatcgcccggatggaagacggcggtgcgttccggatcgaggttgatcagcggcaccttgatctcgccacggtagccggcatcaacggtgccaggcgcgttgagcacggtgacgccctgcttggcggccagcccggaacgcggatgcaccaacgccacgtagcccgcaggtagggcgatggccacgccggtgggcaccagtacccgttcaaaaggcttcagcgtcacatcgacggtggtgatgaggtcggcaccggcatcgcccgcgtgggcatagtgcagctgggccggatgttcggggtcgaggctcttgaccaggacctcggtggattcgggctcgttgtaggtctcgtcgaacgccatcaggcggcgcactcctcacacaccggctggccatcctcgtccgtgtaggcgagctggctgcgatgcttgaccaggaagcactgcgagcagatgaactcgtcaccctgcatggggatgacggtcaccgaggaatcctcgttgctcaaatcggcgcccggcagttcgtagtcttcggcgatggcgttctcatcgtcgtcgatgtcgctcgaggcgttctgcgaggacttccccagcgcctgcagcgattcctcgtcctcatccttattgcggggggaatcataatcctgagccatcatggtcctttcgtcgtctttggttcgtaagtcgatatatatagcacggtcagcgccgtactcgcccataggatacacgatttgaaatactcgtaaagttcgacacgtggggcatacttaaaagaagtaatgtctttgcgacggaaagtggtgcgaatatgccagatgatcggcttgaaaaagcccgtttcgtgcgcgtgagcaagacgggggacctcgtattctccattggcggcagggaaatggccgtgagcgtggacgacacgctcgaacgggcgattcttgaggccaagcaggtcagaagcgagacgcgacaggccccccagccgcatcagcagtccactttgccgatttcccagatacagtcgctgattcgcgccggcgccgatccggcccgtgtcgcggagaaatatcatctgagcgaaacgctggtacgtcgtttctccatggccgtggagaccgagaaacagtacgccatcgaacaattccttgccgtggcggcacccaaagacagcagggtgcgcaccatcagcgaactggtggaacgcacgctggcctctgctggaatcggcatggaatcagtgacctggaaatccacccggcgcggacttgagccttggcgcatcgtggcgatattcacttccgcgggccgtgagatccatgccgaatggacgtggaatatgcacgacaattccgtgatgagcctgaacaatgccgctcgaaaactgctcggcgaacagaatccggaatcagccacggattccaaactcaagccgacgattcctgaactgcccggcgactccgtacgttccgcgcgtatcgagcgcgctgtgtctgcttgggcggcgcctacgccttcgattccggccgcacggcctgccgcgatccggccctccgtcacttccacaggttccatgcccccggtggacctatccacgtccatctcaccggccacgaaccaggctcatgacgctacggctcccagcccggtctcttcgcagaccgccggatctgtttcgtcatctgccgcaggattgcagcaatcgcctgccacggcaccagagcagggttctgacaatatttcggacgagaccgtacggcgtggccccaatgcacagctggtagccaccgagcaggagcgggcggccgaatccgccgccaccaaacacgaggcaccagccaaaccggccaagcgtaaatcaggacgttcggccgtaccaagctgggacgagattctgttcggagactgaatttccgaatcaggccatatcgatcaggcagggaatatccatttccaatgccgtttgggagccatgcacgctcggcaggtgggtggctttgtctccttgcgtacgcgaatcgacgagggtcacggctcccgctgcctgcacgaccacatcgccgagcatcggccggactcgctcgcagaccggtccaaacaatccgtccgcgatggcctcatccctggtccgcaccaaggctcggtcttgcaggtaatcgcgccaccggcaagctatatcctcaggtcgttcatccgactcggcatacagcatcagcgagcgcggctctcccccgaccagtgacacgcctcgggtgagctgcggttcaacggcgatgtcaatccgctggcccatgtcggtttgcaccatgccgtggtcggccacgatgacgatcagcgtgcctttgggtgcgctgcgtttcaggagcgcgagctgggcgtcgatatgttcgaatgcggccacccagtgttcggaatcccacccgtaattgtggccgactttgtcggcgtcacggatgtacaggtaggtcaggccgggggtacgggaggcacgtgaggcggccagcacacgatcgcgtggggtgacgttgccttgatagtcggtgcctcgcaatgcggcttcggtcaatggcgatttggagaacttgggcaaccccgagcttgtgacgcgcacctcttgagccgcaagtttctcgaacaccgtctcctcgcgctgctggtcgagcggatcgaccatgggtggcacaggaatgtgcggattggctggtttgggtgccagcgcgtctttgaactggatgagttggatgagcttatggctggcgggttcgagctgcgtatagcccgccattgcggtcagtcccgggcaggttccggtaccgaatgcggccatggccgccacagtggtgcttggagcgcaggtggcgatgggacgctgattggcgcgttcgttcatcagcgaacgcagatagggcgcgtggccgaggcgcatggcgaggttccagaagcccaggccgtccacgagcaccacgatggccgattcggcgtcgggcagtcccaacgcgcgctggcaggccttgggatcggcgtggaccttggtgggagtcggatgcccaatcgcggcggacaaggcgggcagcacggctgacaggtgcagtgctcccccacgccgatcggccggggcgtcatccccatagcccacagtgggcaccagccgcagcaactcgtccatatccggcgtctcaacactcatagttgcccattcaagtagcacccctccccttggctcagtgcgcagagaacggttctcaataacaactgtgcgccccaacgcacataatcaaacaaacgcacatcgactgaaacactggaatcacgccattttatcggcaaacatgtgcgattggcgcaccgaaaccagcgcacagttgttatcgagaaccgttctctgcgcactgtttcgcgccctcccgctaatatgggggcgttcgaaagggagtttcatggcatcacaccgcaaaccgtccgcgcaaacctacgatccgcgcacggtcaaggagcatatcgtcgagacgccgctgaacgaggagatgagcaaatccttcctcgagtatgcgtattcggtgatttacgcacgcgcactgcccgatgcgcgcgatggcttgaagccggtgcagcgccgtatcgtctaccagatgggcgagatgaacctgactcccgaccgcccgtatatgaagtccgcccgcgtggtgggcgaggtgatgggcaagctccatccgcacggcgattccgcgatctacgaggccatggtgcgcttggcacagccgttcgcgatgcgtctgccgctggtagacggccacggcaacttcggctcgctggatgacggccctgcggcctcccgttacaccgaggccaggcttggcccggcggccctcggcatgaacgcggatatcgacgaggacaccgtcgacttcacgccgaactatgacaacaagctcaaggaaccgaccgtgctgccggccgccatcccgaatctgctggtcaacggcggctcgggcatcgccgtgggcatggccacgaacctggccacccacaatctgggcgaggtggtgaacgccgccaagttcctcatggcgcattcggacgccaccctggaacaactgatgcgttacgtgcccggccccgactggcccaccggcggcacgatcatcggccgcgacggcatccgtgaggcctatgccaacggccgtggtacgctcaccacgcgcgccgccacgcatatcgaacatgtcacggcccgcaagcaggccatcgtggtcaccgagctgccgtacatggtgggcccggagaaggtgatcgagcgtatttccgacggtgtgaagaaccgcaagctggaggggatttccggcgcgttcgatctgaccgatcgtcataacggcacgcgtatcgtcatcgagatcaagaccggtttcgacccgcatgcggtgctggtgcagctgttcaagcacacgccgttgcaggacaattttgccatgaacaacgtggcgctggtggagggccgcccgcacacgatgggcctgaaggagatgcttcaggtgtgggtggaccaccgccgtgtggtgatccgccgccgcagcgaatatcgcaagaagaaggcgctggaacgcctgcacctggtcgagggcctgctgctggccatgctggacatcgacgaggtgatccaggtaatccgcacctcagatgatgcggatgccgcgaaaagccgtttgatggttgtgttcgacctggacgaggtccaggcccagtacatcctcgacctgcgtctgcgccgtctgaccaagatgaaccgcatcgaacttgaggccgaacgcgatgacctgaagaagcgcatcgaggagctgacccgcattctggcctccgccgaagcgctcgaccatgtggtcaccgacgagatggacgaggcggtcgccaagtggggctcgccgcgtcgcaccgtgctgctggatgccgacccggatggcacgttgacgccggtcgtggcgcagggtgccggggcttcgggtgtgtccaagtccgcgctcgaagcggtgaaggccgccaccacgatttcctccgccgaagccgatgtggccgcagccgcagccgcagccaagaagaccggcgaacagtccgcgctgaccggagccttgaagatcgaggacgagccgtgcgtggtgatgatgagcgccaccggtttgattgcccgtaccacgccaagcgcgatggacgtgttcaatgtacggtccacatccgatgaacgtctgcgagacgatcaaatcaccacaatcttcgagacctccacgcgcgccacatacgggctggtcacgtcggccggccgcctggtgctcgcgcatgtggttgatttgcctgccttgcccgctgccgccacattgtcgctgaagggaggagttcaggccgacgaactgatcggcatgaccgaatccaccgatccgattcgtggcgagcgcgtgattacggcgatcgccatggagcagccgacgtccggcaaggccagtgccaaggatgagagcgaggatggcggggccgccgaggccaagccgttgccgtcgctggctatcggtacccgtaacggtgtcatcaagcgttggaaccgtgaggcacccaccaccatggattcctggcccgtcattgatctgaaagatggcgacgaagtggtattcgccgccgtggccgaggatgacgaccgtctggtgttcatctcctccgattcctcgctactgacctttgaggcgaagaacgtgcgcccgcagggtcgcaccgcgggcggtatggccggcatcaagctggccgagggcgcccgtgtggcggcattcaacgtggttcccgccggcaaggtggcatggacctatgaggagggcgagaacggtttgacttccggctccggcgcggtggtgctcaccgtggccggcgactccgatgcactacccggcaccgaaaacggcgccgccaaggtcaccccgctggaaatgtaccccaccaagggccgcgctaccggtggcgtacgctcccagcgcttcctcaagggccagaacacgctgattcttgcctgggttggtctctacccgttgcatgcctccacatccgcaggctccccggtcgagcttcccaagcccgatatgcgccgagacggctccggagtggacctcgcctcccccatcgccttcattgcgtaacctcaattaagctccctctgatgggccgagccgtaaagcaaacacccccagtggggtgtttgtaggcgaggagcgaacgatagtgagccaaacacatagagaagagaccctaaacccgacctacactaagcatcaaggaggtggcgatgagactactggttgccgtatccaatgaaccgttggcccgcgccattcgtggtgcgctgcttgcctgtcgtcatgaggtgtccttggcaagcaccggcagtatcgcgctcgccgcggtcaccaaggagctatttgacgcagtgattctcgatgaatccctgctcggcatctccaccgagcaactcatcgaatcccttcacaatgcccgtgcctccgtcaagattctgctgctgacttcgacgccactcagcaaaaccatcggcgaaggcagccgctggcgagcgctgcctgacgagtacgccccgatcgaagagacgccctacagctccttcagcgcggattcacacgcaaacaactcagatgccgaagccgaacagtgcacggacaatgctgccgctagcgcacgagctaatgtacgacacccggatgccgtactgagcaaaccattctccgatggcgaactgctctcatacgtcggctcgcttgccaccgactcccccaccatgatcattcgtggcaatctcacgttggataccacgaatcgcaaagcctactacgcatccacacacaccgcaatttcactgtcccgtctggaatacagtttgcttgaagcactggtcaaggctgatggccagtttgtcaacaccagcgaattggtcaagctcgtcggtggcccattcttcgagcaacaagggctcctcaggaacgccctctacacactggataagaagctcacccacgccggcctcatcatgacccaacgcggctccaactaccgcattcgatagctgggctcaatcagtacagccgcatgcctcggggaacgggggtgaagccggactggtggaggatgcgggcgaaggggtgacgcgcgttgaggggttcgccattgatgtcgctgaacgtcacggaaccggtgccattgcgtttgagagcgtaggccagttctgtggcggccttgcgcatttgttcgtcggaatcattggcggcgggttcatggccgaccgattgatcgaacgccgtcaagtgcttggctttggcagccgcgtatagtagcgcaccttgcgcattgagcacgaccgtggctccgatacggcgtgccggtttacccgcaccggcaggcgcgtccggccacgcgatggcggagccactgagatttgcggggtcgagcacactcaatgccaccacggactggccgcgatgctctgacggatgacgcaacgcatccacggtgtcgcgctcggcaaattgggccgcgccgaaaccacggacgaacatgcctcgtaccagtcgaccatgctcctccatgcgctgcaatatcggatacaacgctgagtagccacccgggatattttccttgtcgatcaccggctgcgcgatgacgccatacctgtccagcaacgtctcgaccagtgcgagcgcctgctcggtctgatcagtgtcttcggcttcagcttgcccgattacggcagaccacaaacctcctaacgtcatatccgtagtggctcggtgaatcggagcgacacgcccacgacgacgtgatgtagtggatttacgcgggcttgctgcgcctgcggttaatgcacgtaccggcgcgaagctggaattggtgaccttaccttgccagaccaagctccacaaggcatccttgaactgctgttcgctccactcttgcggaatgatttcaccggtgtttggattgatgtccggctccgcggtctcattccacacacgtttggcggcatccaccagttgacgggcatggaacgctccccctgagtccagtgcggtcagaatcgcttccggcatggtggcgtctgaagcgttcgatgtcgtaccatgttccacaccgctgagcaatattgaatccgccggatagaaagcaacctcaccggggtccatcgcactggttcccccggtttttgagccgacccagaccacatcgccgctggtcagcaactcatccagcaatgcaggttggtagtctcgtactcgtgcggggaataccgccgactcccagagtgcagtgggcagtgctatgccctccagctgctcgataacgcgcatgagcccgtcggcaccttcatatcgttcgccgccgaccggcccgataccttgtcggtcgataagaaacatctggaacgcctctggttctactggcttgactgctttacgcgccttggccaatgagcgagaccgaatgcggcggaatacgtccttatggagccactgttggccttgcttgtcatcatctacaaagtggccttgcagcaactcgcctttggcagccagtacatccaaagtatgcacggcatccgtagcatcgaggtgcagatcggccatgagctgatcggcggtgaaaggaccatgggttttggcgtaacgggtcacgcgaccagtcacatcatcgtcggcaagttcattccagaaagtgcgctcccccagttcctgttcgacttcgcgaatcacgtccgggttgagcacttgtgccatgtcggtggtgccgagcaagcgttcgagcatgtgcggatcgagagacaacagttgcgcgctgcgctcggcctgaggttggtcatactggtacatcaccacgccgacgaagccaaagagaatgttctcggcaaaaggcgatggcggctcggtctccacgtccttcacggtaatggtgccggcttgcaatccggtcatcacctcgttcagggcgggcatgtcgtatacgtcttgcaaacattcgcgcgcggtttccagcagcagcgggaagttcttgaccatacgtgcggcttgcaggagctgtgcggcgcgcagtcgctgctgccataggggcacgcgacggcccgggtcggatcgcggcatgaacagtgatcgggcggcgcattcgcggaatcgtgcggcgaatagcacggactcgcccacttgacgttctacatctgctttgaggtcttctgggtcgaaaaggaacaggtcttgagcaggaatatgtccgtcaccgtccggtagctgaatgacgataccgtcatcggcggcatatacctgcccatcgaaaccgtagcgttggcgcagtctgcggctgatggccatggaccacggttcgtgaacgcggcggccgaaggggcttaacagtacgatgcgccagccgccgtcttcatcgcgggtccgttccacgatgagggtttggtcgctgggaactgtgccggtgatggcttgttgctcggagagtaggcgggccaggttggtgatagcgttggggtctaggccgtctcggtggagacgggtgaggattgttgggatgaaggttgggacagctggaccttctgcggcagaactccccccagtccgcttcacgtctaatccggcggcgatttctcgggtgaagcgggctatggtacggctgaaaccgtagtcacggccagcgccttcaccgtgccagaacggcagacgggcggtgcggcccggagccggagtcacgaccacacgatcacgggtgatttcctgaatctgccatgtggaggtgccgagcgtaatgacatcgcccacgcgcgattcgtagaccatctcctcatccaactcgccgacgcgacgctggcctttgccggcgtccgcctcaggcaggaccacggtgtacagccctcgatcgggaatcgtaccgccagaggtaacggccactttctgcgaaccgggacgggcggaaatcaggccattatcccgattccataccagtcgcggccggaaggccgagaattcctctctgttgtattcgccggacatcatgccgattacggcatcgaacatgtcacgtggcagttcggcaaacggcgcagcacggagcaccgtggcataccagtcatcagcgttcaaatcgtgcatcgaggcagcggccacggtctgctgggcgagaatatcgagcggattgcgcggcacggccaatggttctatatcgccggcaatcatggcttccagacttgcggccccagtgacgatttgctgacgggtgagcgggtagaacaatgcgtgagagacgccaccgacctgatgatcggcacgacctacacgctgcaatccggaggagaccgacaacggtgtatcgacttgaatcatcaagtcgaccgagcccatatcaatgcctagctccaaactggaggtggccaccacgcagcgcaattcaccacgcttgagccgttcctcaatcattttgcgacggtctttggagaccgacccatgatgagccatggcgatgacatcatcgccctcatgcgagccgacaagcatggtggtggaaccgaccacagcatcgtaatgtgtggagaacccttcgcggccttccggagagcccggatcccgaacagtgtcgggattggtgccatgccgggtctgcgcatagagatcattgaggcgcgcggtgagcttttcggccacaccacgcgaattgacgaacaccaatgtggtgcggtgcgcgagaatctcatccaaaatactgcgttccaccacgggccagatggaaccggaggcacggtcgcccgccgctccaaccaacgcggaggaatcgaacgcatcactcgcatcagaatcgtccccagaagtggaagaaacatctctatcatccaccggcacaatgcccctgcgttcggcaagtcgctgcatggccggcgtgacaccgctgatatgcggagcggaccgttcggcctccacgccaccgacacgctgcttggcattcacggactgcaaatcacgcatgttttccaacggctcaatcatgcgcagatccattgcaggctgcccaccaggattcacgatggtaaccggttgtccgccgcccaggaatcgcgccgcctcttcaggcggattcaccgtagcggatagaccaatgcgctgcatatgaaggtcactgaggccagcatcgatggcggtatcactgccctcatcagcatccgcatcgattgcatctcgcttgcgcgattccgcgacaaggttctccagccgttccagacttaccgccagatgtgcgccgcgcttggtgcccgccactgcatgaatctcatcgacgatcaccgtatcgacagtgccgagaatccgccctgccttcgaagtgagcaacagatacaacgattctggcgtggtaacgaggatatccggtggatgggaggctatgcgccgccgctcctgtgcggtggtgtcgcctgaacgagtggcgaccgcgatcttcggcacgggcagcccttgcgcctcgcattgtgcggcaatgccctccaaaggctgttctaggttcttggccacatcggccgcgagcgcctttaacggcgagatatacagcacacgcacaccggcacgccgcgtgcgtggcacggtcatcagccggtcaatggccgagagaaacgcagccaatgttttgccggagccggtaggtgcgatgaccaagacattacgaccagaatggattgccggccaggcctgagcctgtgcctcggtcggctgaccgaaggcatgctcgaaccacaccttggtgggttcggaaaacagactcagggtttcgtacatatgtacgattataggtcagctgaagtaggcgatgacttcttcggcggtgccgtaggcgctttgggcaccaagcttggtggccgcataggcggagacataggagccgatttgcgcggattgcagcagcgtatggccagcggccaagccagccagcacagttcccatgaacgagtcgccgcaaccggtggtgtccaccgcattgacttgcgcggcggatacgcgatgccaacgtccgttctcgatcaccaccgaccccgacgcaccaagcgtcactatcgcccggtcgaatccgtaatcggtgaatcgttcggcgacctcataccagtcgagtgattccacatcgccgtccggcagacccagtaactgagccacttcatgctggttgaccagcagaatatccgtggcttccaccagttcgtgaggcagctcgtccataaatggcgagtcgttgagcagcacggtcacgccagcgtcatgcgcggtctgtgcggcggcgataacggtggagatcgggctctccaaacacagtcccaataccgcgcattcggcgatggtcgtgcgatgtgattgcacatagccggcacttgccttggcattggaacccggcgaatagacgatggtattctcgccctcagcgctcacggtgattaccgtggtgccactggggccttcaacgtgcaggatatcggcggtgtcgacgccggcctcatccagcttgcctaataggaagtccgcgttggagtcctcgcccaccgcgcccagcaactggacattgacaccgaggcgagcagcggcagacgcctgattcgcgcctttgccgcccggcaacactttcatggcaccaccattgacggtttcgcctggcttgggcagtcgtttggtggtcacggtgtaatcggcgttcatcgagccgaccacgattaccgagcccggcgcatccttcagcgcttccaatcgttcccgtacgggctcgggcatctgtttatgttcttcttcacttatcaccatgggctccaagcatagtaggcggcgggcccaaatgcgcgcatgatcagccgcgcaacttacgaagacgctcgtgcatggccaccatcagcaccaagagcaccagcaaataccacgggtagagactgattgtcacatattgcgcgatgatgccgaacagtggcggcatgagcagtgagcccacataggcacaggccatctgcacgccgacgacggcctgcgatttgtcttcgccgaagtaggccggcgtcgagtggatgacgcacggataaatcggcgcgcacccgaagccgatgaccaccagcccaacgaccacgccaaggtggtgaggcaatggcacgaacatggtgaggatgccggcgagcaccagcacttggccgaggcgaatcatgaccgggtccttgaatcgcatggtcagaaagccggaaagcgcacgccccacggtgatgcctacatagaataggctggcccagctggcggcggtgatcttgtcgatgccgctgtgcatcaccatgtagctggaggcccacagacccgccgtggattcgatggcgcagtagcagaagaacatcacgaggatttccttggcaccgcgaatggcgagcacgccggccacgccgagcggtttgcgttcagcaacagacgccccttcagcattaccacatccctcggcattgccgtcagatgatgcggcaccatcggtcgattcgccgcccccagtcgtgccacgtttcttccacagcggcaggctcagcaccaggatgacggtcagcatcacctgcaggatcgcgatgtaccgatagccccacggccagccttgcccttgagacagcgcatagcccatgatgtaggggccgaccgatgcgccgacgccccacatgcagtgcagccagctcatatgccggctttcgtagtgaatggctacgtagttattgagcgccgcatccacgccacccgcgccaaggccgtacggtatggcgatggccaacagcacccagtaattcggggcaacggagaaacctaccaaggccgccgcagtcaacgccaccgaaacggcggtgaccttgcctgccccgaatttcaatgtcattcggtccgaaagcagcgccgagacaatcgtgaacatggaaatcaccgcggagatgccgccagcccacgccaccggcacgttcagatcctggctcatggtgggccatgcggacccgagtagcgaatccggcaaccccagactgataaacgccacatagatgacggcaagcaacagactggccatgttccatctcccattcacagtacggcaccggttgtgataacgatgtcatcagtctatcgaatagcgcttcagcaacacgcataaaacatatgacaacgtgctcacctcaaacgccaattacggaaattctcggtaagcacgatgtcattatcagcgccgtcttcgatcaggtatcgatcttggagcggtcgaaatcgtcggcgttgtcgacgatgaactgcttgcgcggcggcacgtcgtcgcccatcagcaggctgaagatctcggatgcctgggcggcgtcctccatgcggatgcggcgcagcatacgcgtgcgcgggtccatggtggtgtccgccagctggtcggcatccatctcgcccagacccttgtatcgctggatgtcgtcgttgtaaccgatgtgcttcttgtcgaggtcggccagtttgccggccagctcgtcatcggaatacgtgtagatgtattcgcccttgtgcgagccggtcaacgcgatgcggtgcagcggcggtactgcggcatacacgtagccgtgttcgataagcggccgcatgtaccggtagaacagcgtcagcaacaggatacggatgtgcgcgccgtccacatcggcatcggtcatcatgatgatcttgtggtagcgcgactgttcgatgtcaaagctctggccggagccggcgcccaccacctggatgatggccgcgcattccttgttggagagcatctgcgtaatcgacgccttctgcacgttcagaatcttgcctcgaatcggcagcagcgcttggaaaccggcgttgcgggcggccttggcggtaccgagtgcggaatcaccctcgacgatgaacagttcggccacgtcgtcattgcccggctggcagtcggagagtttggccggcatcgaggcggattcgagcgcgttcttgcggcgcgtgacctccttggccttgcgcgactggatgcgtgcgtgcatttcgccgacgatcttctccagcacgcggccggattgttccttgtatccgcgtttggagccggtgatcatctcgccgaattgcttgtcggtgagccgggtgacgatcggcttgacctgcgcggtgccaagcacgtccttggtctggccttggaactgaggttcggccacgcgtgcggtgaccacggccacgagtccggcttggatgtcgtcgcgctccaccttcatggcggagtccttcatgttcaccttgagcttgcgggcgttgtcttccaccgccttgcgaatctgcttggtgatggcgttcatgaaaccgtccacgtgagtaccgccgccgggcgtctccacgatgttcacgaagctcatgattgtggtgtcgtagccgttgacccatcgcagggcgatgtccacgccgcaggtgcgttcgatttcctgggcgtgcagttcaccgccttcgcccacggcctgggtctcctccttataggtgccctcgccttggatgcgccagatgtcggagatcggctcgcctttggataggaagtcgacgaagtccttgacgccgccggtgtgcaggaattccacgacgcgcgggtgcgcgggctgctcgccgaacgcgccatcgacgacctggtcgccggccgtcagcgagaagtcctcctcggacaggctctcggtactgtcggcttgagcctcggtggagtcgtcgaagagttcggcatcgttggacgagacgtccaaagccggggcctggtcttgcgcaggttcgactgcgtcggcatcaatggcttcggcggtgtcagtcgccgtttccggtacgttttcgtcaacaatggtgattttgagtccgggcaccaggaagctggtctggcgcacgcggtcgatgagctgttcgtatgagaattcggcggttttgttgaaaatctccggatcataccagtagcgaatacgggtaccagtggttttgggagataccttgccgatgatttccagctcggtgggtcggttcttgcgagtgcgcttgaacggggaatcgggagacggattggccgggtcggcatccgtgtatacgccagggtgaccttggtggaaggtcatgtggtgcgtcttgccgtcacgatccacttcgacgtccagtcgggagctcagggcattgaccacggaggagcccacgccgtgcaggccaccgacggcgttataagacgagttgccgaacttggcaccggcatgcagtttggtcagtacgacctccacgccggacaggccggttttcggttccttatccaccggaatgcctcggccattgtccgcgacttccacggaaccgtcggtgtgcagggtgaccacgatatcgttgcagaagccggccaaggcctcatccacggagttatcgatgatctcccacaggcagtgcataagaccctgcgagtcggtggtgccgatgtacatgcccggacgcttgcgcaccgcatccaagccctcaagaacagctaggtccttggcaccgtattcttctttgggcatacagtcctattttctaataatttggctcccctcttcaggggagccttcaacggatggctccgtcgtctgacagcccactgggctgtcaaactcctcgcgcggtcggcctactaagcgggccgaccgtcattgatccaggaagtcgcgcagggtctgcgaacgggacgggtggcgcagcttggacatggtcttggactcgatctgacggatgcgttcacgggtcacgccatacacacggccgatgtcgtccagcgtcttcggctggccgtcttcaaggccatagcgcatcttgatgacgccggcctcacgcggagacaaggtttccagcacctgcttgaactgttcctgcagcagggagaaggccacggcgtcggacggagcgatggcgtcggtatcctcaatgaggtcgccgaactcggaatcgccatcctcgccaagcggggtgtgcagggaaatcggttcgcggccgtacttctgcacttcctgcaccttctcaaccggcatgtccagctcgcgggccagctcgtccggcgtaggttcacgccccagatcctgcagcatctggcgctgtacacgggacagcttgttaatcacttcaaccatgtgcacaggcacgcgaatggtgcgggcctgatcagccatggcacgggtgatggcctgacgaatccaccacgtggcgtaggtggagaacttgaagcccttcttccaatcgaacttctcgacggcacgaatcagaccaaggttgccttcctggatcaaatcaaggaagagcatgccacgacccgtgtaacgcttggcgagcgagaccacaagtcgcaggttggcttccagcagatggtccttagccttcttgccgtcggcggcggcccacttgagttcacgcttgcgcttgaactccatgccttcactttcggtgtcgagcaggtgctgggcgtacaggccggcctcgatgcgctcggacaggtcaacttcctgttcggcgttcagcaggctcacacggccgatctgcttcaggtagtccttgaccgggtcggcggttgcgccggccgcgatcacacgacgcttcggattgcccgaagggatgatgttctcttcctcatcatccgtgtcggagaccacgtaggcacccttttccttgggctgctcgggtgccttggacttggcttcttcctcgtcctcgtcgtcttccacatcgtcgtcgtcggcatcgtcctcatcgaggtcttcgtcgtcggcatcgtcttcgtcaacgtcgtcaagatcctcgtcgagatcgtcaacgtccaaatcgtcgtcgttgacctcggcatcgtcatcaagcccgtcatcgacctgagtgtcctcgtctttgacgagctcatcgtccttggccttcttcgcggttttcttcgcggcggacttgcgcgtggtctttttcgagggctctgcggacttggacttcttggcagaagtcttgcgcgcggtggtcgtagagctggccttcttcttggtctcggtctcctcgctggactcggctgtctgcttggttgccgtcgtttccttcgtggccaaaactgctccttctgatctctcgccgtgaagtgcatataccacacgggcccacttctggcaagggcaaatcgtcaactatgtgagtaaaccaccctccacggacgattattcccacatcgttgcccgacgtgttgccgatcaccacacgctttccttccgcgcatcgcgcataaaacctcggaaatccgccgtttctgttcattcagcccgagcaccatgccggtgccacgcctcgatcggcggctgagaatatcatcgccgccagcgaacaatcctcatcgagcagcaggcatcgcaaggcgaacaccattgctcgcggatcgcccagccaccataaggtgtaagcgatcacggccaatggttgtatgcagtacggcaccggtgaggcttccgcgatatcgagcaacataccgatgccggcatggcaacgctccttatccggcatcatgccttcatcctcgaatgcgcaggtcagcagctcgcccattcgtgttctcgtacgtgccagatgcggtcgcgccgcgaattccatgagccatgacttggggcaacggctttcatcaataaccaacgagagaatcagcgcatcacgaatcgataaggtctcgcgcatgcccaccgcaaacgcggccatcgtctctcggcctaggtcggtgttcccggcatcgagacaagacagccattcatccaatggttcggccacccagtcggcattagcctgttgcgcgcctcgaagtcggcgatcattgcgaaattcctgtgatctcgtctccaactcatcaaagccaaagggctccgtctgctcggcggcgtgccgtttggcgtgtcggctcttacgcggcttgtgcggcgtgttgttgttcatcatgtcctccttgactaatggtgtgcaatctattggtgttgtggtgcgcgccgagccggatagctcatgcgccgagggggtgtgtgcccactatggctgaaaacgccgtatgacgcaggaaaaaacgaccattgtggttctagcttcaaaacccttgattcccaacgttcttgtgttcttcaaaccctgtggataagttattaggcatgtgcacaactgctaacaaccgcgaaatcatcgagccacgcatcattcagttggtacgggaactgactgccgcccccgccaccgacgaggttgccgacgccctgaaaccggtgatggaacaggttgtgggccaagccgcctcctccagccaaggaggcaaacgactgcgtgcgctgctcgcattggacgccttcgatattcttgccggcgacgtgacgcctgatcggcgtgacgccatgatcgacctggcctgcgccattgaagtgtttcagacggccgcactggtgcatgacgacatcattgacgaatccgatctgcgccggggcaggccttccgcacatcgtgccttggaacaggctgtacacagcggtgccataggccgtggcttgggcctgatgctcggcgacattctggccactgcctgcattgaaatcacacgccggtccgccagccgtcttcccaacaccgatgccctgaacgaggcgtttcttaccatgcagcgcgaggtggagatcggccaggtactggacttggccgtcgagatgaccccactgtccaatcccgaagctctggcgaacgcctcattgaacgtattccgctggaagacagccagttacaccaccatcgccccactgctgcttgcactgctggccgcaggagagagcccggatcaggccaggcattgcgcgttggccgtcggccggccgctcggactggcgttccaactggccgatgacctgttggatgtcgtcggatcaagccgcaataccgggaaaccagttggcggagacatccgagaaggcaaacgcacagtgctgttggctgatgctctgtctgcggcagatacggaggataaggccgatctgattgccatcttcgaagcggattgtcgcaacgacgaccaggtagcccgcaccattgaactgttcacgtcgaccggtgctcttgatcgatcccgcgagcgcatcgctgccctatggggtgagtcccgtaaggcgattgccggtcttgagctgaattccgaagcgcagcgccgtctgaccgaggcttgtgcgcgattcgtccccgaatccttgcgatagtccacaatgcgagccgccgggtcatgagaccatgaacaccggtgaaaacccgtgaaaactatgcgccgatgctccggccgcgtaaccggggccatgtacactgaacatgtttagtcgtgattaaaggaaccgtacgatacaacatgagtgagaacgagcccgcgcagatgattgagggacgctaccgcatcgtgcgcaatatcgccgagggtggtatggccaccgtgtatgaggccatcgatgagcgtctggggcgcaccgtggcgattaaggtcatgcacacacaactcgccaaaggcccgcatcgggagcagttcgtcgaacggttccgccgcgaggccaattcggccgcgtccatcgccaacccgcacatcgttcaggtgtatgacaccggcgagttcaatggacttgattttctggtcatggaatatgtgcatggcgtcaatctgcggcatgagatgaacgcccaaggcacattctccgtacgtgagacactgcgcgtggtcgcggagacgctggatggtctggcttccgcacatcgcgccggcgtggttcaccgtgacatcaagcccgagaacattttgatcaatgatcgcggccatgtgcagatcactgatttcggtctggccaaggccgccagccaggccacattgagctccaccggcatgctattgggcaccgccgcttatctggctcccgaaatgatcgagaacaatcaggccaccgcgcaaggcgacctgtattcggtgggcatcatggcatgggagatgctgaccggcaaggtgccgttcgattcggataatccggtgacgcttgttttcaagcatgttcatgaggacgtgccgtccgtggccacggtctgtcagggcattgatccgtccgtggcggcgttcatcgcccatctgaccgcgcgtcaggtggatgcccgccccgccgatggcgcggcagcagctgaggaattgagccagttggccgccaaattgccgctggaggcgtggcaataccgtttgcatgccgaacccatcggaggtgatcataccgatgccaccgttgcagcgctggtaggcaatatcgccgagcaggccccgctgaccggcgtacctgccggtgcagcaacgttcaaaccgtccgtaccagcgtttttggccgatgatgtcgcaagcaataccgtcgataccggtggcgccgcagacgtcaatcctccggctcctccggtcgcccccaccacggcacttgattcgtcgacgccagccgatgcttcggctccccataagacgcaaatcatggcacagtccggcagcgagacacaagtgctgcctcaggccggcgatgccttcacccgagcgcttgccctttccgatgagccggacgtcgcttccaacggcaccgggccaaagaagcagcgcagcaaaaaaccgctcatcatcgtactggtgatcgtgctggtactggctgcaatcggcggaaccgccggctggtggtggtttaccggaccgggcagctattggagtgtgcccaagccggatgacgtgacctgcgatgcgaatgcaagcaccgaatgctcgttggccggcgcggattgggccacgtatgagagcacgttgaaggctctcggcatcccctacaagacgcacaaggaatacagcgacgacgtggcggaaggcaagatcatctcttcttccgtgaacaagaccaaggccgttgtgaacagccgcataagcaagcgagccaatcaggagcttacggtggtggtgtccaagggcgtgcggatgaccaccatcccgaaggatattctcgacgcgaattcggccaatggcaaggacccgttgaacgcgctcaagaaggccggcttcgataatgtcaagcatgacgagtcgaaggatgagtattcgatggacacgccgcagggtgcggcattgacgatctcccctgatcccggtaccacggccaagcacaacgatgaggtgacggttactttgagcaagggaccgatgccggtgaccatgcctaacatcgtcggtaagacccaggatgagatgcaagccgcgctcggcgagttgaagctcacggccaatgtcaccgaacagtacgatgacaaggtcgaggccggtcaagtcatttccgcgtctcaggaagccggagcccagctgaagtggggcgatagcgtggacgtggtgatttccaagggtccggagatggcgacgataccgtccggccttgtcggcaaacaggaaagcgccgtaaccaagacacttgaaggtctcgggttcgaggtgaaaaccgacaaggtgctcggtggcctgttcggcacggtacgtaccgtgaaaagtggcgatacggacctatccaacggcggcaagattcgcttgcgcgatgccaacggcaaccccaccgtcatcaccctcaccatcgtgtgagatttgaatgaggctccctctgtcttcagacgagggagcctcatttgttaattacttttcggcttcttcagcggcctgctgggccttgagctcggccttgaccttctgggcgtattcgttcacgaattcctgaccgctcattttctggattgcggtggaaacacgatcggtcagcgaacgcaaatcatcatgtgtaatttcatcagccggcttcttcgcaacctcaatcggcttgccatacaacaccttggtcttgcccttcttgggaatcgacgtgccaatcggctgcagcttgtccgagccgatgatggcggtcggaacaatcgggcaaccggtctcgagcgcaagtcgtgcggcaccggtgtgtcccttgtacagtcgaccgtccgggctgcgcgtgccttcaatgtggataccgaacaggtgcccatcctcgataatctcgcgtgcatgctcgagtgcgccaagcgacttgctgccaccggaacgatcaaccgggaacacgcccacggacgtgaaccaccacttcttgaacttgcccttcaatcccttgccctcgaagtattcggctttgcccatgaagtgcaccatgcgcgggcaggtaatcggaatcaaagcatcgtcaatcaccgccagatggttggctgcgataatcgcgccaccctctcgaggcacgttattcagtccgctgacagcagggctcaaacgatgatgagcaatagggccgagacctttgacgaagaaccagtagagcacttggcattcctcccgcagacgaactagccattggccggtcgcctgattagagtgacagttatgactgagaaccagaatagcaatgccgacggagagcggccaacccccacgccgggcaacggacaggattccgatacttcgtccaagtcgtcgactcccggtgccgccggaccggccacgaatggtgccgatacaccgcaatcgcatgacatgaacgatttggatgcggcgtgggccgcgttcgaagccgagcatcaggccgacttgcatgacgtggcttcctccaggcaggccaaaaagttcgagaagcaggccaagaaacgcgagaaggaagcactgctttccgtagatgacttggatatcggctcgttcaccgatgatgctcgcccgagccgtggcggcaaaaaaggcaagcagtcaggcccccgtgatttcaccggctccagctggctggataccgataatgtgatggacgcctatgatgatggcggcttcactcccccgaaccctgatcttggtccggtcaaagcatctacggtactgctgacggcgttgctcatcatcggtctcgcaggcgaaacggtgatgatattcgttcccggcttgaacgcgattcctctcttaggtgcgctgctcaatattctcttcgggctgggcgtcattttgggtctgggcggattggtggccaaaatcctcaaccgcaaagaccgccccggtgatcagggtggctattacgacgacggcgcgagggtgtagttcgcgtaggttgtgtagtccttggctcccctctctgaggccgagccgttaagcaaacagcccagtgggctgtttgtaggcgaggtgtgagcgatagcgaaccaatgtatcacaggcatggctcgtccgtaattgcggccgagccaagataggtcacgaattgaagtcgatggactcctgcaactcgaaatagttgataatgaaggaaaggtaaacatattcgagcaaacccattccatatcacgccttggacttggcggtttcgatccacttgttgaacagggcttcagccttgccggagtcgacagcatcctcggccagcttgtaggcctcggcgaagcgctcggccagtgtgccgttgccgaccagattgccgtcagccacgatggcggaggcagcgttgagcagcgcggtggtgcgggacgtaatgtccttgccggccaggaagtccttaaatgcgttggcgttgacgtccggcacgccgcccttgagctggtcgacggtaatcttggcgagacccagatccacggtcgggtcgaactcggtttcggtgaccttgccgtcgcgaatctcccagacggaaaccgggccggtgggggcgagctcatccatgccctcatgcgaagtgtagaccaagccggactgaccacggctggcgtagacggcagccatgatcgggctcaccttgcggttggcgcagccgatggccacgtgtgccgggttggcggggttggtcaacggtcccaggatgttgaagacgcacggaatgccgagcgcggcacgaatcgggcccacgaagcgcatggccgggtggaaggtgcgggcgaacgcgaaggtgatgcccacctcgtcgcccacttcgccgacggcctccggcttcaaatccagcggcaggccgaggtcttcgagcacatcggcggcaccgcacttcgaggatgcagcgcggttgccgtgcttgacgatcttcacgccggctgcagcggcggccacggagcccatggtggacaggttcacggtggcgaagccgtcaccaccggtgcccacgatgtcggtggtcccaccggaaacgttcagcggcacggcgtgggagaccatggccttggcggcaccacgcacctcgtcggcggtcagtcccagctgctgctgcatagcgagcgcggcacccacggcggccggattggcgttaccttgcatcaggtcgtccacgaaccactccgattcctcagcagtaaggtggtctcccccgaccagcttggtgagaatcgacttccatgtgatctcggccatgatgccctccttggcgtttcctacgccgtgtgatgtatgttcgccgctcattgtaatggttcgtcatttcaaggccctgaatcttccatattgcaaaatatggcgctattgctgttttcgtggatgtcggttcgtcgtcgagccgttggtttcgtaagcgtgaggggcgttcccgcgtattctgttttccgaccaaagaaatgaatcacgaagaacgcctgggcaaaagcccattcaccggattgccgaacgtcaaaggcacagttgcagaggatgcgcggatcacggattcgccgccgcgtttcgaacccgtgctcgagatccgggtgcgcccacgtgcgggcatgctccgatgctcccgatgcggaaggaggagccgcgggcatgaccagggcggcggcgtgcggcgtcgtggtcgcttccgtgccgtgggccgagccgggcagccggttcacacgcgatttcgaatcggaatgcgcgtggccgatgagcgtcgcgaaccagaagaccgtaagcggtttcccgcacgtcgcgtggcgcaccgccggaagacgccgcccatagggccgccgaacggttgaaggcgtcgatgccgtcttcgttcggcggcctcacgtcgatcggcgtggacgagaccggctaccgcaaaggccacacgtgcatcaccgcggtcgtcgaccacgaacggcatcgggcgatatgggcgcacgacgggtacggcagggacgtgttcggcctgttcttccaaacgttgacgcccgaacagcgcgcctccatcagggtcgtcgccggggacggggccaggtggatcgactcatgcgtgcatgagtggtgcccgaacgccgaacgcgcgcccgacgggttccacatcgtcagttggacgagcgacgcgcccgacaaagaagtcaggagacgcccgtggaaccaggcgcgccgcgacggggacgagaaatccgtcaagcgcatgcgcggcgtcagatacaccgtcctgaagaaccccggcaagctgaccgacagacggtccgaggcgtccgggaacctgcgggacacggaccccaagggccggccctaccgttcatgacggctcagggaacccctccggacgatgcccaaacgaccggccgaccaggccgggaccgaactggaccgccgggtgttccgggcgtcccacagccgcatccccgaga

SEQ ID NO: 1057 - DNA, 17714 bp, Unknown
  R13_10m  MAG No. k141_3231
tcataaaccgccacctgggtacccagagcggcaggggctttgtgacactcctgctcgggtgtcgccgccggcctgcagaacacgggctgattcccggccgaccgatcgacaaaagcgagcggggaggttccgtgccgataagcgacgcgggcctccccgttcgcgtcgcacggccctagactggccggcgacggcgcgcatagaacgggcgcgctggccgagtgacagactcggatgatcgaaaggggacatatgaatgaggagaaggacacggacggaacgacggacgcgcacgagggggaccacacgcccgcggacggtgccgggacggagggcgaaggcggcaagccggacactaggccgggcgacagactcgcgaccatccgacgcacgctgtggtggataggactggcgctacagctcccattcgctttgactctgatccattttgataccccttacctgatattggagcgtatcctatgcgctattccgccaagactggcaagcgacccgtcatcaatcgtcggcattcccgcacttgaaacggaatggtgtcgagaattcctggcactagtcctgggcgcagtttgctgggttacagctggagtaatgagattagttgcggacagcccatcaaaccatggaaaagaaacccttcctgtacgcatcttcgccggaatcatcaccatcatcgtattgatggccaccggtattacaggactcttcctcggcatagcggccttttagaagtttccccgtatctggcagaggaattccaaatcgaaagcacaacagcgaatgtgtgggcagacgacacatctgcccacacataatgcattatgcgagctaccgtcttggctgatcaatgaatgcagcgaacgcccgagcactcacttcagcttcctgcttatcaggaagcttgtctgtaccggcagccttttttaggatgctttcgctcattccaatatttgtcaaaccaagtgcatcaagaccgtccgccattgttgaatatgcactcaccacattatctgcgcttgatgcaaaacgttcgtcgtagaatcgaacgatacgatgggtctcactctgcttaagaaaaattgaagcaaaacacgcaaagccagcaggcaggattcatctacctcatcctgtgcaccgtctccggcgttgctgccggcctgcagaacacaggctgatctacacaccagcgcatatggggaagccccgctcgatgtgagcggggcttccccgttttgtgtacatctttcaccatcttgcaataattcttacatgtaaacagagagttcttacatgaaagaattattgaaaggtgatgaaagaacttactttcacgcgcgccaatcatcccaacacgtatcgggatgacggcccattcccctcgcggcgcaacttgcccgcatcctctagcttcttcaacaaccggtatgcactgatatagctcaggccaaacaaatccatgacatccgccgtagtgacgacaccatcatttttttcggcgaactccagaacaaggccactgcgccgggtggcatcgatgtcacgctggcgcacgtaagacgccagcccctctgaacgtttgtacactcgggcactcagcatatacgaacgagagctcccgctaccgaccccctctaccaaaccagcttccaccagattctcaacagcggacacgatgcgtcgatgctccaaatgggagaaatcgcacaattggaccacggtaagcctacgatgctcacgcagcagcgagagcacaatcagtgaccagaccggcaatggagccccacgtcgacgttcctcgtcgccaatcatggttacgaatgcctcgtcaggtaccacacggcgcaagaacaagataacttcctcagcactggactgtgaataatccgggaaagaaccacccgccgcaatcgacccggcatagatggtatccacgcctcgtccggcgcgttcaacatatccggcagctttcagaatcagggcaagctgcggattgcgggaacgcggttgtgcagtaagcaggttatcttcggaaacaccctctatgaatcctccgggattagctatggtcaacccatcatcatcaaccaggaacctcaccgaacccattcgtgcataatcgcgatggcagaaagcgttaatcattgcctcacggaatgcccctcgatcgaagtctggcagatcgacacgaatcaagccgctcatgacttcgtggctgggattccatggctccatcagctcgcctacacgatcaaacatatccaccaaaggcaacacgaacggatccatattgacctttggagacatgcctttcatcacttgaaaaacagccgatgcggctggaaccgatcgatgaatagcatcaaccgaaccaatggtgagcagaccagcaacagatggctgcaatccatacgggccatcaacaaccagctcaagtgcccgatcgaaatcctcatcagtaaaagacaacaacgagttttgcgcattggcactgcgaatatggcttctcaacttgttccgtgagtctggattcaaatcgtccaaccgagcctctggtgcaggttgcgcgctgaaatcgtagaaccgttgctgagataaacggctaatgaattgggaaacaaacagcggaacgacctcaggcgagccgtctgctttcagccggcgctgcaatgtcttcccctgactggtagatacgatttgctgactgttatccacctcaatactgactatcggcacctcgttctcatacaagagcgccacgcgagcgggaagctgcggaacagtcttattgaaaattagtaccgcaagtccattgatattgcgatgctcgtcacatacgccggtcacagtgccatcgtcttcaataccgagatacagtgtgccgccttcggtattggctagagccactacgttgtcaacaatttcatcatgcgattgagggcgcttctgctcactcttgaactcaaccgtcaaactttctttggccggcaacatgagcatcccctttcaccatcttgcaataattcttacatgttaacagagagttcttacatgtaagaattattgcaagatggtgaaaggggtaaagagcaatccatcctgtcatctccagcaacttaaatccgatcatcgctgctttcggcatatctgatatcagccgctggtgccagtccaatcacccaattgaagctcaacacggccaaagactctacgctgcagtggattcgcgctcgatgagcttatagcccacattcacggtctgcgggaagaactcgtcgtccaggttctcgatacgccgcataagcaaggtcagcgcggtatccgccatgcccttgaaatcggtggccacggtggtcaaagtcggcacgctgtacatgctctggctcaggccgtcgaagccgataacgcgcacatcgcccggcacacttacgccatcgtccgccagaccacgcagaataccgagcgcaataccgtcgttcaggcagtacagaccgtcgtacttgcacttgcctttcttggccaagccgcgcccggcctcgataccgccgtcaatcgaccacgaggatttgatgaaatcacggcgctcgtcaaacggcagtccggccgcgagaatcgtctccttggcggcccgcatacgaatatcacgcgagccgggaatgatgttgggattgttgggatcgtgattgtcgccgacgatgccgatgcgcgcacagccacgcgcgataaggtgttcgattgccgcccgtgagccggcgtcgctcggcgcgttcacggtgtcgatgggcaggctggtgtcgtagttttccagcatgacggccgggtgccgcttcaggatatcgaccgcacgtggcgcattgatggcgatgatgccgtccgaaaacgtgtacgacagatcgttgtcgtcggtaagataccgggacagttcgatgagcatgtgcgagtcgcgcttgtgcacttcctcagccacacacatggccagatgggagaaatagtcgccctcgaggcccgaggtaaggaaggtgatggtatcggaccgcccagaacgcagggaccggccagacaggttgattttgtagccgagtttgcgggcggcgtcacacacgcgttgcgtggtttcgggcttgacgtaatccttgcctcgcagggccgcggaggcggtggtggcggtcactccggccagttcgccgacatcctttaaggtcaccatcgttaccatctccgcatatcacgaaccttatcgataagaatccatagtaccgcccacatctcagccgaggatgagaccctcggtcgaggccctgcccggcgactcgaacgccgcggtcaccgtggtgagcaccgacgctgcaaacgaaaacatgtcaaaccaagaaatggacatgacggagtcattgttttccgagagggatatgccgcgtccacgggcagacgtcacgtatcaatcacgccgataccgtcatataactgttttcgatgtgagaaagctcatagcttccgaccacagaaaccagccacagcaaccccataacagcgttatagttctgtttgtcggcgtcgacaagagccagcagcgccgatgaaatgcacaccaaggatgtttagcgaattgttcgcagttcgcacgattcgatttgattcgattcgtgcagcccggatggttcacgggggcatgccgtcgtgatgtgcgtggatatgggcgatacgactctcgttcgggtcggcaggtcatcgtacaccagttacgaaaggatccgtccatatatggcaaggtttaccgagaatcgttggaccagcgcgattattcccgcactgctgattcatatcccaatcggtaccgtctattgctggagcgtgttcaagcagcttatcgctgaccgtctccacgccagccccgcctccgtggaatggggcttctcactcgccatcttcttcctcggcatgtccgccgcgtttgccgggccaatggtggagaaaaacatcaagaaatccgcactcgtctccatggtctgcttcgtggtcggcttcgccggcacgggcgtgagcatcgccctgaacttcctgccgggcgtgttcatctgttatggcgcgatcatgggcatcggcctgggcgtcggttatctgactccggtcaagaacctgatgctttggttcgccgacaacaagggcctcgccaccggcatcgccgtcgccggcttcggcctggccaaggccattgccagcccactgatggaatatctcatcggcacggttggcctggtcagcatgttcttcatcctcgccgcggtctacgcggtgatgatgttcgtcggcttcctgctcatcaagcgtccggccggctgggtgtacgatcccgcgacctcacacgtcagccgcaagacaatcctcaagaagcccgtgttctggggcatctggatagccttctatatcaacatcacctgcggcctggccctcatcagccaagagaaggacatcctgcacgatgtgctcagggccttcccgcagtatgccaacctgagccccgccaagtttgccgccgccatctccggcatcatcggactggtgctcgccgtggactccgtgttcaacacggctggccgcgtgggcttctccacactctccgaccacctgaagcgccgcgagaccgtctatcaggtaatcttcatcatgtcgattgccgtgtgcttgctgcagatcttcaccaacagcatcgacaacgctctgctgtgggccgtgctggccatgctgttcctcgtcaacgcgggctatggtggcggtttctcgacgctgcccgtgctgcttgatcagcacttcggcaccaaaaccgtctccaccacgcacggtctgacgctgagcgcctgggcgttcgccggtctgtccggcaaccagttggcctcgttcgtagttgcccacgcgcctgatcaggcccaccgctacgccgcactcatcccggtaatcaccggcctgttcgttgtggccctgatcagcatcagcctggtcaagtacctcggcgacagaaacgtcacgaaggccgtcgaagaccgaggctgagctgccgcaaaacaacgattctgccggagtcgggcgcatcgatcgcatcaatcgatgtacgtcacgattttggcagaatcgttgttgttgctgttgagtacctgaggtcgtgcggcttacgcgccgaccagttcgagcatttgggggatgctctttttgccgaattcgacttgctgggtgccgtcggcgtgggtgatgacgatgcagggcacgctcatcgcgccgtactggtccttgagttcggggaagtgcgagacgtcgtaggcttcggcgcgcacggccgggctcagggaggcaatgcgctgggaagcaagcacggtttccggacacatcgtgcaggtgagcgagacgaggatcatgatgttcagcgggtctgtgatggacttcgcgcgttcgatcaggtcgtcgcccagcggctggccgggaccggccgcgttgtacaggccgagcacgaacgagttgaactcatggccggaaggtacgccgtggaaggccagaccggtgaagaccagtgaaccattgccgtccttgccggccttgccgtcgccctcagccggcacgcagatgcgcacggtcggacgggcgagcggcaggacgccggcgacgtcgaacgtggcacggccggaatcgtccaacgaaccataagtgggcagttcggtgccgtccggcaaggtgacggacagcggttcgccgaccaccaaagaagtaggcacagaagcaccatccactgccgtgatcagccctgcggcatcaacggcgaccgagttcagcttgccattcgacaacgcgaccatctcgccgatgaaaccctgcaattccgccgaaagcggagtgccgtccagctcgagagcgagcgtgaccgggcgggtcatgcgtccgaagaccacgccaagctgctgcttgacggcggcggagaacagttcgccgggcttcttggcggcgctggatgcggcatcggcgctgcgtttggcgggagccggggcgggcgtcgtgccagcggccgaggcggcggaggcggccttggcctcggactcctcataagcggaagcagtgggacgcggcggcaccaagccggttttctcgctcatctgcttggcataacgctccagttccacggcggcaatcgcgccgtcggcggtggcggtgaccacttggcgcaggttcttgacgcgcagatcgccggccgcgtacacgcccggcaccgaggtttcgaggtagtcgtgcgtgaccacgtaaccgtggtcgtcgagctccactacgccgcgcaccaaatcggtggcgggcacatagccggcgaacacgaagacgccgaaggtgccggcgtcggcgggcttccacgtttcggtctggccggtggcaaggttcaggatcgaggcttctcgcaggccgccttggccggcggtgacgcccttcagctcgacctgataacgcacgtcgatcttcgggttgttcttggcttcggcggccactgcggcatcgcaggtgaagtccggttcgcgcacgagcacggtgactttggaggcgtatttggtcaggaacacggattcctcggctgcggcgaatccgccgccgaccaccagtacttccttgccggtgaagaactcgccgtcgcaggtggcgcagtaggccacgccgcggccggcgtactcggcctcgccctcgaagcccagcttgcgcgggctggcgccggtggcgatgaggatgccgaacgtcttgaggtcgccgcgtgaggtgtgcacggttttgatgtcaccatccacgtcgagaccggtggcttcggcggagaggaattcggcaccgaagtcctgagcctgctggcgcatggtctgggtgagtgcgcggcccgtggtgcggcccacgcccggatagttgacgacttcgttggtgatagtgatctggccgccgaaatcgtccttttcgagaatcagcacgcggtagcgagcgcgggccaggtacaggccggccgtcaggccagccggcccgccaccaatgacgacgacgtcatagagattgttggtctgagtcatgaaaactcccttacatacactggctcccctctctgaggggagctgtcgtagtgagactgagggaagcatatcggatcaggctagctctcgcgagcactccccccagtcgctttcagcgacagctcccctcagagaggggagccaaggttaccgcctattcagtgtcgatcacagctggccgacgaggtcgaggctgggctcgatggtttcctcgccaggggtccagttggcggggcagacctggtcgccgtgctcgtggacgaactgggaggcctgcacgcggcgcagcagctcctcggcgttgcggcccacgttggaggagatgacctcgtaggccacgaccttgccctccgggctcacgatgaagtcgccgcgctcggccacgccatcggcctcgttgtaggtgtcgaggtccttggccagcagggcggtcgggtcggcaagcatcgggtactcgatcttggcgatcttctcgttggcgtcgtgccaggccttgtgcacgaagtgggtgtcgcaggagacggagtagatctcgcagccgatttccttgaacttggcgtagttcttggccaggtcttcaagctcggtggggcacacgaaggtgaagtcggccgggtagaagaagaacagggaccagtggccgagcacatcgtccttggtcacttcgtggaactcgttgttctggaatgcgttcaccttgaaatcggtcagttcatgctgcagaagagtcatcatcggtcctttcgggaattgttaatcttcaagcgtttaccaccacctatcgtaatgtggtgagccacggctcgcgcgggtgtaacgtatgagccttatcacaccagccacagcccttgtgctgactatcatcacggcccacccttaaacaggattgagatcgtgagcgttctcattatgctttgggcaaagccagattatgcacgcagtcgcgaatccgcacttccaatcgctactatgggtaccagcagtccgctgataatggaggttttcatggctcaggcagacgttgaacaggaatcaaccgcaaatgcgacgtggagtcgcatgctgcaaggcaaccgccgattcgccgagggcaagcccgaccacccatggcaggacaaggagacccgccagacgctgcttgatggccagaacccggatgccgcggtgctctcctgctcggactcgcgcgtacctccggaaatcatttttgatcagggcctgggcgacctgttcaccgtgcgcaccgccgggcaactcatcgatagcgcggttatcgcctcgctggagtacgcggtcaagaaactgcacgtcagcctgatctgtgtgctcggtcacgagcactgcggcgcaatcgaggccgccgagcaggagctggacgacctgatgcacaccatcacttccgaagccgacggctcactggaggccgcggatgcgatggacgacctcgacgagcacatcgccgccgccgaatcgattattctgcgccaggccggcatgtccgtctggcaggcgcgcgaagccgagctcgacgcgcatgaagacatcgagcgcgtacacgtggcccacaccatcgagacgctggtggaacaatcccccatcattcagcaggcattggctgccgaccagctgatgatcgtcggcgcccgttaccagctcgacaccggcaaggtcgaggtgctgagtttctgaccatcagtcagaccccgttcaccgggggtaatgcggtcgtggtacatctgtgtgcagagagatcgaagaacacggaagtctgaaccaatgccacctgcccttactattcactacggatccgccacctatacccccaatcctgcacatgccacgaccatcgggcgtgcgccggattgcgatctggtgattcacaacccgtacgtatctcaccatcatgctcgcgtcacctttaccgacgatggttggctcttggaagacacgggtagtgcaaacggactgtccatcaacggcattcacaccacttccgtactgctgctgaacagcaccaaagtgacgctggcacaaggtgccaccatcgtctgcatcgtcggaaccagcgggccgtccacgccggcacagcccccgcgacgccctgcggcaaacgtggcccagcctgcgctaccgccggcaccatcagcgcaaccggcacaacccacgcaactcgcgccgcaacaggcacgcccagtagtgcaacccacaccaccagcaccgcaaccggcacaaccggtacaaccgcaaccaacgccagccccgctggccccgcaccgcgtatccccggccctcgcgcacctgcaacagcaaccccgcccaacagcagtggcaccgacggcagtatcgccagtgccggtatcacccgcatcaccatctccgtctccctgcgcatccccttccccatcgaatgccgccggcaccgttctggcaggcagcacgcaagcggtaaggctcgaatcccaactcaccaccaaccgcgtgcacgggtccttcagccccgagcacgacaccacaggcgtcatcggccgcgataccgcctgcctgattcgcatcaacgattatctggtctcccgcaaacactgctcgctggaaaccaccagcagcggcatcctgctcactgacctgaactccgccaacggcacttacgtcaacggccgccgcgtcgcgaagatctggctgcgggaagacgacgtcgtcaccgtcggcaacaccgacctgatcgtgcatgaaggcgtgctgtgcgaccgcacgccgtttgtcagcaacgacgcggttatcgccgaaaacatcggactgaccgtgggcaaaggcacccggctgcttgacggcatcaacgccgtattcgccaagggcacgctcaccgccgtaatcggaccttccggcgccggcaaatcaacattcacctccatcgtcgccgggctcaacagccccacggacgggcgcgtgctgtttgatggatacgacgtgcatcagaacatcgaactgttgcgcagccgtatcggattcgtgccgcaggacgacgtggtgcaccgcaagctctctgtggacgcggcgctcgaatacgccgccaagctgcgcctgcccggctcaaccaaggccgagcgcgccgaaatcatcgacaacgtgctcaatgagctggaactcacgtctcgccgtaagaatcgcattgacagactgtccggcggccaacgcaagcgcgtgtccaccgctatcgagctactcaccgaacccgaactgctgattctcgacgaaccgacctcgggcctcgacccggcgctggatcttacggtgatgaccatgttgcgccaactggcggatgccggccgcgtggttatcgtggtcacccattcactgtcgtatatcaacaagttgtgcgataacgtgctcatgctcgctcccggcggccatccggcattcttcggcaccgtgcaggagatgagccaggcgttcaacggcaaggaatgggccgacatcttcaacgatgtcgccgaatctccggaacgggtgtattcgattactgattcacgccagcgcaccatgcaggccgagtccaccatcacgcggcacaccgagcatgagaaaccggcaaagccattccgcatcaaacagaccatcactctggtgattcgtcagctgcatttgatcatcgccgaccccggattgctgatcttcctgctgttgctgccattgctcctaggactgctgtcgctggttgtgcccggttctcatggcttgggtgagcccgatttcaaagacgccgccaccgagccgaaccagctgcttgtgctcgtcatactgggtgcctgttttatgggatcggctttgtccgtgcgagacatcgtctccgagcgagcgatttacggccgcgagcgcgcggtgggtttgtcgcccacgtcatacaccgcctcgaaactcatcgtgatgggtttgcagaccttgttgcaggcggcgattctgaccactgcggtcagcctcggcaagcccggcccggaccatggtgtggtcactgattccggcatacccgaactggtgttggcgatttggctgactgcgtggacttccgcattgttgggcgaagtcggctcggcgttggtgaagtcgggagaacagacgatgccattgctggtggtgctggtcatggcccagttggtgttctccggcggcatgattccggtcaccggccgcgacagcctcgagctggtcagcatgatcttccccggacgttggggcttctccgccgccgcctcggatatcgggctcaacgatctgctgtatggccccaccaaggtgccgatgttcaaaaaggatgatctgtgggagcacaccacggatcagttctggttcaacattggcattctggggattatggtagtcgtcttcaccattgtgctgcgtatttgcgtcagcaatgccgtggccaagatgcgtcggcgctcatagaactggatcgaaactagcccgcaaccggcttacttcattcattaggtcaattatgcgttcatttggtcactgcactccaacactgaccattgaaatgccgccattccaacgcctcaccatgccgacaacccaccaaatgaacgcgcaacctaccaaatgaatgaacccagccctatatttggtgctacaacgactgcaaatactgccccaaatgcggcaccgcaaattccagctgcccatgacctgccgggcggatgagtttgtccttgaatcgtcgaaggcgagcagcgcatcggaaacaccggtcgacacgtcgtccgcggtaatgacatttgaacctcgacgttgtgtggattgccacatgtagtagccaacaagctgcaccatgtacgggtatccttcagactggcgagcggcttcaagcgcatcttccccactgatggtcttgccggaatccgcaactgtttccaagaacgcattcttgacgtctggaagcggcacgttatccaattcgcggcgtagcgcacggcgcaggaatgtggttacctcgttatccagcaaatcgttgaccatatacggcaagccggcaaatacgatgacaacgcccttcttatcctcatcaggcgtatcactttcatcggcatccgtaatgacgtgctgcacggctgtagcaatggcaaccaaatcatcatgcgaggccgcttgcgtctcatcgatggtgatgagaatgcccttccctttgccgagtttcttactgcccagccagcacaccccaatttgacgtgccactcccctagagttgaaggcatgtcacttggtttgaacatcctcctgatttttgtatttctcgttatcggttccgtgttctccggcaccgagttggcattggtctctctgcgcggctcgcagatcgagcaaatggagcaggaggacgctcgcggcgccaaagtcgccaaaatcgcacgtgacccgaacaccttcctctccaccgtgcaaatcggcgtgacgctctccggcttcctgtccgcctcgttcggtgcctcctccatcgccccctacctgattccggtggtcgaaagctggggcgtgcaccccggcatcgccggcggcctggtgaacatcatcctgaccctcatcatctcctactgctccatcgtgatctccgagatggtgcccaagcgcatcgccatgcagcgcaccgagcagatcgcgcgcgccgtggtgcccgccatcgacgccttcgccgccgtctgccgcccgatcatctggctcatcggcaagaacacgaacggcatcgtccgcctgctcggcttcgacccgcagcagaccgagtccgaggtgtccgacgacgagctgcgcgtgctggtcagctccaacaccaacctttccaaggacgaacgcacgattctggacgatgtgttcgacgcgtccgaaaccatcgtcgccgaggtgatgcgcccgcgtgccgacgtggtcttcatcgagggcgaccagcccttggccgaggccgccgcgttcgtacgcgaccagccgtactcccgttacccggtgaccggcaaggatttcgacgacgtgatcggcttcgtgcatgtgcgcgatctactggacgtgcgcgatccgaacgccaagatcgtgcgcgatgtggtgcgcgaaggcatctccctgcccggcacctccaagctgctgccgagcctggaactgctgcgtaagcgcggcatccatctggccgtggtcatcgacgagtacggaggcacggacggcatcgtgacgcttgaggatatgaccgaggagcttgtgggcgatattcgcgatgagtacgatctgcccagcgagaagggcggcgaacgcaccacccgcaccgcgttcgtcaatggtgtggccacgatcgaggccagcatgaccattgaggacttcgccgatctgaccggcatcgaattggaggacggcccgtacgagacggtcgccggctacttcctgtccaagaccggcaagatgggtgcggtgggcgacgtgctgcattccgacgacggctacaacatggtcgtcaccaaggtggatggccgccgcatcgaaaccatcgaagtccgcaaagccggtgccccggaccatgcgccactgccagccgaatcacaaagcgacgatgccaactagccacgtgatattcaccacctattcgttcggcccggggcataaccaaaaatcgtagaattatatggacaggttccacctactgaaagaaggaacattatgacacttgcatttgttgtgccgggccttgatgaagcggccagtgagaaggccatcgccatcctgcagaaccgactgagccaggagcaggaggccgctctggtcctcaagcacgcgcactggaacgtgaccggcccgaacttcatcgccgttcacgagatgcttgaccccgaggtcgaggccgtgctggctcaggccgacgagaccgccgagcgcatcgccactctgggcggcaccccggacggccgcgcggacgccatcgtgcgcaaccgcacgtggaagtcgttcgacgccgagggccgcgtgggcaccgaggagtatctcaaggcgctgatcgagtactatgacgccttcatcgccgacgaccgcaaggccatcgccgagctggacgagctggatgtgatcagctccaacatcatccaggaccacgtgcaggaactcgaaaagttccagtggttcatgcgctctcacctggcataagtaaaagcagtattccgtggctcccctcaaagaggggagccactttcgtctcacgtgaaatagagagtctccacatacataagttggaaaagtgtataaaactccccattttgaggttggaaaacgtagccaaaaccgcattcttatggttggaaaacgtgactggaaccgtatttctgtggttgtaaaaatgtagccgtacgttcaacaacgagtggcaggcccacatgcgggccgcacacttagtcaacaagtacatgtcggtcagatggttcggactggtcagagggcccgctctgatcagttaggtcggtctgaacggactggctgggctggtcggcctgagtagcccgtttggaccgatccggttcgcccttgctggccttcacactgcttcagctccagctgaagttcgctgatgcgccgttcgagttcgtcgatgcgccgtacttgtggcgaagtgagactgaggggagcctacaaaatgctcacaggccgagggcaccggccacggccatggcctcgtgttcgggatcggcctggccgatgtgtacgttgacgtgaatttcgtcatcgcccggctcttcgagaatgtcggactgggattgcagcatgctcggcttcatgaagtggccttggcggtgggaaaggcgttccatcacctcgtcgaatgtgccctgcatgtagacgaacaccacgccttgacggcgcagcttgtcgcggtagatcttcttcaacgccgagcaggtgaccacggcgggctcgccggcggccacgcgctcgtcgatccacgcggcgatggtgtcgagccaaggccagcggtcttcgtcggtgagcgggtgtccggcggccatcgagatggtggcgcattcggaccatgcgaacgaatccgatcaggccatcagccacatcaccggcactgaagcctgacccgtcatcgtcacagcaccacgcggcggttgaggtcgcggcgcagcgtcttccagccgggtaggtaggcggtcatgcggcgttggaatccggcgccatggccgctttcccacagatgcgtcatctcatggaccaagacgtattccaggaattgcggttccatcactcccaattgaaggttcagacggatgcggccggttcgcggcgtacacgatccccagcgcgaggccatgacccgtagcgtgatatgcgtgggctgccggccgatgaccggcccccacttggccagcagctgtggcaacgcggcgttgatcgcggccgccgcttgtcgtttgcgttcgtcggtccagatttgggagcggtcaaaatacggctggacgttcgtaccggcttggcccggcccggcgtcgccgattctcggacgactgatatcaccggttttcggacgaccggcaacgcctccatcatggccgctggcaccagctacgccacgacctccgttctcgaagcctgcaccctcgttcaatgccatgatggagcgccgttgcgcctcagccatgcgctgctgctgggcgagaatccacgaatgtcgctctttgacgaaatccgcgatacgactctcgctcatccgcatcggtgcggagatttcgacgcggccgctcggcggtttgatgcgcagatacaggtttttgatgggtttgcgcgtcaggtgcagatggatgccatcaatatccaacgactgctcggcggcagcggaccgaacggatttcggcgcaccggacttcggagcggtggattgacgacggcgataaggcatgcaagtcattcttacacaacggcggacaacaagcggcacacaatgccgcccctcacgaatcggcaaccggcgctgctacattcaatccgcataccaactgcccacaccggagaaggtcgcgcaggagaaggcctcgctgctcgagatcgacgacagcttccagaagatcgtcctcgtacgcgacgtggtcaaacccgtccgcgacgaacacggcatcctcacgatgagcgtctacgatttcctcctcgacccggacagcctgacgatgtgacgccggacggccggcaaatgccccggaacgcagccccccactcctcgaacaccgccttcgcggtggccgaggacaccatgacgagacagccgagcatgatggcacccagcagagggtgccgaagttcgcgatgacgtactgccacaggtccgacccgtccgtgtagccgtcgaagcgcagcgccgcgacggggacgagaaatccgtcaagcgcatgcgcggcgtcagatacaccgtcctgaagaaccccggcaagctgaccgacagacggtccgaggcgtccgggaacctgcggtacacggaccccaagggccggccctaccgttcatgacggctcagggaacccctccggacgatgcccaaacgaccggccgaccaggccgggaccgaactggaccgccgggtgttccgggcgtcccacagccgcatccccgaga

SEQ ID NO: 1058 - DNA, 19116 bp, Unknown
  R13_10m  MAG No. k141_3490
caccaagcgcacccagtgcgcattgcgcaatgagaccaccgtggagaaggtcggatcgatcgcggaaatgcccaacagggtctgcaatgtctgcgcgatccatgcgccgtgcgagaacacgaacaggtccgtgtcgtctccggcacgcgtggaccagtcctcaagagcctccacaccgcgtttgcctacggcttccttgggttcggcaccatacttcagttcaccgccccgagactccatccaggaacggaagtcctcagggtagcgttcggccagttcagccacggcatggccatcccagtcgccgaagctgcgttcacggacgcgatgatcatcgacgggctcgattccacccaatacgtcggcgaaagcctgcgcggtggcgtgcgcacgcttcaaatcggagcagacaatgaaccggtggttgatttccggccgacgatcgacgtacaggcttttcaaggccgcggcggtctgcttgacctgccattcacccacggcgtccagcggaatgtcgacctggccttggagcttgtgagcggcgttataggaagtgcgtccatgacggataaggaaaatggaacgaacatgattggccatagtgacgatcctttcgattccagtgaggaaacagggaaaagggagggctgcctggtgccgtcaatgacgttcggcaacaggcagcccgacacacgaatatcagcgagtatcagcgaatatcagcgttatgtgattcgcacgttacgcggtggtgacggcagcagcgtccgcatgctccgccgtttccgggtgtgcgagttcaagatcgatggccgggcagtcgcgccagagtcgttcgagcccgtagaattcgcgcgattcctcgtgcatgacatgaatcacgaaatcaccgtagtcaagcagcacccactggccctcggtcaggccctcgcgagagcgcggctgacggccggagcacttaaggaacaggtccttttcgatttcctcggccacggccagtacctgacgctcgttggaggcgccggcgatcatcatgatgtcggtgatgccgagcaggtcggctacgtcgaaggccacgatgtcggtggccttgatacggtctgcggcctcggcggccacgcggacggcgttgatggaatcctgaagtgcgggcatggttcagcgctcccaggcgggcttccagccctcgacgttgtgctgcgtgttctcggagtagaccattgtgtcgctcggcacggcgtggcgcaccacggagccggcaccggtggtcacgttgtcgccgacctcgaccggggccacgaacaggttgccggcgcccacatggcagccggagccgatggtggtgcgattcttgtgcacaccgtcatagttggcggtgatggtgccgccgccgatgttggtgtggtcgccgagctgggcgtcgcccacgtagctcaggtgcggcaccttggtgccgttgccgatgtgcgccttcttcatttcgacgaacgcgccggccttggcatcctcgccgaactcgttgcccgggcgcaggtaggtccacgggccgatgttcgtgcgtgcgccgatgtgcgattcctgcacgcgggaacgctcgaccacggcaccttcgtccacggttgcgtcaatgagggtggtgtacgggccgacgatggcgtcctcgccgaccaccgtgtggccttgcaggaaggaaccgggcaggatggtggcgtcgcggccgatctggacatcgtcctcgatccaagtggtttccgggtcaagaatggtcacgccgtcgcgcatccagcgctcgcagacgcggcggttgtaggtcttggacagcgcggccagctgcacgcggtcgttcacgccttcgacggtgagcggatccggagcggcgaacgcgccgaccttgccagcggccttggcggtttccagcgcgtcggtcagatagaactcaccctgcgcgttgttcgatttcagtccggcgattgcctcggtaagcacggaagcctcgaacacgtagaccgaggtgttcacttcctgcacggcgagttcgctgcggttggcgtccttctgctcgacgatgcgcagcacgttgccttcgcgatcgcggatgatgcggccgtagccggtcgggtcatcgaggatggtggtgagcacggtggcgccgttgccggaggcggtgtggaattcgaccaggcggtgcagcgtctcgctgtcgagcagcggcatgtcggaggcggcgatcagcaccgggccatcgaccttgccagcctcggtgagctgtgccattgcgcactgcacggcgcgaccggtaccgggaatgtcgtcctggttcacgatggtgacctgctcgtcataggagcgggcggcttcggcgacgcgctcggcctggaagtgcacgaccacggccagcgtgtcggggttcagggcggtcaccgaatccatgaccctgttcaggaaggtcttgcctgcaaaagtatgcagcaccttcggcttgttggaacgcatgcgggtaccctcgccggcggcgaggacgatggctgcggataatgccataactgacgtattcccttcgatcggaatgtctattgagggtggaaacacctcaaaacaatagacggccgcccggatgtcgagcggccgtcagccgttcccccacctggactcgaaccaagacaaagggttccaaagacccgtgtgctgccattacaccatgggggagtcgtgggctttcggcccacaagtgttcatttataccatactgtcggtatttaccgaaagactacgccatgtcgcgtctcgcatcgtgtgctttccttgaacaaacacgcacgtgatcaggcgaacaggaagccttgaccgtggtgctcggggtaggtgtcgaacagttcggcgaccgagccgtcctcgaatacggcgcggatggcgctggccagcagcggggcgatcgacaggacggtcaagccatcccagcgcttttcctcgggaatcggcacggtgtcggtcagcacgacctcgcgcgcaccgcagttcttgagccgctcgatggccgggccggagagcacgccatgcgtggcgaccacggtcaccgacttggctcccgcgtcctgcagcacgtggcatgcgcccgcgatggtaccggcggtgtcgatcaggtcatcgacaagcacgcagtccttgccggcgacgtcgccgaccacacggttggcgaccgcctggttcgggcgggtgatgtcgcgagtcttgtgcacgaaagcgagcggaccgccgccgagacgctgcgcccactgctcggccacgcgaatgcggccggcgtcgggggagacgacggcgacgttgtcgagatggccttggaaacgatcacggatgtagtcgaccagcaccggcatggccaccagatgatcgaccgggccgtcgaagaagccttgggactgcgcggcatgcagatcgaccgacatgatgcggtcggcaccggcggtcttcagcaggtcgaacaccagacggcaggagatgggctcgcggccgcggtgcttcttgtcctgacgggagtagccgagcaacgggcagaccgcagtaatggaacgggccgaggcgcgcttcaatgcgtcgatcatgatgagctgctccatgatcgccttgttgatgggtttgtagtggctttgcagcacgaacacatcggcgccacgcaccgattcggtgtagcgcacgtacatctcgccgttagcgaaatcgtatgcggtggtttcaaggacgtcgatgccgagctgctcggcgacatcctcagccaatttcggatgaatccttcccgtaacgagaataagattcttatcgggcttcccttcaaggattgcgctcaccatgtctcccaacgtgtggtctcgttgatgcagtcttcagcatagccgttcttcacgaccggttggacaactcagcgttgcctgccgttcacctgccgcttgcgatccattgttcgatggcctgtttgaccgcctttgcatagatatcgctatccatgctcgggtggatgccgtcggagccgagcacctgcgcgttcgcgttggctgtggcattccaatccaccagcaccacattgtccggatgtgcggccgcatagtcggcaagcacctggttggtaggtggaatccacgtacggtctccgtgggcattgaccagtaccagcacgcggtcggggccgatcatattacgaatctggtccagctgatcaggggtgattgccgaattggtgccaaggccgatcagcacccattgccgcagactgccggcggacagatcattgccgatgagttcgggggcgaccatgatggagcgggaaacgctcgcgtcggtctgaatgccggggaagacttccgaaaggccctgtgatgaggccagcatcaccgaatcgcctatggcggtaatctgatcgccggtgggcatctcatgcttgggcttgggcggtgccggcacggcatggcgcagcagcacgtgttcggttttctgtatgcgttccagttgtgcggcctgttgctccagctggatctgcatggcggttttcgcaggtgcatgagtaatgccctgcgcgcagccgaccaacgacagcgccaggataacgtcaacggcaataacccgggccgcatgattcttcttgttcgtgcgaaggggcaccacgacggatatcaccgagtgcattgccgccggtttctccaccatcagccaggaaatcatcaccgcaatggcggtgagcaacgcggtcatgatgagaggccaaggccctgctgccttgaagatcttcggggcaagggcgctggaaagaatccacaacggccagtgccacaggtaaatgccgtacgaatacttgccgagggcggccaatggcttgaacaccatgaggctttgcatccatgaatcgtcggagatggtaccggcaatcagcagcacggacaacaggctggacaatatgatgccgccgcggaaggcgaatgcatcctgtttgccgataaccgtcatggtgaccaatgcaatcaggctgaggaatgccaataccggtgccgtcgcattccagatgcgatgctttacaggaatctgaggtaacggagcccggtacgtggcggccgaagcgctcgatctaatggtgcggggcatcggcacagctccctgacgagcgtggcccaactgaggagcggtgacccaccaggcgagagccacacccagcatcaggcccatgctgtgggtatcggtgccgaagtagacgcgggtggggtcgcccttgggcacgtacatcacccacatggcgatactgctgaacgccgcgagtcccagtgggatgagtgagggcagtttcgtctggcggagcttccacatcagccagacgatgaacggcacgatgacgtagaactgcatgagcacgccaatgaaccacagatggcgaaacacctgcgggttcatttggtcgaaatagctttggcctccggcaatggcgtaccagttgtagcagcccagcagcacggtgatgacttggtcgcggatggaaaccagcatatcgtgatcgagcagccagccgacggagacggtgaccggaatcagcagaaacagcgccggatagagacgtactgcacgcttggggatgaatcgcacgaggttgagcgttccggtcgtgttcagggaccgtatgaggcttgtggcggtcaggaatcccgagacggtgaagaacacgtccacgccgtagaatccgcccggcagacgctgctgcatgcagtgatagagcacgatggccagcagcgccaatcctttgatgccgtccaaacccacgaaacgtttcacgggacttccctctctgactgcggctacgacggcgttccgccgcgtgtggcaaacgtaacgcaaatccaggattgaatcatatcattcctgtcgtacgcggcatattccccgtattccgcgccctggcggcgcgccccatgccgacgtgccgcagccgggccgccgcggcacaccactcgcgatgcgggtcagggccgtaccggcctgctcccgcgtgatgccgtcaggcagagaccacgctcctacatatgacgctatatatagcgaccggtaatgctttcatctgtgtgtctgatctcgtccggcgtcccgcaggcgacgaccctgccgccttcctttccgccgcccggtcccatatcgatgatgtaatcggcgttgtccaccacatcaaggtcgtgttcgatgaccaccacggtggcgccgtgattgatcagcgtctggaaaacaagcagcagcgtcctcacatcctgcggatgcaagccgatggtcggttcatcgaaaacgaacaccgagtcgctctggtcctttcccatctcgctggcaagcttcagccgctgtgcttcgccgccggaaagtccgggcgtttcctcgccgagggtcagatagccgagtcccaggtcgtgcagcacctgcagtcgttgccgggggagcttcagtccgtcgagggcgttcagcgcctgatccacgctcatattcatgagctccggcagactgtatgcattgccgtccttcgctttcctgcggatgtcgaaagcatccgcgccgtaccgggaaccccggcagtccgggcagggaatcttcacatcgggcaggaactggacgtccagcgagatctcccctgttccgtcacaggccgggcagcggagtcttcccgtattgtatgagaaatctccggctttgagggaacggtccttcgcgtcctgtgtctttgcgtatgcctttctgagctcgtcgtggacattcgcgtacgtcgccacggtcgagcgcacgttgatgccgatcggcgtcgcgtcgatcagcttgacctgtgcgatgccctccgcctcgatgttcctcacatgtcccgcaagcttctgcccgccgatcttcgccctgagcgacgggatcaggctttcgagcaccatcgtggttttcccggaaccggagacgcccgtcaccacggtcagcctccccatcggtatccgcacgtccagaggatgcaccgtgtggatcatccccgtttccagatgtatggcgcccttgtcgaacatgcgatccgcctgcgtgaccggacggattcttgcttcataccggtcggaaagatacggcccgatgacggaccgtggattcttcgcgatgtttgcgatccttgccctcggcaatcaccgtcccgccgtccgctccggctccttgccccatctcgatcatccagtcggcatgcttcaaaacccgtgtgtcatgatcgacgatgatgacggaattcccatccgcccgcagattgtccatcacgccggtcagccccttgagattatgggggtgcaagccgatcgacggctcatcgagaacatacagcacgccggtcgtccggttgcgaaccgcccttgcgagctgcgcccgctgacgttcacctgtggaaagcgttgaagccgcccgatcaagcgacaggtatccaaggccgagatccatcagccgctcggaaacgtccatgaacgattcgcggatgctctgcgccatggggcgcatctctttcggaagcgatgccggcacgccctgcacccaggggatcagttccgaaagcgtcattgccgttgcccggtccagaccgattcccccgcagtctcggcgtgcgggcggcctccgagagccttgtcccatggcagtccgggcaaacgccctccttgagatatttctcgagcctcttcattcccttctcgtccttgaccttggcaagggagttcttgacggaattgaccgcgctgtaatagttgaaatccatttccgacggttccagcgtgcgcggattgacgtaatggacgtgatgttttttcaactcgccgtggtagacgatctccttttccctcggcgagaggtcgcggaacgacacatcggttcgcacgcccatcgtccgtacgatgtccttcatgagcgaccacatgagcgtcccccagacgacgaccgcgccctcgtcgatcgtcttggaatcgtccggcaccagcgtcgcctcgttcacggtctggacgattcccgtgccgccgcaggtcctgcaggcgccggtactgttgaaggcgagctcctcggctccgggaccgtggaattgcccgccgcaggccgggcaggtgatttcctgcatggctgcgaccgaaagagatggcgggcagtagtgcccattggggcagcggtgactcgcaagccgggagaacatgagccgcagaccattgagcagttcggaaagcgttccgaatgtactgcggatgccgggaacccccgggcgctgccgaagcgcaagcgccgccggcacatatcggacatcctccacatccgcgcgttccgcctgcgtcatcctccggcgagtgtaggtggagagggattccaagtatctgcgggatccctccgcatacagcacgccgagcgcgagagaggatttccccgagccggagaccccggcgatcaccacgatctcgtgcagtgggatatcgatatcaatgttcttcaggttatggaccttcgcgccccgcacctcgatgtgtcttggcggcatcttcccttgtctgacttcactggacatgacgatggcctcttcgcctttccgggtctcttccgtgcctgatggttgtttctgttctgcgtggccacatcatagtgtgtttcgaccctatatcaagtgcgcattctcccagcgtagcaatatgcatgatagcgtttcggaatccgccggcaaggtcatgggctttctgccgcgatccgcgatcgtcgaccagaatgtgcgcgtctggaacatggccttcgactccacgccgagcgttccgtccataaccacccgctgcttttgaacgatatacgcagctgcactgttcgcccaagatgttttgcggtgaagttctacggatcgagagaggatccccgccacaaggcggaaaacatgggcaggaaaacgccgatgcaatgccgttccggacgaatgaggaattcaaggtgcttatcgaggccatggaaagcggacctgttggatacgccgtcttcatggcagactgcgtctccccttatggcaagggctgggccggcagacggatgaagtgcggctgtgatcacttcggaatgaggaagttcgggatgcacgatgcgcatcatgcccatgaggtcgtcgatcgggtcgtttgcttcggatgccgaggagacagcagaccccgtatctccgcctcggcattcttgaggctttcgacatcattatccgatattcctcggtgagtcgggaacgcgtcgcgtggcatctggagaatgtcggctttcgtgggatggcctacctcctctcgtcgggcatctagtgctcttggtcgtaacaaggcccaagaagccgcgtccgctggacgggacaggcagggaaatacctgatggaggctacgggcgcactaagctacggctaagccacgtcaggtcatggatcatcacgaaactgattcgattttttttttatcgctcagtgcttctgtgtttaggtaaaagaagcagacgttataatgggaagcattgttctgcgggctatcctactcgccgcatctcagttttttggaggttctgatggctagccagatttcaagcataatcggtgttcaagtgcgacgtggagccttctcggaaggacctacctcagaagggaccaacgttcgactgtttcacgatagcgatagcaataatacgagacggcatcgcgcatcgattgtctttggccgtaatggatcaggaaaatcgactattgcacgtgagatcaacgatatcacggaaggcaatggtactggttatttctacgattgtaatcagagattagatttagacgatgctgaccgagcacgaataagggtcttcaacgaagattacatcgagtcgaaaacgcgtattggtgacgatggcctccaggcgtttgccatgcttggcgagcaagtcgaagtagcagacgagatcaagaagattgacgagaagattgaaagcattgaagccgagaaccaagggctaacgaagaaaatcgaagagcttagaaatggtgagaagtctcttgagacgctaaaaagaaagattcaagacgcggcagttaacagtggatggaagtcgcgagcagagaaagtcgacggcaagaagcctaatttcactgataatcggttgaatgagatatgcaatgcagtgcctggtaaatcgcgcgtatgtctagacaataagttcaatcaaaaattgatggactacgaaaaagccagtgcggccggtggaaatcatctgcgtgagcttctgccgcttgagccaagcctatacgatgaagctcggattctagagcttctggctaaacgcgtagaagaccccacgttaagcgatcgtgagaagcgaatcctcgagcttgtacgaagtggtcatcagcatctaattgaggagtcagccgaggtcttttcttcatcggaggcggacgtttgcccaatgtgccaacgaccaatctcctctgagttaaaggcttccattgttgatagcgtacacaaagtgcttagcaaggaagtggataaattcaaagaggaactcagggcgtcgcacttggaagaaataatcccacgggatgtcccggaacaagtatccgctaagctaaagaccgaactgctaaaagcagagcaaaaggcaaatagcctaatagaaaaatacaatggcttgatggtggagagagagtcaagcgtttattctccaaagactattgaggctctcggtttgtcagaagtgattcaagcgttgaatgaagaaattaaatccattaataaagaagttggatcgataaataaagacatagatgagaagtcaaaaattcatgacgagcttcgtgatttgaacaataagattgctgcagcagatgcatcctcagagattgaaaagcacaaggaggcaataaaggaatataatgaagctcgggacaagaaaaagaaaaacgaagatagtcttcagcgcttagctcgtagcagggccgaacaggaagccaagatgaagaacatggacatcgcagttgatgtaattaacgattacctcgcgaatgtctatttcgataccaggagattccagctttccctggatgatggtaaatacaagattatatctaaagggcaagcggtaaagccgaatgatgtatccacgggcgagagaaacattctcgcgctttgctacttcttctctgagagtggaaaaaatagggagcggcatcacgaggatgacgaccctcagtatctcattctcgatgacccaatttccagttttgacatggagaacaggataggagtctgctcgctaatcagagagcgtgctggacatctattaggctcgaacccggaaagtcgtatcacggtcatgactcacgatgggggtgcggcaaacgaactgaaggtcatcttcgatgacataaatgacacattcagcaacggaaaattccaaattgatttactcgagctcaaggacatgttttgcgaaacgcgtagtaaaaaagccaacgaatatgttgcgctgttgaagcgtacctacgattttgcttgcgccgagaatatagatccgcaggagtcatacgtaattggaaacatcctacgaagggtgcttgaggggtacagtaccttcaactacggcattggaatgtccggactgtctcgcgatccggacttacaagaacgcctcggtgaccagttacccttcctcgcagatgcaatgtatcgtcttgctctgaacgatggcagccatttgcaagatcgggaaagggagtttaaccccacgaatgactttgggcgatatagcgatgaagagaagcggagatgtgcacagtgcgtcatggttattctctataagctggatagtgttcatctgaagaagcatcttgtttcgacacaggttagatgggaagatatcagaaggcacctggacgaatggtctcaaagttttacccccatgatttcgtgattccgcgatgacgaacgtcatatagccattcgttgtgctcacatcagcatttccgcagttcagagtcgtcgctcctcacttggaatttgtcactcttgggtcgggtgaacatactctccccgggtggctacagggaaacaggttatgtaacgattgagcgggaacggggtgtcggccatctcctctgccagggaagtgctagcagctgccgggcggttttgaactaggattgttgtcgcattgagatcattccctgactctagtcggctcatgtcatcgtctaaatatagtctgctaccagacgttaaactctcgacctagcggttgatacatagttgacaggaggtcaacgcaatgacagtcagaaaaaccagaagcgattgtacagttaagacatttgagaagtcgcgcggattgcccgaggggacattgcgccacgaggatggtcgcaaggtccgcagcgacaagaagattggtaccatccgcaaggagaaccctgggtttaagttttaacgcctgggctgtctgctatttatcaatggtgcccttccctgatttagagtgtgtttacactatctaggttttgcgtggtaattgtcgtatgcgtacgccgaggtgcgacatcacgcttgaccggttcatgggggtcgcgcatccgttgccgcgccggcgcggcaacgtgacggtcggcaatcacacgttcgtcaacgccctgccgtggatacgccgcgcgggagccccgtggagggacccgccggagcgccacggcaagtggatcaccgtctgccggcggttcgaccgccggtccgggaacggtgcgatggggcgcctgttcacggcattgcgggaggcgcggatcatcgggggtggaaatccgcacgcccgctcatggaccgcgcgtacgggggttccacccggccgccggccgagtcgttcggcctgacgccggtcgtgccgcccaaagggaaaccgtgcggccccatgggatcgcgacagggaggcgtacacggggcggaacatggtcgaacgcgtcttcaaccgcatgaagcactaccgcaaggccgccacccgccacgacaggctcgacgagaccctcctcgccaacccccggcccatcctcatcgccgtctacccgaagaacacagccagaaacccaactagtgtaaacacaccttagctcaaacatcatcgcgacacattcaatggagtatttgaggtaataggcgtaggagtgagcggcttcggaagaatccgctcggcaagaatcgcgaagggtggagatgcttggcgctggaatccacagatggtcggaatatgcatcaggcattctgcgaatcattgtctgatgatagtagaagtagcctgtccaccagtttggatgcgagaaaaacgggctagccaacatgaagtacttgactccggtccaactttctgcaggcttgcgaacagaagtgaactcgggaaagtcggcgtggcaatagcaatatccgctgtattcctcatccctcactaaaacgggaaggggatgaactatttggaaggctcggagagcagctgaaggagcctctcgagcggtgtcttgcccaaaccaaaatgcctacgccagagtcgctcggtctcgagcgggttagccgtcttctttttttggggtattgctgtcagcgttcctcgtatagacggcaccggcacgaacgatactgcgcccctctccataatcacggtcaaataataaggcagggattcgctatcgtggtcaattaggacaatgtcaacgcaagcgttgcccagctcaatcgatgcgacacgaactttgggaacccccatcgacacgtcgctttgtacgcagcatatcaacgatgccttgcgtattcctccgttcgcccaagagctcggcgccgcccgtgagctaaaagtccccttcttcgtcaataccgataatcaaaagccccgttgtgtcttcgggattattcgccatgcagattatgccgtgaagcaagtccaccttgtttccatgccactcacgcttgaaatcccagtaggacccttcgcgcttgaggtcggcaagatctgctactaattcgggcaatgattcatcatccgtatgccttggttccattcagcacctgcttctctgtcctattgtataagggactcagaggttcttgcgagtggactctggaacgataggtgaatgctttttgcctcctgtctactcgtttcttttaaagttctctgcctgctccatgaccttctcgaagacctcttcatcccactcgggcggatagccgttcttatagagcagtacggtcagatccatgttgagttggcttttgatgtcatcacgcgtcgaccagtcagcatattgcgccttgtcgtttacgagctttgaaatctcttttgcaagcgcaatacacttctcgtcgctgaagacaaaaccatggtcgtcgcgcaccttcaccaagatgtcatagaatgccttctccgcgtaagtaacacccatcctctcaaacgagctcttgtcttccttgagatcgcgaaggatgtcaatgagctggtcgctcaggttgtcgacaaaatcagatacgaccttgctcgtgaaggtgaggtcgtcgcgtgagttgtaggcgtccaccaccttgcgaaggcgctcatcgaactgccgcgctttcaccttgttggtgcgtccgtaatccttgatcgcccgcttcacgagcttcatcaaggcgttgaatctggtgataggcatcttcatggcgttgagctcggcaaccgcctcttcgccgaagaggtcctcggggccgtcggcgtcgaggacgctctccacgcccgtgcagctgatcgcctgccgtaccatctcctcaacgacctcgttcatcatctcggcgtcgggcgcgtcatccttggtctgcttgtagacgatggagcggatcgcgagatagaactgggacatcgcggtctcgcggtcggatagctctcccgaggggaagcagatctggtacgcggatttcaggatgcgcgtgagccccatgaatcgcgtctggaactccttcgagagctgcacgtactcggcagccctgttaaggcacccgaggcgttcgagaggcttgcccgcatggaaggcgctcgagtcgaagttgaccatgaggtcgtcgatcatggccaggtgattgcggaagatgccgagggcgacggtcagatcgtcgatggctccggaatcgtcgccgccgtaggtcttgagcgccttcatcatgttctctttgatgccgatgtagtcgaccacaagcccctggtctttgccctcgaacacgcggttcactcgactgatggtctgtaccaacgtatggcgctgcagcggcttgtcgatatacataacggcaagcgagggaacgtcgaagccggtgatccacatgtcgcatacgacggcgaccttgaagttcgagtcgttgttcttgaactgcttgtccagcttcttgcgccattccttgttgccgcaggcgtcgaagaggtccctcgggtcgtccttgccgcgcgtggccacgatgttgatctttggcagcgcctcgagctcctccaattgctcgggcgaaatcctgctctcgtcctcggccttcttcgccatgccccattctggccgtacggcaaggatggcgttgagcaggtcgaaggcatgggcgcgattagagcagacgatcatggccttctgcacaaagcccggcttctccccgcagaggcgctcgtagtgctcgaccatgtcggccgcgagcttcttcaggcggtcggggtcgcgcagcagcacctccatcgagctcatggcgcgctggctctcctcgatggcgtcctcggtcgagccctcctcggcgcagcggtcgtagtactcctggatcctcttcgcctcatcaccggagaggagcacgcgcgccaatctgggctcgtaggcgatacgcacggtaatgccgtcgtcgctcgactccttcatggagtaacggtcgaccacagggccgaacacggcgattgtctcgtcgataggcgtgccggtaaagcccacgtaggtcgcgttggggaagccgtcgcgcaggtatttggcgaagccgtagcgggtgaaggcaccctcctcggtgaccatgagcttggagcccacgcccgtctgggtgcgatgcgcctcgtcggatatgcagatgatgttgcagcggtcggaaaggagccccatccgctcgctgaacttctggatggtggtgatgtagacgccgcccgattcgcgcccgcgcagcgtctccgccaagtcgtcgcgcgtctcgatgctgcgcacgttctcgtcatgcaggaaccgcttcgctgtcacgaacagctcgcttgcctggttgtccagatcctcgcggtcgacgatgagcacgatggtggggttgcccagctcctcgctgcgtcgaagcatcatcagacgcgagaggaaaagcatcgtatacgtcttgccgcagccggtggcgccgaagtacgtgccgcccttgccgtcgccttcggggcgcaggtgctcacagatgttgtcgagcatcctcgtcgcggcgaagtactgcgggtagcggcagactatctcggtggagcttttgctgtcgtcggggaagaatacgaagtcgcgaacgattgtcaggaaacggtcgggcgcgaaggtaccctcgaccatggtgtaaagggaactgatgccgttcgacaccttgtcgacgtcattggccttgttccaggcatagaaatatgagtacggagcgaacacagtgccgatcttgttgttgatgccgtcgctgacagcggctatgcagcagtacttgagcagactcgggatgtcgcgcgcgtaacggatggcgatttgcttccacgcatcgtggatggtcgtatcctcctcgatggcggttttaaactcgaggatggcgagcggtatgccgtttacgaagcataaaaggtcgggacgacgggtgcgcacgtcctcgaccgtgtattggttcacgatgaggaaatcgttgttcgagatgtcgtcgaagtcgatgtactcgatgtgaacggcaggcttgtttgcgtcctcgcggagaagggtgtacccctcgttgatgagccagaacgctcgccggcacccgtcgtagagcggggccgagggaatgcgcttgagctcgcccacgagcgtctggagctcgccctcggtcaggtcgatatcggcatagcggcgtcgaagactcgacttcaaacggtcttccatgagcggctcgtcgaagcggcggtgcagctgctcgccgttggcatagctccagcgcacgccgttggcgtcctgctgctggaacagctcgatgatcgcctgttcaagctcgtcctcggtgaactttccgttttcgaatttaaggtctgccgcttccatacttgcctactctttgtcggtcatttcctggatgaggtatgtgtcgagggcgcatgccagattgacggcaaggttggccatcggggcactaatctcgcgccccgtcgtcccggagccgtgcgccgccgccttgttgcggatgatgggaagcgacatgagaacgctgccctggaaggcctcgggcttaaggctctccgggagagacagattgtcagcctcgagcaaacgcttaataaggctgttggctgcctctgtctcggacttcggtccgcagatgaccttgaggacgctctcgtagctcttctcggcattgatcacggcttccgcatagtcgccgcgtcccaggaaatctatagccttcctcagctcatcgtaagctctccggtagagggggtccgcatccttgagctccctcatctcgctgagagccttgagcttcaggtcctgctcgaactgcctgggatcgatcttgaccagtcgcccgtcaacgagaaaccaggggatatcattctcgcgaaacaccttgttgatctcaccgcggaagccgcccttgccgttttcggcgtcgtcggaaagctcctcgtattggagctctacgaggtcgaagaggtgcggtgtgtaaacgtttgcaagggcgtggacctcgtcaaggctcgaacccatgcgcatcatatccaagtcgacgacccgataatcgacatgctcgttgagctcgtttatcgcaaggtcaagagcgtctgtatcaacggtgtagctatcgtagcgattcggctgaaaactaatcggctcacggaagtcctccatgacgcgtgcgactaggactttagcgctatagggaacgctgctgccgtcatctccgccaaaccaatttggctcatcctggaacagctctccataacgttcagagaataggcgctccataattacctcgacgcctcctcgattgagccccggataagtatggggcatatgtccttgagctgggccttgaggtagacgttgattcgtgtcctcgcccaatacgctgtccttaattcagcgatagctttaattgttttaccgtcggggatgggaatttcgcaagataagaagcgatcaatagccatgctgcctcgaatactgtcatcgcaaataaaccaaccattacggccaatttccgcacgagaaaaccaagccattagaaacactgccatatcggtattcgatgccatgaaaacagaatacgctggtgaaacagcaatacaggagtccgtttcgttcaccgcaatcggataagaggcatctcttccgacatgaagcagattgcatgcaatctgacctggtttgaccagcttgtatttaagtaagtcgtcactgcttgccctggagagcataaactccttcttgatgttgacaccgtaagctacatcgcacttaccgctagcattgcggacatcaacctcacggagatgctttccgacaggctcccacgtcttcgatttcttgcagcgatcaagaagcgcgtcgcacgtcagtttgagatcgtcgagtccctgttcataagcccgttggttagccaacatcgcctcatagatggcgacgtacttccgctgcacctcaatcggcggcaacatttcggggttataggccaaaatgtgtgtccgttttggcttgtgttcctttgtggcggtgggcgttcctcctgttcgagttgtatgggcggggaactcgaggtcggccagaatgtgtgtccggaatggccggtcaggccttgcggc

SEQ ID NO: 1059 - DNA, 38970 bp, Unknown
  R13_10m  MAG No. k141_4043
gctcgcggccaacgcgatgaccgacgaacgactcgagcgcctctaccggcaggcatgggaaaggagcccgcaaggccagtacgagacgttcggcatccccgcaagatacggcaccggcatcgactggaacgagttccacaccagggtcgaatggcagtcgaacgactagaccgccggacacacattttggcctataaccccgaataccgccccgtactttgctgttttgaaacacggggagtaaatggcggaatcgcaggtgaaagggagtaaaacggcaaagaaaaagcctccgtcccaacgtgggaacgaaggctcgattgccgtatgtattcatcgccgtcgctggcggctttgccgcgagtcgcatacgaaacgaaactcagcggcacagcggcactcgaaagcgcaggtaagccctatcggctcactcccattcaattgtggccggcggcttggacgtgcagtcgaggacgacgcggttgatctggcggcactcgttggtgatgcgcgtggagatcgtggcgagcacatcgtagggcacgcgagaccagtcggcggtcatggcgtcctccgagctcaccggacgcagcacgatgggggagccgtaggtgcgctcgtcgccttggacgcccaccgagtgaacgtcggcgagcagcacgaccgggcactgccagatgtcacggtcgagaccggccttggagagctcctcgcgggcgatggcgtcggcctcgcgcagcaggtcgaggcgctccttggtgatctcgccgatgatgcggatacccagacccgggcccgggaaaggctgacgccagacgatttcgtcgggcagaccgagctcggtgccgatggcacgcacctcatccttgaacagagtgcgcagcggttcgatgagctggaacttgatgtccttgggcaggccgccgacgttgtggtgggacttgatgttggccgcaccgtcgccgccgccggattcgacgacgtcggggtagagggtgccctgcacgaggaacttgacttccttgccgcgcgcgccggcctcttcaagcacttggcgctgggccttctcgaacgtgcggatgaacttctcaccgatgatcttgcgcttgcgctccggctcggagactcccttcagggcctcaaggaagtcgtcggccgcgtccacggtgatgagcttgatgccggtggcggcaacgaagtcgtgcttgacctgctcgacctcgcccttgcgcagcaggccgtggtccacgaacacgcaggtgagctggtcaccgatggccttgtgcaccagagcggcggccacggcggagtccacgccgccggacaggccgcagatcacctcggcgtcgccgaccttctcgcggatcttcttgacttgatcctcgataatcgaggaggcgtcccagtcgttgggcagcgcggcgcaacggtgcaggaagttttcgataagcttctggccaagcggggagtgcttgacttccgggtgccactgcacaccgtagagcttgcgggattcgtccgccatggcggccacgggcgcgccttcggtgtgggccagcacttcgaagccggccggggcctgttcgaccgccacaccgtggctcatccacgtggtctgctcggcgggggagtcggcgaggatgccgtcggcgtcgtcgatggtggctgaggtcttgccgtattcgccgagagcggccttatccaccttgccgccgagctcataggccatgacctggaagccgtagcagataccaagcaccggaacaccggattcgaataccttggtatctatggtcggcgcgccgggctcgaacacggaggccgggcctccggacagaataatcgccttcggatccttggccaggatctcgtcgaccggcatggaatgagggaccagctcggagtacacgcctgcttcgcgcacgcggcgggcgatgagctgggcgtactgggcgccgaagtcgacgacaagcacaggaccgtttgccattgatattcccctaacgttcattggaattttacgtgggctgaacacccctgattatcactggtcaaggcgacaaggccgacacgcagggactatgtgcgcaaatcgaacaaactacatgcctgtagtcggacaacacgccgatttcgaacatgggaaatcgaacgtgcgctgttctagccagatgctagatttccgcatgcttccgccgttctgaaaaagtatgttgaaaaaactaatgttgacaaacggtcagttgaaccgcacaaatactgaaatttccgtaacaatttcgaacacacccgcaagaaatcgttcaaaagtcgcgttgtcctcgtaccatgacgattgattgggaacggaaaaccttggcaccgcaagggtcaggaaccgtgaccgaacagaaataatcaatcgcacgatcacgtgcaggagtacaggagtacacatgacgagtcctgttattggcaccccttggaagaagctcaacgctccggtttccgaggaagccctcgaaggcgttgacaagtactggcgcgttgccaactacctttccatcggccagatttatctgcgttccaacccgctgatgaaggagcccttcacccgcgaagatgtgaagcaccgtctggtgggccactggggcactacccctggcctgaacttcctcatcggccacatcaaccgtttcattgctgatcacggccagaacaccgtgatcatcatgggcccgggccacggtggcccggccggtacctcccagtcctacctggacggcacctacaccgagaccttcccgaagatcaccaaggacgaagctggtctgcagaagttcttccgtcagttctcttacccgggcggtattccgtcccacttcgctccggagaccccgggctccatccacgagggtggtgagctgggttacgctctgtcccacgcttacggtgccatcatggacaacccgagcctgttcgtcccggccatcgtcggcgacggcgaggccgagaccggcccgctggctaccggttggcagtccaacaagctcgtgaacccgcgcaccgacggtatcgtgctgccgatcctgcacctcaacggctacaagatcgccaacccgaccatcctgtcccgcatctccgacgaagagctccacgagttcttccacggcatgggttacgagccctacgagttcgtcgctggcttcgatgatgaggaccacatgtccatccaccgccgcttcgccgagctgtgggagaccatctgggacgagatctgcgacatcaaggccgccgctcagaccgacaacgtgcaccgtccgttctacccgatgctgatcttccgcaccccgaagggttggacctgcccgaagtacatcgacggcaagaagaccgagggctcctggcgcgctcaccaggtgccgctggcttccgcccgcgacaccgaggcccacttcgaggttctcaagaactggctcgagtcctacaagccggaagagctgttcgacgccaacggcgctgtcaaggacgacgtccttgccttcatgccgaagggcgagctgcgtatcggtgccaacccgaacgccaacggtggtgtgatccgcgacgacctgaagctgccgaacctcgaggactacgaggtcaaggaagtggctgagtacggccacggctggggccagctcgaggccacccgtcgtctgggtgtctacactcgcgacatcatcaagaacaacccgcgcgacttccgcatcttcggaccggatgagaccgcttccaaccgtctgcaggcttcctacgaagtcaccaacaagcagtgggatgccggctacatctccgacgaggtcgacgagcacatgcacgtctccggccaggtcgttgagcagctgtccgagcaccagatggaaggcttcctcgaggcctacctgctgaccggtcgtcacggcatctggagctcctacgagtccttcgtccacgtgatcgactccatgctgaaccagcacgccaagtggcttgaggctaccgtccgcgagattccgtggcgcaagccgatcgcctccatgaacctgctggtctcctcccacgtttggcgtcaggaccacaacggcttctcccaccaggacccgggtgtcacctccgtcctgctgaacaagtgcttccacaatgaccacgtcatcggcatctacttcgccaccgatgcgaacatgctgctggccatcgccgagaagtgctacaagtccaccaacaagatcaacgccatcatcgctggtaagcagcctgctgccacctggctgaccctggacgaggctcgtgccgagctcgagaagggtgccgccgcttgggattgggcttccaccgccaagaacaacgatgaggccgaggtcgtgcttgccgccgccggcgatgttccgactcaggagatcatggctgcttccgacaagctgaaggaactgggcgtcaagttcaaggttgtgaacgttgccgacctgctctccctgcagtccgccaaggagaacgacgaggctctgaccgacgaggagttcgccgacatcttcaccgccgacaagccggtgctgttcgcgtaccactcctacgctcacgacgtgcgcggcctgatctacgaccgtccgaaccacgacaacttcaacgtccacggctacgaggaggagggctccaccaccaccccgtacgacatggttcgtgtcaaccgcatcgaccgctacgagctgaccgctgaggccctgcgcatgatcgacgccgacaagtacgccgacaagatcgacgagctcgagaagttccgtgatgaggccttccagttcgccgtcgacaagggctacgaccacccggactacaccgactgggtgtactccggcgtgaacaccgacaagaagggtgccgtcaccgctaccgccgctaccgctggcgacaacgagtgataacacctccacggtgttgttagttcgctaacgccaaagggctcgggatccgtcccgagccctttgcttattcataagccccctctgacgaggaggctgtcatgcgaagcatgactgggggagagaaaagcggaagcgaaggcgagagccaagactgaaaacagcccataaattccccaccccaactaatccttaaggatgacaactccccatcaattcaatcctgcgcatgatggaaaccacgccattcctccataggcttggaaccagtatccgggcacgaggctcggagccagccatgggggagagcacatgcagaaggatcagcagcagaccgcaatcatacaaccgttggacgctaccgacaccgtggaatcaagtgtcgacgcccttgcccaaggcgaggcggagaacgcggaagtcgccgaattcaaccgattaatgcgcgaacgtgagacgcgcaagaaaaagcgcgtggtgcatcgcatcatcgccgtcgccgtcgtggcggtactgattatcggctttatggtggtgcacgcgattattaccccgtcagatgggggcgtgtctccggtatccacggcaacggtggaacgtggccatttcgtcgaccaagtcagctccaccggttccatagaacccatcaactccaccgtcgtcgccccgcagatcgacggcaccatcggcgaagtcaaggtgcaggaaggcgcaaccgtcaacgccggcgacgtactgtttaccatcaacaacgacaagctcgatagcgacgtgaatcaggccgatctggctctgcgagcagcgaactcaaaccttaatgccgcccagcagcaggtgaaccaaatcaatgcgaccataggtcaggcacgtaatcaggatggtgaggaaggccaagccgctgccgatgatgcggccggacagctgcccgctgcacaaagcggcgtggagagcgcgcaggtcgccgttcagcaagcacaagccacctatgacgaggcggtcgcccaagccaacaagcgtacggtcactgctccggtctcgggcacggtgctgaccatgagcgcggtgcccggtgccgccatcggagcttcctccgatggctcatccacttccgccggcgcagacggtaaaccattgtgtcagatcgccgacctgagtcagatgaaggtcaatgtcaacatcaatgagctggatatcactaaagtggccaaggaccagagcgccaaagtcacgttctccgcggtgccggggctgacgctcgatgccaaggtggataccatcgccagcaccacgtcgcagttggctgattcctcggcaggcgggcagagtggcaacggcggcgtgggatacgccgtgcgtctcatcattcccgcccctgatccgaaactgaagccgggcatgacggccagtgtgaaaatcaccatgcagagcattgacaacgctttgatggtgccgctcgccgccatcgtggatgagggtaaggagagcagcgcggtcatgctcgagaccaacgccgaaacccatgagttcaagcgggtgcgagtcacggtcaaagccaagaacaacaccaaagccgttgtggaaggcaatgtgagcaagggcgatgtcatcatgcttgatggcgcttcggctgccgacaatactggcgatgctgcttcttccacctcgcaaaccgcggcttcggacgaaagggcacgctgatatgttcccgtttcgttccgacgcgagccgggcaaatcgcggcaaacggcgtaatgagaccattgccgtgcccaccgccacagccaacgtcatcgaggttgaaaacatcaaccgcatcttcgagacaggcgacacctacacccatgtgctcaaaggcatcaccatgaacgtgcgccaaggcgagttcctcgccatcatgggaccatccggttccggcaaatccacgctgatgaacacgctgggcctgctcgaccgcccatcatccggcacctaccgcctgtgcggcatggacgtgcagaatctgagtgatgacgaacgctccgaactgcgcgggtggctcatcggcttcgtgttccaatccttcaatctgctgccgcgcaccagcgtgctgcgcaacgtgatgctgcccctggcctattccgactgcccggtgcgtgaacgggaagggcgtgccatcaaagcactccaatcagtggcgttgagtccggaactgttcgaccgcaaaaccaatgaactctccggtggtcagatgcagcgcgtggccatcgccagagcgttggtacaggacccgccgctgattctcggcgacgagccgaccggcaacctggactccaaaaccggcgatgcggtgatgcacacgttcgaacagctcaagcagcaaggcaaaaccatcgtgctcatcacccacagccccgaagtggccgaacgcgccgaccgatgcctgcacatgcgtgacggcgtactgcgtgaagggatgtaccgatgagaacacgggatctgctggcggaaaccggctccgcactgagggcgaacaaaggcaaaagcgcactgaccattctcggcatcgtcatcggcattgccgcggtgattaccatgacctcactgatcggtggcattcgagactctctggtcggcgaactgggtatgaacgcggcgcgcacgatttcgatttacacggacgtcggcacccttgacgacgaacagatcactgcgatgcgcgaggaactgaccgactacgagtacttctcgccgacgaactatggtgccgcctcgtcaatcgccgcgcccggtaccaccgacaaggtgtcggcgagcatcaccggtgtcgacgagcatttcttcgatgtatccggagtgacgattggtcgtggacgggccttcacatcgagtgaagcaacgagtggtgcaatggtggtgattctcgacgggcagggcgtgcagaagctgttcggcagcgcggacattgacgccatcggcagaaccgtcacgcttgacggcaatgaagcaaccgttgtgggtgtggtcgagtcgtctggattgatgggcggcatgggcggcgacagcgtgaatatctatatgcctgccaccactgtggcgctgcggtttgcgtcctcgaacatgggatacatgcagatctacggactggccaaggacggggttgatatcgaccagctcacggaacagacgaagaccgttgtcgctcgcatcatgcgtatcccaaccgaacagatcgaccagaatctgtcggtcgtaagcgcccaatcctccatcgaccagctttccagcttcatgagcgcattccaggtgctggcgggttcggtggccggggtctcgttgctggtgggcggcatcggcattatgaacatgatgctcaccaacgttaccgaacgcatccgcgaaattggcctgcgccgggcattgggtgccactcggcgtgacgtgaccgcgcagttcctcgccgaatccattgcaatcacagtgcttggaggtcttatcggcacgttgatcggctacttgctgtcgttgggcgccgctggattggtgtccggcatcgccggtggcatgagtatcgcgccagcagtttccgtgcagtccatcggactggcagtgggcatctgcatcgctgtcggcgtgattttcggctactatccagctaggcgcgcggcaaagctcgacccggtcgaagcgctacggcatcaataatcgcgtagcaccccgaaatgcagtagggcattgcgcacaccgtcgtggtccacgtcgtcggtgatgtaatcggcggcggcctttggctcggcggtcgcattgcccatcgcgaccccgatgccggcgtaggcgagcatatccgtgtcattgccgccatcgccgaaggccatggtctgcccgcgcgtgatgccgtaatgcgccatgaaccgctggatgccgcgcggcttgccgccatcggccggaatcagatccgtgaaatccggatgccaacgcaccccgcgcacattgctgcacagtcccaccagttcggcctccaactcgggtccgacaaagggactgatctggaaagtctcatgatccagcgcgcgggtgcgcgggtcctcaaaataccgggtcggtgcggttttgcccagtttgctccacgtggcgcgaagcagatcattggactggttgaagtacacgtaatccttctcgccgaaattgcacaccacatcggggtgacggtccagccagtcgagaatcacctcaatatcagcagtatccaaggcctgcgaggcaaagaagccggtgtcatcaaagcaatactgcccattgaacgccaccacgccatcgaacgtcaccggcatggtatccagcaccacgtgcatctgtgaaggcgcgcggcccgtgcaaatcagcaccttgacgcctgcggcctgcagccggtgaatcgcctcgattgtggaatccggcaccgtatgagtcgtgaaactggtgagcgtgccatcgatatcgaagaatacggctcggatatcggcattggcagtatcggtagtcatagcttccattgtcaaagcccctctcgacgtgctttccggcgtgttcgacacgcctatagcgggttatcaaacgcacgaatcccggccattgcatgcgcgccataaaagacacctatacggcaatcggccattttccgtcactttcgcggttcaagcgcgttatggtgttactcgacatcaattttggagagaggaaatccaatgacagcagcaacccagtcggcaactccggccgctcctaacaataacgagccggtgcgtgtgaaccacaccgtccgcaacgtcatcatcaccatcgtggtcgtggcgattatcgccgtggccgcgttcttcggctaccgcgcgtttgccggtgccaacgagtcgtccgccaagggcagcaagggcaacccggtcaagatcggcgtggtcggcgctaccaaccccgaatgggtcaagttcaagcaggacgccgagaaggccggcatctacgtcgacatcgtcgacttccaggactacacctccgaaaacccggcccttgactccggcgagctggacctcaacgaattccagcacctgctctacttggccaactacaacgtgagcaacaagaaggacctgcagcccatcggcggcaccgccatctacccgctcggcgtgtactccaccaaggtcaaggacatcaaggacctgaagcagggcgacaccgtcaccattccgaacgacgaaaccaaccaggcccgcgctatcggcgtgctcaaggccgccggtctcgtgacgctcaagggcgactggaccgccttctccactccggccgacatcgacgaagccaagagcaaggtcaaggtcaccccgctcaaggccgaacaggtggccaccaccctgaaggacccgaccatcgccgctggtgtgatcaacaacgactacgtggccgacgccggtctcaacccgaaggacgccatctaccaggatgacgccgaatccgaagaagctcgcccctacatcaacgtgtgggtggcccgcaaggcggacgtgaacaacgagacctacaagaagctcgtttccatctaccagcagaaggatgtgctcgacgccctgcaggagaactccggcggtaccgcggtgttcgccgacaagttcagcgccagcgagctgcaaggcttcctgtccgacattgagaaggacgccaaagcccagcagtgagccgtggctgatacgagtgcacgactaacctgtccatagccattaccaccaagcggagcgagtacccgagccaacaatcgggattcgctccgcttccgtgaccggacatcaacaaccagcatcagggagcactatgagcgaccccatcatcaccttcgaccatgtcgtgaaggaattcaaaacacgcggacgcggcgcgaacatcgcacgagccgtggatgacgtcagcctgaccatcgatcgcggcgacatcttcggcatcatcggctattccggtgcaggcaaatccacactggtccggcttatcaacgcgctcgaacgacccacctccggcaccgtgaccgtgctcggcaccgatatcacctctttgagtgagaccaagctgcggcccatccgccagaaaatcggcatgattttccagcagttcaacctgttctccaccaaaaccgtggcgcagaacatcgcctacccgctgcaactcgatcactggcgcaaggactatcaggatcgtcgcgtcaacgaacttctcgaattcgtgggccttagtgagcacgcaaacaaatacccctcgcagctgtccggcggccagaagcagcgcgtcggcatcgcccgcgcactggccactaatccggagattctgctcgccgacgaagccaccagcgcgctcgacccggaaaccaccaccgaagtgctggccttgctcaagcgtgtgaacgaggaattcggcatcaccattgtgcttatcacccatcagatgaacgtggtccagcagattgccggccgcgtggccgtaatgagcgccggacgcgtggtcgaatccggcgacgtatacgacgtgttcgccgcgccccagcagccggtgaccaagcgattcatcgccaccgccctgtccggcctgcccgaggaagaccgggtcgagcgattgcaccacgaatggtcgggccgcatcgtcaccgtgctcatccgccaaaaggacgtttccggcagccatggccacgaactcaaggcatccggacagaacatctccgaactcatctccaaatacggcgtcgaatccagcctgctctacggcggcatcgacacggtcaaggggaccgccatcggtgccatcacctacgaattcaacgggcccggctggcacgtggacgaattcctgcgcgagctcgccgccaatagcgacgtcattgacttcggcaccgccgcaaagcccgtggcttacgccgacgcagttgccggacatgcctcctacgccgaagaccgcgcccatgacccactggcggccgatactgccaccgcgcccgctgtatccgccgccgcacatgaaggagacaacgcatgatcatcctcgccaactcgcgtagcgactggaacgtgctgcgcccactattgttcgaatccatcggccagaccctgaccatggtgctcgtcacccttgtcatcggcggattcctcggcctgatcctcggcgtggtgctctatggcacccgccccggcaacctgttcgagaacgcggtcgtctaccgcatccttgacatcatcgtcaacatcgtgcgcccgattccgttcatcattttcctggcagccatgcagccgctcaccatcgtcgtggtcggcacgtccatcggcaccgtggccgccatcttcccgatggtggtcatgtgcaccttcgccacttctcgtctggtcgaacagaatctcgtgccggtcgacccgggagtaatcgaggccgcgcgttcgatgggtgccggcaagctcaccatcatccgcaccgtactcatccccgaagccctggcaccgctgatcctggcctacgccttcctgttcatcggcgtgcttgacatgtctgccatggccggctacatcggcggtggcggtctcggtaacttcgccatcgcctacggctaccagaagttcgaccagaccgtcacctggacggccgtgatcatcatgatcgtactggtccaggtggtgcagggcatcgccaacgccatcgccaaacgactgctcaaacgccagcaataacaaggcatactgaccccatagatcgcggccctcgccaatatgaagcgagggccgcaatatattcttcgcgctactagaatcgggaaccatgagtgaacatatcgacatcgaccacgaactcatcaccatccgccactacctgcacgcccatccggagcgtagtttccgtgaattcgacaccagcatctatctgaccgaccagctcaaggcgcacggcatcgagatcctgcacaacccgctggagactggtgttgtggggctcattcagggcgaggccggtcccgggccgcgtatcgggctgcgcgccgacatcgacggcctgcccatcgtggaagactccggactggagttcagctccgtcaatgaaggcgtgatgcacggctgcggccacgacctgcacatgaccggtctgctcggtgccgccttctggctcgccgagcaccgtgacaagttcgccggctcaatcaagattctgttccagccgagtgaggagaccggccaaggcgctcgcgccatgatcgacgccggactcgtggatgacgtcgaagccattatcggcacgcacaacaaccccaactatgcgtccggccagctggccatcggcgtcgagccgatgatggccggctgcgtgaaattccgcgtgaccctccacgcccaaggcacccacgccggctacccgtacaagggcaccgggcccatcgaagcgctcgccagtattattctgagcctgcagaccatcgtgagccgcaacgtcacgcccttccacccgctggtgctgtccgttaccgaagtgcacggcggccatgtgtggaacgtggtgcccgccgaagccggattccaagggactgtgcgctatttccacaagtcggatggcaatctggtcggccgccgattcaaggaagtggtggaacacaccgccgaggcatacggtatcagcgccgatgtggtctgggatgatttccaagacccgctggtctccgatccaggtcttgccaaggccgtggcggcggatgtcaacgactacgcgcagctcgaaccgatacgtcagtcgatggcgggggaggacttctgcgaattcgccaaggtgacgttgccggtgttcgcgttcgtcgggtcaaacggccaggaaggttgcgccgactggcatagcccgcatttcgtgggtctcgacgaatccattcccaccttcgtcaacttctacgtcaacgccgccctgcgcgtgctcaacgagctgaggtaaatccttttttggctcccctctggaggctgaggcgttaggcagacagcccaatgggctgtctgcagccgaaggtgaggcgacagccgaaccagatatgcgcgggcctcgcccgtccataagtgcaggacgagctatcagcgaagctgactgaggggagtggcattcgttcattaggtcgattcatcgtccattaggtcggtgaacggcgatactggttgttggaatcgcgccattgcaacgactgatatcgcattgcagtgacctaatgaacgcaaaaacgacctaatgaatgacgccaagccggaagaacaggcaatccgacgccatacgcggctacactaagaagctatgacacagcttcgcttcgcactcgcccagatcgacacctgcgtcggcgcgctcgatgccaacgccgccaaagtgctcgactactcccgtaaagccgccgcagggaatgctcaagtggttgtttttccggaaatgaccctcaccggataccccatcgaagatctggccctgcgccgcaccttccgccaagccgcatgggacaaggccaacgaactcgccgcccagctcaacgacgacggcctcggcaatctgttcgtggtggttggcaccgtgggcactgatcgtaagacctccaagccgcgcaaccgactggtggtattgcatcagggcgtggtctgggccggctacgacaagcacttcctgcccaactacggcgtgttcgacgaattccgtatcttctccgccggcgaccgttccgtgaccctcgacgtggatggtgccaccatcggcgtggccatctgcgaggacatctggcaggatggtggcccggtggccgacctggccaccaagaacatcgacctgctgctcaccatcaacggctcgccgtatgaggaaggcaagaccaacacccgtttcgagctcgcccagcgtcgtgccgccgaagtcaacgccccggtcatctacctgaatcaggtcggcggtcaggacgacctggtcttcgacggtggcagcttcgtggtcgatgccgacggcacgcttatcgaacgcggcccgatgttcatggaaaacctgacgttctgggacttcgattccaccgccgaacatcaggtcaaggccgagatcgttccggaactcgacccggacgaagaggtatacactgcctgcgtgctcggcctcaaggactacatggccaagaaccacttcaccggcgtgacgctgggcctctcaggaggcatcgactccgcactggtagccgccatggcggccgacgcatgcggcggcgagaacgtctggggcatctccatgccctccatgtactcctccgatggttccaaagacgacgccgctgacctggcctccaacatcggtgcccattacgaggtccagcctattgagccattgttcaacgcctaccaacagcaacttgaccttgatggcgtctccgccgagaacctgcaggcccgcatccgcggtgtgatcgtgatggccagttccaattctcgcggcctgctcgccgtggccaccggcaacaagtcagagctcgcctgcggctactcaaccatctacggcgatgcggtcggcggctacgcacccatcaaggacctgctcaagacccgtgtctgggagatcagccgttggcgtaacaaggccgcggccgcaggcgtcggtatcggcgggctcaagatcgtgggcaacgaggacggcaacgccggcatcccgttgaaggacggcgtgatgattccggtctcatccatcgagaaggctccctcggccgagttgcgccccgggcagaaggactccgactccctgcccgaatacgcgctgctcgacaaggtgctcgctgcatacatcgagcacgcgcacggccgcgccgacctgttggccgacggcttcgaccaggccaccgtggacactgtgatgcgattggtggaccgcgccgaatggaagcgccgccaatacccgttgggaccgaaggtcacggccctcgcgttcggccgcgaccgccgactgcccgtcaccaacgcgttcagggaataaacatatattgctcccgccagcgggagcaagtaataccgttgaggaggtaccaatgacagacgataacaagaagcagtggtatttcaacaccgtcaagaagcaggccgagctgggcatggtctcaccgattgaacagcgcatgggcccgtacaagaccaaggaagatgccgaacacgcctgggacatcgtggtggaccgcaacgccagatgggaggaggagaactggcgctggaagaactacggtgtgaaatccgcgcaagcgaacgatgaagactgacggccaaaacagacggatacggttctgctgtcaatctcaagaccgaaccgctcaccaagccgctcatacgaacatcacagtatgagcggtttcccatatctggagacgtgcaatagtcccatcaatacctagaaaccattggaatggtagcgttcacaaaaaacaatgtgagatagctcactcccaatttcggcttttcccaagcaagtgccaactacactgttgaaccaagggttccgtgaagatgcgaaacctacaaccccatttaaggagtgacatgaccgcagtagaaaatgcagctgtctcccaagaggagctcgacgccaaggcatgggccggcttcaccgagggcaactggcagaaggatattgacgtccgcgacttcatccagaagaactacaccccgtacgagggcgacgagacattcctggctcctgccaccgagaagaccaagcacctgtggaagtacctcgacgacaactacctggccgtggagcgcaagcagcgcgtctacgacgtggacacccacaccccggctggcatcgatgccttcccggccggctacatcgactccccggaagtcgacaacgtgatcgtcggcttgcagaccgacgtgccctgcaagcgcgccatgatgccgaacggcggctggcgcatggtcgagcaggccatcaaggaagccggcaaggagcccgatccggagatcaagaagatcttcaccaagtaccgcaagacccacaacgacggcgtcttcggcgtctacaccaaggccatcaagatcgcccgccacaacaagatcctcaccggcctgccggacgcctacggccgaggccgcatcatcggcgactaccgccgcgtcgccctgtacggcgtcaacaagctgatcgccttcaagaagcgcgacaaggactccatcccgtaccgcaacgacttcaccgagccggagatcgagcactggatccgcttccgcgaggagcacgacgagcagatcaaggctctgaagcagctcatcaacctcggcaacgagtacggcctggacctgtcccgccctgctcagaccgcccaggaagccgtgcagtggacctacatgggctacctggcctccatcaagtcccaggacggcgccgccatgtccttcggccgtaactccgccttcctcgactgcttcatcgagcgcgacctcgaggccggcaagatcaccgagaccgacgcccaggagctcatcgacaacatcgtcatgaagctgcgtatcgtccgcttcctgcgcaccaaggactacgacaacatcttctccggcgacccgtactgggcgacctggtccgacgccggcttcggcgacgatggccgtccgatggtcaccaagacctccttccgtctgctcaacaccctgacccttgagcacctcggacctggccctgagccgaacatcaccatcttctgggatccgaagctgccggaaggctacaagcgcttctgcgccaagatctccatcgacacctcggccatccagtacgagtccgacaaggaaatccgttcccactggggcgacgacgccgccatcgcatgctgcgtctccccgatgcgcgtgggcaagcagatgcagttcttcgccgctcgcgtgaactccgccaaggccctgctgtacgccatcaacggcggccgcgatgagatgaccggcatgcaggtcatcgacaagggcgtcatcgacccgatcgccccggaggccgacggcaccttggactacgagaaggtcaagaacaactacgagaaggcgctcgagtggctgtccgaaacctacgtcgaagcgctgaacatcatccactacatgcacgataagtacgcctacgagtccatcgagatggccctacacgacaaggaggtgtaccgcaccctcggttgcggcatgtccggtctgtccatcgccgccgactccctgtccgccatcaagtacgccaaggtgtacccgatcaccaacaaggaagccaagaacctcgaaggccacgagtacgagtacgtcgaaggcgccgacgacgatctggtcgtcggctaccgcaccgagggcgagttcccggtctacggcaacgacgacgaccgcgccgacgacatcgccaagtgggtcgtctccaccgtgatgggccaggtcaagcgcctgcccgtctaccgtggcgccgtcccgacccagtccatcctgaccatcacctccaacgtggagtacggcaagaacaccggttccttcccgtcccgccacaagaagggcaccccgtacgctccgggcgccaacccggagaacggcatggactcccacggcatgctgccgtccatgttctccgtcggcaagatcgactacaacgacgctcttgacggcatctcgctgaccaacaccatcacccctgatggtctgggccgtgacgaggacgagcgcatcggcaacctggtcggcatcctggacgccggcaacggccacggcctctaccacgcgaacatcaacgttctgcgccgcgagaccatggaggacgccgtcgagcaccccgaaaagtacccgcacctgaccgtgcgcgtctccggctacgcggtgaacttcgtcaagctcaccaaggagcagcagctcgacgtcatctcccgtaccttccaccagggcgccgtcgtcgactgatgaccaaccccgcgaaccgcggcaatgactaactgaaggggtggggcacggctccaccccttccttattttccacagactttcgcatcatttggaacaggaggacaactatgcccgcaacacccacgttccgcaccacgaccaggcatatgctcaaggaatcgaagacctatgcctcgcagactttgatgggcggcctttccggctttgaatccccaatcggactcgaccgacgtgaccgcctttccgccctgaaatccggcgatatcggcttcgtccactcttgggacatcaacacctccgtggatggaccgggcacccgcatgaccgtgttcatgtccggctgcccgctgcgctgccagtactgccagaacccggacacttggaagatgcgcgacggcaagcccgtctaccttgacgccatgatcaagaaggtcgatcgttacaaggacctgttcaaggccacgcatggcggtatcaccttctccggcggcgaatccatgatgcagcccgccttcgtctcgcgtgtgttccatgccgccaaggagatgggcgtgcacacctgcctcgatacgtccggcttcctcaacacgagctacaccgacgagatgctcgaggacatcgacctgtgtctgctcgacgtcaaatccggcgacgaggagacctatcacaaggtcaccggcggcaccttgcagcccaccatcgattttggccagcgactggccaaggccggcaagaagatctgggtacgatttgtgctcgtgccgggcctgaccgactccgaagagaacgtcgaaaacgtggcgaagatctgcgagtccttcggtgatgccgtcgaacacatcgacgtgctgggattccaccagcttggccgcccgaagtggcacgaactgcgcatcccatacccgctggagaaccagaagggacccaacgccgccacccgcgaacgggtagccaaccagttcaaggaccacggcttcaccgtgtattaaattgcagggccgaaccgcgcgtaaataccacgattcggcccgttcgcccataccctagagatatggccgacatctacgcatttcctatgggagcgtccaacgacggacgccccgtacgccctcagggtgtgccggatgaagtatgggcagctgtcgaatccgtcagcaccatgaagcgcatccatgacgtgcgctatcgggagattcccgtgccttccaccttggccgattatggtatcggcgtggaattcgaagcgggagagcgtgccctcggcgatgccttttccgccggtcttggcaacgatgccgaatcacgaatcgccacaggctggatcatgatgctttatgctcatgagctgcgcattgaccgggattccaactggcgttgcgtggcgttcgcgcgacttccgctggaaaccgccgaaaacgattctctgacccccggcatgtactgggatgacatgtgcgactatttcgacggcatcgagccggattcggtatccggcacagtcaccgtgacccaaaacacggcttttggttcgatggccggctccaccagcgccgggtgtgagattcgcgtctcatggaccccgcttgacgggaccggaccggacggtactatggacgccggcgcacaaatccgctcgtgggccgcattcatcagatccaccatccgttttgaggaggatgacgccagttgagtgacgtccgtgacaccgaaccccgactgctgaaagagcctcgcgggggagtgcccgatgtcacttcgtcgctggatggctatcatcgtgcctgcgatgcgctggccgaggcgacgggctcgctggccgccgacgccgaacgggcgtccggattccgctatggacatgaggattggctgattcagttcaaacgtgaaggtgcgggcatcgccttgcttgatcccgtcgccctgacacgggccggagctgactggaatgaattcaatgacgccgtgggcgatgctacatggattctgcatgattctctgatggacttgcccggattcgccgaaatcggactcaaacccaaggccttgttcgacacggaaatagcggcgcgattgctcggcctgcaccgcttcggtctggccgccgtcaccgaacactacctcggcatcacgctggccaaagagcattccgccgccgattggtcctaccgtccgctgccgcgcgactggcgcaactatgcggcgctcgacgtggaggtgcttatcgaactcgaaaccttgatgcgtcgtgacctgaaagccgcaggcaaggacgagtgggccgctgaagagttttctcacgctttggttgcgggccttgccccgcgcaaacctcatccgattccttggctgcgtatctcgcgcatcacccagctgagtcgtgatccgaggggcttggccatcgccaaatccctatgggaggagcgcgaccggctcgcccggcgatacgacatcgctcccagcctgttattgaccgattcgtcaatcatcgaggccgcgaccaacaagccgcacaatgccgcccaattccgcgcactccgatccctgaacgagcgtgtgcgcattcataccggcaccgagcaggacaaaatgttcgagcggtacgcgccgattcagcgtacggtcaagccgaaggtctggaagcaggccatcgaccgcgccatggccctgaagcccacccaatggcctaccatgcccgcccccgaacaggacgaaaacggtgtggtgaacgcgccccgatccatgcgactgtggcaacagcgccatccggagcgttatgaccgtctgcagcgggtacggcgtgtgatcaaccgcatcgccgaagacacccgcacgccggccgagatgatcatcaagccacagatcctacgcaacctgtgctgggtggaagacccggtggaagtggacgtcgagacgttcctgatcgagcagggcgcaagaaactggcaggtgaaactcattgcaccgtccgtaagtggcgttatcatgtagaggttgccttacggcagaactgtaagaaataacgacttttgaggagtcattagcgtgaagatcagcgttcgtaacctcgagcccaccaaggtgaagctcaccgtcactgttgaaccggaagagctcaacccgtatctggatgcggcccgtaaggaaatcgccaagcaggtgaacgttcccggcttccgtaagggccacgttcccggcaagatcatcgaccagcgcatcggtttcgccgccgtcgccggtgaggccgtgaacgacgcggtcccggagctgtactccaaggccctggatgagaagaagattcgtccgatggctcagccggagttcgacgtgcaggatgttccgcagtccgccaacgacgaaaccaagctgaagttcaccgccaccgtcgagcgtcgtcctgacatcgaactgccggaaatcgacggtcttgagatcgccatctccaagccggaagtcaaggatgaggacgtcgacaagcgcctcgagaccctgcgtcagcgcttcggcaccttggtcggcgtggaccgcccggccgccaagggcgacttcgccaacatcgacctgactgctgagattgacggcgagaccgtcgactcccaggaaggcgtgagctacgagctcggctccaacaccatgctcgacggtctggacgaggctcttgacggcctgtccgccggcgaggagaccaccttcgaaggcacgctggaagccggcgagcacgagggccagaaggccaccgtgaaggtcaaggtcaactccgtcaaggctgaggaactgccggagctgaacgatgagttcgcttccgaagcttccgagttcgacactctggacgagctcaaggctgacatccgcaaggctgccgctcaggacgccgaaggtcgtcaggccaccgaggctcgcgatgccttcatcgccaagctgcaggaaggcctcgagatcccggtgccgaagggtgtcaaggccaacatggtcgaagagcagctcaagggcatgaccccggacccggagaaggccaccaaggagcagaaggctcaggccgaggagaccgtggagaaggatctgcgcgatcagatggtgctcgacgctctggccgagaagctggacgttcaggtgtcccagtccgacgtgttcaacttcctcgcttccatcgcccagcagtacggcatggacccgaacaacttcatccaggccatcatcaagaatggccagcttggctccgctgtgcaggaagtcggccgttccaagggtctgctcgccggcatgcgcgccgtcaagttcaccgctgatggcgaggttgtggacctctccggcttcctgggcgaggccgctgaggacgaagagtccgagtccgtcgaggccgcttccgctgctgccgccgtggccgacgaactgtccgccaaggatgacgccaaggacgctgagtgagcatagcctcatcgcgttagcgtgattgtttgagcccggaatcgtgtttcacggttccgggctcttcctattctggtaaaaggactatttctttggctcccctttggggggagctgtcgggcgtagcgagactgaggggagttcccaaggcatactcgttgcatagcgtgcggaggttgacatgcagccaacggttactatcaaacgccttggttggctcgctgcggcgaccattgtgctcggcgtgctcatcggtgtgggagcaggtctgctgaccctgttgatctacggcgttgaacatgtgctgctcggctacatcgaaggcccagaattgtctggtccattcggcgtgcccgctgcacgccgtgtgatatcggtgaccgtgggactcggcatcgcgggcattatctggtatctgctacgacacaaaacgactgtggtgccctcagtcaagaaggccgtggcgggaaagcgaatgcctttctggcaaaccattgtgcatgtggtgttgcagattttcatcgtcggctccggtgcctcgatcggccgagaagtcgccccacgcgaactcggcgccatgatcgcgcaacgtttttgcgacctgttccatatcgagggcgttgatggtatcgaccggcgcatggtggtggcagtggctgccggtgccggtctaggaggcgtctatgacgcgccgctggccggcatgttcttcgccgtcgaaatcctgttggtggatgtgacgatcgaaaaggttgcgtttggactgggcgtgtctgccattgccgcattcgtggcggttgcgatcaaagggcattgcctgttctacgacatcaccgccatgcaaccggaatccacgccaacgttaatgctgttcgctctgatctgcggtgcggcatgtggagtgggcggcgcattgttccgaaaaggttcgcaatgggcggaagcgcacaagccgaccggcaaggccattctgtggcagatgccgctggctggtctcatcaccggtttggtggcgattgttgtgccgcaggtgatgggcaacggccgtgccgcagcgcaacttggattcagcacgttcattcctgaaaccgccggcactgctggtgccatgcagtcggcatcttcagcggccgcctctccatggaacttgctgacgggcggcggtaatgtatccgattcggcctctggcgggggagcgggctctggaatggcctcgttttgggccatgcttcagggtgggagcggctcttctggatccgtgatgaacgccggtttcccgctgtcccagtccaatatctggatgttgctgggtgtgttggcactcacctttgtcgccaaggcgctggtgacgctgatgaccattcgctccggtgcatcgggcggtgtgctgcagcccggcatcgcattaggttccacgctgggtgcgatgctcggcctcgtatggatactgatgtttccgactgattcggtaaccgcgtgtgccttgatcggtgcggcttcgttgctttcggcctcacagcaggcaccgcttatggccatgtgcttggtgatggagctgaccgaagcgccgattaccttcttcgtgccagtcggcatggccgtggccacgtcgtcgttgatatcaaagtggttgctgagtcgtaagtaagtagatgcatatattctggctcccctctctgaggggagctgtcgaacacggtgagactgaggggagccgaggtaaagaaagctatgtcagaaaacaccgaagtccgtgcggcacttgaatcgcttgccgctgagccgctcactgagcagattgactactatcgaaagccattcatggtgttgtgggccgccattcaggaggccgccagcgatgtggccgaagactacgacttgcctgcggatatggcccaattatgggtggccgaacagatgcgccaagtcgccgattcactggtcgatcggctcgcggaaaaagccgtggcccatggtgccagcaagtccaacgtggcgcgagccgccggtgccagccccgccaatgccgcccgtcgcttcccgcgtctgggcgacgatgccgcctcccagacccgcctcctcattgatgacgtcctcgacaccttggaataacccgaaatccctacgctacccgccaaaaagcacgcgaaaagccgccttcagtcgcttcaaggcggtagtctgaacaatgttcgagtaattagaaggagaatcaaggtgagcaatacctttgcgaccttgccggtcatggcgggcgatgacgtcccggccggccccgtcgacccgattttcaaccgtctgctcaaagaccgcatcatctggatgggtgaagaggtcaaggacgatatggccaaccgcatctgcgctcagctgctgatgctggccgccgaggacccgaagaaggacatctggctgtacatcaactcgccgggcggctccatcaccgcaggcatggccatctacgacaccatgcagctcatcgagcctgacgtggcgaccgtgggcctgggcatgtgcgcttccatgggccagttcctgctgagctccggcaccaagggcaagcgttacctgacctcgcacgcccgtgtgctcatgcaccagccttccggcggcatcggcggcaccgccactgacgtgcgcatcaacgccgagctcatcatggacatgaagaaaaccatgagcgagctgaccgctgagcagaccggccacaccctcgaggagatctaccgcgacaacgaatacgaccactggttcaccgcccaggaagccctcgactatggcttcgtggacaagctcgtgaccacgccggacaccatcggcaacaaccagcagggggagtgagactcatggcaagtgaagaagcaaagttcgccgcccgtgccgaccgcttggccggccgtcatggcgtagccggtttcatgccggccgccgcccgcgcagcccagcccgcgccgaccaaccgttacatcatgccgcagttcgtggagaagaccccgtatggcatgaagacccaggacgcctactcccgcctgttcgaggatcgcatcatcttcctcggcgtgcaggtggacgacgcctccgccgacgacgtgatggcccagctgctggtccttgaatcccaggatccgaaccgtgacgtgatgatgtacatcaactcacccggcggttcgatgacggccatgaccgccatctacgacaccatgcagtacatcaagcccgacgtgcagaccgtgtgtctcggccaggccgcctccgccgccgccattctgctggcctccggcaccaagggcaagcgcctgatgctgccgaacgcccgtgtgctcatccaccagccggccatcgaccaaggattcggcaaggccacggagatcgagattcaggccaaggaaatgctgcgtatgcgcgaatggctggaggagaccctcgccaagcacaccggccaggatgtcgagaagattcgccgcgacatcgaagtggacactttcctgaccgctcctgaagccaaggaatacggcatcgtggacgaggtgctggaacaccgccagtaaaacttccgaacattgcaataccctcggtcggcaacgaccgggggtattgtatttcaaggatgacaatgataatgcgcagcgtggcggttcgacggtgcggcgcggtcggcaaaggagaatcatgggacgtgtggtgagctacaacgaggacgtaccccgttgcacgttctgcggcaaaaccgaacgtcaggtcagaaaactggtggccggtcccaacgcctccatctgcgatgaatgcatcgccctgtgcgtggacatcatctccgaggagcgtgtcaaagatgccgaggtcaattcgctgagcctgcccaagcccgctcagatcttcgattatctcaaccgctacgtcatcggtcaggagaacgccaagcgcgcattgtccgtggccgtatacaatcattacaaacgcgtcaatatggagcttcaggagtccgctgagcagcttgacgggaataacgggcacggtggccagaccggcaaacaagccaagcaatccgctcccgcccagacgcgtgctacccgccgcaacagtgaccctttggctgacgttgaggtcgccaaatcaaacattctgttgctcggccccaccggtgtgggcaaaacctatcttgcacaggcgttggcccgcgtaatgaacgtgccattcgtcatcaccgacgccaccaccctgaccgaggccggctatgtaggcgacgatgtggaaaccgtgctccaacgtcttctccaagccgcggatggcgacgtaagccgagcccagcacggcatcatctacattgacgaaatcgataagatcgcgcgcaaatcaggtgagaacacctccatcacccgtgacgtgtccggtgagggcgttcagcaggcgttgctgaagattttggaaggcaccatcgcctccgtgccgttggagggcacgcgcaagcataaggagcaggacactgcgcagatggacacacgcggcatcctattcatctgcggcggtgcgttcgtgggactgacggatattgttcgcaagcgattgggccgtcgagagaccggcttcggcgcgaattggcacgacgccgacatgaaagacgaggaattgctcgaacaggtcaatgccgatgatctggccgagttcgggctgttgcctgagttcatcggacgtttgccggtcaccagtgtgctgaaggaacttaccgtagacgatctgacggcgattctcacccagccagccaacgcgctgatcaagcagtaccgtaagctgttcgccgtcgacggcgtcgacctgcagttcaccgaacaggccattcgggcgattgctgatatcgccatcaagcaggggaccggcgcgcgcgggttgcgttcgattatcgaacgtacgttgcaggacacgatgttccagttgccgagtttggatgatgtgaagcaggtgattgtggacaaggcgtccgtagagggttccagtacgcccaaactcttgcgcgaagccgtggatgtgccgcagggacgcctcaaagttgcgtagtcggttttgcttgaccgagtccgtacacatgcggcgtgaggccagtaaatacgccgttgcggtggcgattaggatggtgcgactcgccgcaacacgccgagttgcattcatctgaacggcgtgtattatatatcgagttgtctgaaaagacaacatgcgccagtagcccagcggattagagcagctgactacggatcagcaggtcgcaggttcgaatcctgtctggcgcactcccgaaccacggggacaacagtggtatgcgccagtagcccagcggattagagcagctgactacggatcagcaggtcgcaggttcgaatcctgtctggcgcacagtaagcctcgaaagcgaaatgcttccgaggcttttccaattgtattggcccgtttgagtcggccacacaggggtggggtaaggttgcccttcgcgactcagcccggagcggaacgtcctgagatattccgtactattacatacgattcatccaagagagtacagcaaggagacgcgatggccacgaccgccggcgcgaagaagggactttggtccaccatcaggcgaatcgccgcctcagaccgtatttccggactcatcatgctcggcttcgcgctcaccggcctggtgctcgcgaacctgcccgccaccgcgcatgcgttcgagaccgtagcggaaacgcatctgttcatcccctacaccaatctcgacctgccgattggccattgggcccaggatggtctgcttaccatcttcttccttaccgtgggcctcgaactgaagcaggaactcaccaccggctcgctcgccaatccgaaagcggccgccgtgccgatgctgtgcgcggtgggcggcatgatcgccccgcccatcctgttcctggccgtcacggcattgttctctcagatcgggcctggtgaacccggcacgctgattctgaccaccaccggcagcagcattccgttctcggagatgtcgcacggctgggcagtgcccaccgccacggatatcgcgttctcactggccgtgctcgccctgtttgccaaggccctgcccggttcgatccgcgcgttcctgatgacgcttgccaccgtcgatgacttgctggccattattctgatcgccgtattcttctcctcgatcaacgcctggtattggttcatcggcatcgccgtatgcgccgccatctgggcatacctcgtacgactgaaaaaagtgccgtggatcgcggtcggcatcgtcggtatcctcgcttggatcatgatgttcgaggcaggcgtgcaccccacactggccggcgtgctggttggcctgctgaccccctcccgtgaaatgcacggcgaactctcaccgcgtgccgaacgctatgccaacaagcttcagccattctccgcactgctggccctgcccatcttcgccctgttcgccaccggcgtgcacttcgagtcgatgagcccgctgttgttggcttcgccgttggttatcgcactgattgtggctttggtggtcggcaaacctttgggcatcatcaccaccgcatggctggccacgcatgtgggcgggctcaagatggccaaggggctgcgcgtgcgcgacatgattcccgctgccgtcgcctgcggcattggcttcactgtgtccttcctcatcgcctcgctggcgtacaagaatgcggaactttccgctgaggcgcgcttcggcgtgctggtggcctccctgatcgccgctgcgatttccggtgtgctgctgagccgtcagtccaagagattcgagaaggccgcagccgcagcagcggccgatgcggaggatgacgaatcgattgatggcgatggcgctggtcagaccggtcgcaccacaaagtccaccacgcccacggaacaccccggcaccctcgccgacggcaccgccagtgtggagattgacttccgccactgatggcttagacgatccctactccattgttggccttgtttcgtgaaaaccgtacgctgaggcgcgctcaccgtacgttcttcacgagatgaggccttatttcgtgaaaaccgtacgctgagtgtcactcaccgtacgttcttcacgaagtcaaggatgatttcgcggaaaacgtatgcagagcttcaggcgctagaatgcgaagagtcgatagcaccgtacaggaggatattggatggcaaagaagcagaagaaatccaagaagaacgacggcaaaaaggccgctgaagcaaagaatccagctgaggccgcatccaagtccacagtcgtggacgatatggaaccattggaagccacagccgcgaatgatgcggcaacgttggaggccgagacggcaaccgaggctgccacaacgccggtgaacccggtcgacttggagggcgtctcgccgctgggcgacacctatcatcgcggcccggtgattctacgcggccagatgattccctcggacaataccaccgccaatctgctgaaacccgaccaggacaccgactggctgcacatggacccatggcgtgtgctgcgcatccaatcggaattcgtggacggtttcggggcgctcgccgagctcggacctgcggtctctattttcggctccgcacgcacccagcgcaccgaatcgatctacaaggcggcccggcgcatgggtagccagatagccaagcgcaacatcgccgtcatcaccggcggtggtcccggcatcatggaagccgcgaataggggagcggcactggctggcggcaaatccgtgggactcggcatcgaattgccgcacgagcaggggttgaaccagtgggtgaacctcggcatgagcttccggtacttctttgtgcggaaaaccatgttcgtcaagtattcctccggcgtgatcgtgtgcccgggcggcttcggcacactggatgagatgttcgagctgctgaccttggtccagacccacaaggtggcgaatattccggtggtgctctacggcaaggaatactggcaggggctctttgactggctcaacggtccggtggccgagcacggcatgatttcggcaatcgacccgaaactggtcaccgtgaccgatgacgccgacgaagccgtggaggtggccgtcagtgcaattgtgaggtaagcgagatagagtggctcccctctccgaggggagccaagggcagagttactttttgtaggcgatgagcaggcctgtgccgtcaggggtaagcgtggactcgaaaccttcgtcatcttcgacggtggtgagcagctcacgcatggcgatggccttgtcgctgcggtcggccggattaatcatgccgccctgaccgtcctccaacgccagcacatcggtgaacacgatcacgccgtgcgcgcgcagcagacgggaggcctgggcgaacgtggcggcatagttctcggcgtcgcccgccaccacgatcagatcgtaatcattggcgttgaggcgcggcagaaacacgctggccggggcgttcaccgcacgcaacgtggtgtcggtctcatcctgcagttcggcgaacgccttgcgaatcagcgcgatgccctgagcggtggaatcgaccgcagtcagcaggcccttgttatccagcgcatgggcgagctgcaaggtctccaccagcgagccggtgcctacggcgatgaccgaagcggcgtcggtgatgcgcaccagcatgcccagcagacgggcctgcgcggccgaaccctgcaactggccggacttgtcggcggccgtacgggcgtcggtcaacgcattggattcacgttcgcgcgcgtgttcctcggtgaattcccatgccttggcgaggttggtgtactgcgttctgtccataattcgttcctttatgtcttctctcgtgcgggcacccggtggatgtatcgactacgtgttgcagcgattgccgtagctggtcgtggcgcggcttagcgctcgcggaccttggccacgatctgccacatctcctcgcccacatcgatgccgcgcgggcagtggcgggagcaggcgcgcacggactggcaggcggccacgccgtcggcggtgtcgatggcgtccatacgctccatggccttggtgtcgcgcgaatcgttgacgaaacgggaggcccaaatcagcgaggccgggccgatgaaagcgtcgccgccggcgtacaccgggcaggcgccttcgcacacgccgcaggcgatgcagttgctcagcagctcgtatttggcgagttgttcggggttctgcaggtattcgaacacgtccaccttgccttcggcggtggtggcgagcacgccgtccgcctgaagatatggggtgagcttccttatttggttgagcatcgggtcgatgtcggcgatgaggtcgcgctgcggcgggaagccgggcagggatgccagttcgatgactcccagcgagccgtttgcggccgagtcctggtcggctgccgcgtttgcgtcgttttccgcggaatcgtcggattcttcggactcggtgccggtgtgccggaacccttcgtcatcgacttcggggatggcgccgggctgcttggcccaatcgcggatggtggccgtgcacagcagggtgggggtgccgttgatggccacggcgtccgaaccgcacatgccgtgaccgcacgaatagcggaaggccagcgtcgggtcgacggtgcgtttgatggtcagcaggcagtcgagcacggtgtccgaggggcgcgcgggaatcgtgtattcctgcacccactgcttgccgcgcggacgacggcgtgccgccgaatccgagccgccgccgaatggggagcttttcttggcgaacgggctgccgccgcgtgcacgttcggcgcgctcgggtcgcggcgtgaaacgatgcacttgcagggtaaccgtcgtgttgctcgcctcagccatgttctgcctccatgaaacagtgggatgtcaagtccaatatcagccaacctattgtgccacaagccctaggcggcttggtattaccaccagcggatcagtactcgcgcttcttgggtggatagtcggtgatgtgcaccggcttgaaacttgccggaccatcatcggcgaccatcgagtgagcaaggaaatgctcatcgtcgcgttcggggaaatcaagtcgttgcatggatccgcgggattcctgacgggattcggaagcgtgcagcatggcctcggccagttcgattagatgacggacttcccagatggcggtgacctcctgattgaaagcggcggtcttgtcatgggcccgcaaggtatcggcaaccggtgtgatgtcgttgttgatctgagtcaacgccgtatcgatggtctgagcggtgcaacgtacggccagagcctgctccatcactgatccgagttgggccatgagctgataaggattggcggtgggcccgccatcgtctgaatcgtccatcggtccggcgagcagttcgtcaagctctgccttgcgggaatcggcagcctgatcggcggcatcggtcagcatgtcatcggtcgaatcatcggccatgggggagtcaaccgggttctcgacgatgcgtgcggccatcgtctgaccagcacgtgtaccgaacaggcaggcgtcgagcagagaattgccgcccagacgattcgcaccatgtacggagacacaagagcattcgccagcggagaacagtccatcgactacctgcacggcaccgtcggcccaacggtacacctcgccattggtggtgatggggatgccgcccatcgtgtaatgcgcagtgggcttgataggcaccaggtccttggccggatcgaggttcgcgtactgctcgatggtttcgaccacctgcggtagcacttccttcatacgttcgggatcgatgccggtcatgtccagccagacgcagtccttcggaccatccgggtccttcgggtcggcgacgccgcggccggcgtcgatctccgccatgatggagcgggagaccacgtctcgcgcggccagatccctatgctccggggcgtagcgttccataaacggctcaccgtcggcgttcctcaggatgccgccctcggcgcgggccgcctcggacagcaggatgccggtgtgcgcgagcccggtggggtggaactgcacaaattcgatgtcctccagctgcaggccggcggccaaggccaatgccatgccgtcgccggtcaggtcccaggaattcgatgtggtatggaacagtcggcccgcgccaccggtggcaagaagcacgttgcgcgcgtggatggcctgaatcttgcccgaatgcgtgtcaaatgccacgatgccggccgcctgcttgccgtcgtcggcgagcaccaggtcggtcacataccattcctcggcgaactcgacgccggcggccacgcactgctgccacaaggtgtgcagaatctggtggccgatgcggtcggccgcataggcggcgcgcttgaccggggcaccgccgaactcgcgcgtgtggccgccgaaccggcgctgggcgatatgcccgtcatcggtacgggagaaggccacgccctgacgctccaggttgatcacggtctgcggcgcgtattcggcgagcagtttggccgcgtcctggtcgacgagccagtcgccgcccttgatggtgtcgtagtaatgccagtgccagtcatcggactccacattgcccaggctcgcggcgatgccgccctcggccgaaccggtgtgcgaacgcagcggctgcagtttggagaccacgaggatcttcgggtccacgccttgttccttgagctcggtgattttgggggagcgcagcagtcccaacgccgccgacaggccggccgctccggcgccgacgatcaccgcatcatacatatcttccaaacgtttcggactcatgggttcgattctcgcacacccgccgaacagtcttcgagccgtgtcatgaaagccgattagccgacacggctgctcagcttgagtatgccggcatcccgctcgatcactcccttcagctccaatgcgccgagtagctcaagtatggtgccgatattgggaatctcgtcgggtaccgtctctcgcgccacacgcaatagtgcgtccggggtgacgatgagatgtcgtttacggcattcacgaatcaatgccactaatgtgcgttccatttccggcagcttggcgataatgatacgttgttgggcttccttctcgggatcgagcttcggcttgacacgaagatccggcatctgatgcgacgagggcggctcttcacccttgctcttgttggcaccggcctcggcagttgcgctcgccggcccatccttggattgaacgagtgtaggctgagtatgcttggtcctaagacgtttcgaatgacctgaatcttgtgacgactcctgtgacgccgatgattccgaggatgctggcgataacggagtcgttgccggcacttccatggcctcctcgttttcggacgagtcctgacctgtggatttcggtatgcctgggcatgccgccataacgggcttatgccgttcatggcatatatcctcagtggatgtggcggcacacagaatcatcgcccggtggtcgccgatcatcttattgcacccggcgttgcaaggctgattgatgtcaccgggaaccgcatacacttcgcgcagcaattcgcatgcccatcccgcggtgttgagcgctccggaacgcaaccgggcttgcgtcacaatcaatgtggaagacatggccgcgataatgcggttgcggagtagaaaacgacgggcttcgggaatcgtccctgggcacagttcactgatcagtgcaccaccctgcgcctcgatacgttcgaacagcgtgcggttacgcatcggtccgatatggttgagcccgccggcgaatacggcaacggttctgcccacattggcgggcattctgccgtgcagcgcattcaacgctccccaatgtgccgccgcatccgtgcccattgcgcctccggacacgaccagatgcccggcaacgactgcctgttcggctacggtgtgtgccacataccggccgtattcggtcacgtcccgtgaaccgacgatgccgaccggtttggcgcaactggtcaatgcgcgtggatcgcctttgatccacaaacacagcggtggcgcccaatcggagcgaatggacaggtcggccaactgcgagggccaacatggatggccagggccgataatccattgcgtgccatccatagtgaaccagtcggccagttggatgatgtcttgcgagggcaggtccatcatgcggttatgccagccggccagtgcattgcggaaggagcgcatcgcgttcgccgacgccttgcggccccatcgagtgaggccgtccacgaacatgcggtcaatacgtgacagcgccgggccgcagattccagatggctggcttggatgggattgcgccaacgcgtgccagagggattcggcgctttccgcgcctttgagcgtggcgtacatcatcacatccgccccatcaagacagaacgtgagcgcggcgcggtataacgtatccgtgggaggcatgggaatggtgcgcgaaacagcgaggcccgtatcggtgtgatccacactgcctgcggtgccgccagattgtcggatatcagtagcgttactcatgtcatcctcgttctcattccgatgccctgatggacgtcctgctcggtgggggatacgcggccggccagatcggcgagcgtccaagacagacgcatggcgcgatcggccccgcgcaatgtgagttgatgattggacagggcccgattgaccaattccatcgctttcagcgacgtattggcgtgcagccattttcccgaagcttgcgcgttgcacacccatccgtactgtctgaaccggtccttggccacttgacgggcgcgaatcacacgagcttgtattccggcactggactcgccgattggttcgctttgcacggcaatgcgcgagaccggtggcaccgccatctgaatatccacacgatccaatatcggtccggacaatcgcgagaaataacgtatacggtctttttcccggcaagcgcaacgttcgccggtgccgtaatagtatccgcacgggcaggggttggccgccatgatgagttggaatgaggccgggtaataggtgctgccttttgaacgggaaagcgccacatacccggattccaatggttcgcgcaacgtctgcagggcgcgtgcgctgaattccggtgcctcgtccaggaacagaatgcctcgatgcgcgcgcgtgatcgcgccgggaacggcgatgccgctgccaccacccaccaaggccgccgtgctggaggtgtggtgcggtgcctcgaacggcggcatgtcggtgatgccgtactgaggcagtatgccgcacagcgaccgtatcgatgctacctccagttgttccgcctcgttcaacgggcacatgatgccgggcatacgtgaggccagcatggttttgccgctgcctggcgggccggtcatgatgagattatgtccgcctgccgccgccacttgcagcgcccatttggcatgttcctgacccagaacctcgttcatatcgccacaatcgttgggatggcttgtgggcgattgatccatggtggtctcgtcggcaaccggtgtatcgggaatcgtataggtggcatcgccgcccatcagttcgatgagctcacccacatgcctcacgcccactacatccagtccatccaccattgaagcctcgtcaagattgcgatggggaacaatcattttgcgcacgccacgttcctcggcatgcagcatgatcgggagcagcccatgaatcggcagcaccgagccgtcaagattcacttcgccgagcacaatggtatcttctaggcaatcatgccctatggcacccgccgcgcataggacgctggccgcgatggccagatcatgcgacgaaccacgtttgggcatggccgcagggctcatgttcacggtcacgcgggtttgcggccaaccgaatccagtggcttgacacgccgatttcacgcgctcgcgggcttcggacaacgatgcatccggcaatccgatgatgctgaagtatggcaagccagggctgatgaaagcctgcacttggacgatgaaggccttaaggccgatcagtccgactgagagagtgctgccgatagccatgtctactcctttcgcaatgtgtttcgcaacgtggctgttttttttgggggacgaattcagaaggcgttttcgatgtgatgcacgagcggtctgcccacccgaagcacgatggtgacgacatcgaaacggactgccgtatgcggcacacgattacgccggtcaagcagccaatcgcaggcggctttcctgagattgtgctgtttcgccggcgtgatggcctcttgcggatatccgtaatgcatggaccggcgtgatttcacttcgacgaacaccaccgtgtactcgggattgagcattacgatgtccaattcgccgtaacgggtatgccaattgcggctcaaggtcgtccaaccgtgttcctccagccacgcggcggcatactgctcgccgagcgcaccgaactgtttgggcgtcagattgcggtcgcccatcgtggccgcaatccgttccgaaggcagcgttgcctgcggatcaggtgaagccagcatgggctggtgaaaggcaagaccggcgtcgatgccggacttcgtcgtcggctgggta

SEQ ID NO: 1060 - DNA, 13920 bp, Unknown
  R13_10m  MAG No. k141_4052
gctcgcggccaacgcgatgaccgacgaacgactcgagcgcctctaccggcaggcatgggaaaggagcccgcaaggccagtacgagacgttcggcatccccgcaagatacggcaccggcatcgactggaacgagttccacacacgggtcgaatggcagtcgaacgactagaccgccggacacacattttggcctataacccccttacctcgtattgcaatgccccggtgacatgaaaaacggcggtcaacacggggcttgtacattaaggatacaggaagggtagttataagttgctgatatgccgtgttttttacgatagtcatcggcctctcccatacggcggaacaggaactgacggatgccgagatgccgtgattcggcgggaggacctgtactggcccagtccttctgctcggtagcggtaccgctacgccgactcttcccgacgctccagtgccgccgatatcagtgaatgcccagcctgatgtcggtagagttaaggctattggcttggtctcgacggtgagacttctccaatggccaatatgcactgttgcaaaggagtatgcggtatgcaaccaatcaaagccattcaatacggctgcggcaaaatggcgaagtacacgattcgctatatgcacgagaaaggcattcaaatcgtcggtgccatcgacgtgaatccggaagtcgtgggcatggatgccggtgtgtttgcaggcatcggccccatcaatgtgccgattcgcgccgatgccgaggctgtactcaacgagtgcgacgcggatatcgcggtagtcacgctattcagcttcgagaacgaaatcgccaccatgtgcgagcagtgcttggcccgcggcatcagcgtgatcaccacctgcgaggaatgcatctacccgtggaccaccgatccggccaccacgaaccgtctcgacatcatcgccaaggaagccggtgccaccatggtcggctccggcatgcaggacatctactgggtgaacatggtctccaccgtcgccgccggatgccacagcatcaagaagatcaccggtgcggtgagctacaacgtcgaggattacggcctggctttggccaaagcgcacggctgcggtctgaccgccgaggagttcgaggccgagcttgcgcatcccgaaaccgtggtgccctcgtatgtatggaattccaatgaagcgctggcccagaagcttgggcttaccatcgcatcgcagacccaggccagtgtgccgtatttcagcgatgtcgacgtgtattccgagacgatggacgagacgattccggtcggcaaatgcatcggcatgtccgccgtggtaaccaccgaaacgaatcagggcatcacgttggaaactgcctgtatcggcaaggtgtacgggccggatgatggcgatatgtgcgattggaagatcgagggtgaaccggacgtggagttccacgtggtcaagccggcgaccgtcgaacatacgtgcgccacaatcgtcaaccgcattccggacgtgctcaacgcgccagccggatatgtgacggtcgatcagctcgatgaaatttcatatctcacgtatcccgccgcgctgtacgtggcatagacccatattttcagggatgaaggccggcactcataagggtgccggccggtatcaggcggccagagtcgacgtgcgtggcatcacctggaactggatatggtcatgggtgatgtcatcgggccgttcatgccgtaggttcgactcgatcagcgtcaccatgcgatcgataaccgtacgagccattgcggggacgtctatcgccacagtgctaatgggtgggttggcgcagtcggagaaggggatgccgtcgaatcccatgagccgtacgtcgtcgggcacgcggatgccatgttcggtgagttcgcggagcgcgccgatcgctatggtgtcagacatgcacaggatgccacaatcgcccgggacaggcgtcaggaccgcaagcagcatcctgctcggcatcggcggcgacatcgccaacttcaaaagcgcggcccacctggccgcccacgccggcatcgctccggtcaccggccagtccggcaccagcatcaagaggcgagaaaccctccagacggggcaacaaacgcttatagactattgcgccttgtataaatgcgaactgccagtcaaccttaccgttgactggcagttcgcatttatcgctcccgctggcgggagctgtcatgcgaagcatgactgagggtggtccacagccgccaatccgtaacatcacccaacgcagcatttcacgatacggacgtttccgtatcgtattttcgtgtggccaaatagacatttcgggcgaaaaagttcgaaatacccccataactggccataaaaacaattgcttgagaatcactattgacttttatggcgactcggtatatggacacgcgaaacgaaaatgacatggagcaacggtactgtgtcaacagcaatgaacgaagaggcacgattcccttacgtgcccacaagcaattgaggtgattccggtgacattcaaagccccgctcgatctcacggtccacgctccggacggtatgtatgatcccgccaacgagcatgacgcctgtggtgtgggtatggtcaccactttgaacaagcgtcctgaacgcaaaatcgtcactgacgccattgaggtactggtcaatctcgaccaccgcggtgccgtgggtgccgaggagaacacaggtgacggcgccggcattctgatgagcatgccggatgagttcatgcgtgccaccgtgcccgccgaactgcccgaagccggccactacgccgcaggcatcgccttcctcgaccgcgacatcgaaacctccggtcagcaggaacaggccattgccaagatcgtgcgcgaggagggccttgaagttctcgcatggcgcgtggtgcccaccaacccggacggcctcggcctgcaggcccttgccgccatgccgggattcaagactctcgtggtcgcctctccggacggtgctctggccggcgtggacttggatcgcaagaccttccgcatccgcaagcgcgtcgagcatgaggtaggcgtctacttcgcttccctgtccgcccgtaccatcacgtacaagggcatgctcaccaccatgcagctcacccacttcttcgaggatctgaacgacgatcgcatgaaggccaccatcgccatcgtccactcccgcttctccaccaacaccttcccgagctggccgctggcccagccgttccgtctgctggcccacaatggcgagatcaacaccattcagggcaaccgcaactggctctccgcccgtgaaggtcgtctgagcagcgaactgctcggcgagttcgagccgctgctgcccatcaccactccgggctactccgattctggcaccttcgacgagtgcctcgaactactgcacctcgccggccgttccctgccgcacgccatctgcatgatgctgccgccggcttgggagaagaacccggatctcgatccggacgtgcgcgccttctacgagtacaacaacacgcttatcgagccgtgggatggcccggccgacatcgtcttcaccgacggcacccaggtcggcgccctgctcgaccgcaacggcttccgccccggccgctggcagctcaccgacgacggctacatcgtgctggcctccgaggccggcgttctgccggagatcgcgcaggagcacatcgtgtccaagggccgtcttgagcccggcaagatgttcctggtcgacaccgccgaaggccgcatcatccccgatgaagagatcaagaagaccctcgcctcccagcacccgtaccgcaagtgggtggaaggcaactcggtcgagatgagcgatctgccccgccgcgagcacgtgagccactccggacagtccgtccagcgccgtcagcgtgccttcggctacaccgaagaggatctgaagctgttgctcactccgatggccaacaccggtaaggaaccgctgggatccatgggtaacgatgcgcctatgcccgcactctccagccgcagccgcatgctgttcgactacttcacccagaagttcgcgcaggtcaccaacccgccgctggactgggagcgtgaggagatcgtcacctcgctcgaatccgccatcggccccgagcctaacctactggccgattccgagctgcacgccaagaagatcctcatcccgctgcccgtggtcaactctgatgagatggcccagctcaagcgccttgacaaggcccgcatcctcggcggctactatcgcccgtacgtggtcaagggcctctaccaggtcgccggcggcggcaaggccctcgaagagcgacttgacgagatctttgccgaaatcgacgaggccatcgccgacggcaagaacttcatcgtgctctccgaccgtgaatccaaccacacgtggggcccgatcccgtccctgctgctgacctccgccgtgcagcaccacctgctgcgccgccacacccgtacgcagatctccatggccgtcgaggccggcgacgtgcgcgagattcaccacgtcgcactgctgatcgcttatggtgccgcctgcgtgaacccgtacctggccttcgaatccgttgaggatttggcccgtaacggctacctcaaggtcgacgcggacaccgccgtgaagaacctcaccaaggcgctttccaccggtgtgctcaagatcatgtccaagatgggcgtctccaccatcatgagctaccgtggcgcacagctgttcgaggctgtgggcctgagccaggaagtcatcgacgaatacttcaccggcaccacctcccgtgtgggtggcgtgggccttgacgagatcgccgaagaagtggccatccgtcaccgcgtggcctacccgaaccagtggagcgcatccccgcaccgcaacctgcgcacgggcggcgactacaagtggcgtcgtaccggcgaggaccacctcaacgatcccgaggccatcttcctgctccagcagtcgacccaccgtggcgactaccagatgttcaagaagtattcgcaccacatcaacgacacgtcgaaccgactcatgaccctgcgtggcctgatgaagttcaacaacaaccgcaagccaatcgacatctccgaagtcgagccggcctccgagatcgtcaagcgcttctccaccggtgccatgagctacggttccatctcacaggaagcgcacgagacgcttgccatcgccatgaattcgattggcgcacgctccaactccggtgagggcggcgaatccgacgatcgtatcaacgacccgcagcgctacagccgcatcaagcagatcgcgtccgctcgcttcggcgtgacctccgattacctcgtgcacgccaccgacctgcagatcaagctcgcccagggcgccaagcccggtgagggtggccacctgcccggtgccaaggtcccgccgtggatcgccaaggtccgtcacgccaacccgggcgtggagcttatctccccgccgccgcaccacgacatctactccatcgaggatctgaagcagctgatcaacgatgcgaagatggccaacccgaaggcacgtatccacgtcaagctcgtttccgagttcggcgtcggcaccatcgcggccggtgtggccaagtgccatgccgacgtggtgcttatctccggctatgacggcggtacgggtgcagccccgctcaacgccatcaagcacgccggcaccccgtgggagatcggcctgtccgaaacccagcagacgctgatcctgaacggcctgcgctcccgcatcgtcgtacagtgcgacggcgagctcaagaccggtcgtgacgtggtcatcgccgccctgcttggtgccgaggaattcggcttcgctactgcggccctgatcgtggaaggctgcgtcatgatgcgcgcctgccagaagaacacctgcccgcagggcattgccacccaggatcctgagctgcgcgcccgctttaagggcaagcccgagtacgtggtcaacttcttcatgttcatcgctgaggaggtgcgcgagatcctcgcccagctcggcttcaggactcttgaggaggccatcggccacgttgagtgtttggatcaggacgaggccatcaagcgctggaagtccggcggcatcgacctgaccaacgtgctcaagcaggccggcccggtacccggcacgatcctgcaccagaccatcgagcagaaccacgagctggagaaggcactggacaacaagctcatcgaacttgcccagccggccctcgaacacaaggaacccgtgcgcatcgaaatgccgattcgcaacgtcaaccgtacggtcggcaccatggtcggctacgagatcacccgccgttacggcgaggaaggtctgccggacgacaccatcgacatgaccctgcacggttccggaggccagtccatcggcgcgttcatcccgcgcggcgagaccatgcgcatctacggcgaagtcaacgactacgccggcaagggcctgtccggcggtcgcatgatcgtgcgcccggaagacaacgtcaccttcgacaagcacagtaacgtcatcgccggcaatgtcaccggtttcggcgccacgtccggccagatgttcgtggccggtcgcgccggcgaacgtttcggcgttcgtaacggcggtgccacgttcgtcgtcgaaggcgtgggcgaccacggttgcgagtacatgaccggcggcactgttgtggtgctcggccccaccggacgcaatttcggtgcaggcttctccggtggtaacacttatgtgcttgacctcgatatgaagaaggtcaacccgagtgccatcaagtccggtgcactgctcttcaagtcgcttgatgccgaaacctccaagctggtgtacgcactggtcaagcagcatgtcgaagagaccggttcccagttcgccgcggccctgctggaggactggaacgaaaccgtcaagcggttcacgcacgtagtgccgaagcagttcgtggccatgacgaaggccatggaagaagccaaggccaacaatgtagatttcaatgcgcccggcgcctgggaaaaggtgtacgagcaggttatggaaggagcgcgctgacatgggcgacccgagaggattcctgaaggtccgtacccgccgagagttggctgaacgccccgttgaggagcgtatcaaggactggttcgacgttcacgccgaaaccggcctgcaaccgtggacccaaacgcaggcggcccgctgcatggattgtggcaccccgttctgcatgaccggatgcccgctgggtaacctgattcccgagtggaacgacttggtccgtcagggcaagtgggaagacgcctacaaccgtctgtccatgaccaacaacttccccgaagtcaccggccgcatctgcccggccctgtgcgagcaggcctgcgtgctcggcatccaccagccgccgaccatgatcaagcttgacgagcagaccatcattgaccaggcatgggatttggactacgtcaagccgctgccgccgcagcgtctgaccgaccagacggtcgccgtcgtcggctccggccctgccggcctcgccgccgcacagcagctcacccgcgccggccacaccgtcgtcgtctacgagaaggacgacgccatcggtggtctgatgcgttacggcatcccgaacttcaagcttgagaagggtctgcttgaccgccgtgtcaagcagatggaggccgaaggcacccgcttccgcaccaacgtggaaatcggcaaggacatcacgtgggatgacctgcgtgaccgttacgacgccgtcgtagtggccatcggctcccgcgtgccgcgcgatatgaagattccgggccgcgagctcgacggcatccacttcgccctcgacttcctgcccgacgccacgcgccgtatcttcggcgtcaagccggtgcacgacatcaccgccaaggacaagcacgtcatcgtcatcggcggtggcgacaccggttccgactgcctcggcacctcgatccgtcagggtgcaaaggacgtcaccgtgctacagatcatgccgaaagagccgtcaagccgtccggacaacagcccgtggccgaccttcgcccgcacctaccagaagacctcctccatggaagagggcggcgagtacatctactccaccgactccgtgaacttcgagggcaccgaagaggagaaggccaaggtcaccatcgacaactcgaccaccgccgaaggcttcgtggccgatgagcgtggtcatgtcaccggcttgaaggtcgtctccgtggctcccggcgaaaatggtccgttcactcgccagcctggcaccgagcgcgtgctgcccgccgatctggtcctcatctccgtgggcttcctgcatccggacaccgagaccatcctcgaccagctgcccgtcgaactcgacaagcgtggcaacatcgctcgcaatgacaagttcgccacctcccaggatggcgtgttcgtgtgcggcgatgccggccgtggccagagcctcgtggtctgggccatcgccgaaggccgctcctgcgccgcagccgtggacgagtacctctccaaggaaaagagcgagctgccggccccgatcaaggccagccagcgtccgatgatgctgcctcgctgaatactttccaaacagaaacatgaaaatcccttcttcatgaggggatttttgcgtttctgggattaattactgccttgagtcttcagtaatgtttatatttcgagaatattgcatacatggttaacatgaagctcctatggtgtctttcgtcgccaaaaagatgacgccaaaatatttgggagagattcatgaacacacgtcatgtcacttcactggtcgcggccggtgcggcaatcgtcatgctgctcagcggctgcggatcgaccggtacctccaattccagcaatgcttcagattccaatatcatttccgtgtacggcagtgagccggcacacccactattccccggcaacaccactgaggccggtggcggcaaggttgtagaccagctgttcgcaggtctggtgacctacgatgcgaagggcggcatccacaacgaggtagcagacagcatcacctccagcgacaacgccacgcattacgtcatcaagctcaagagcggatggaagttcaccgacggcactccggtgaccgcgcactccttcgtaaacgcatggaattacaccgccaacagtgccaacaagcaggccagcgccagcttcttcagcacaatcgaaggctatgatgatctgcaaaagccggacgtggaccccaaggccacgctgagcggcctgaccgttgttgacgacaacaccatcgatgtcaagctcagccagcccgactcggcattcccggtcaaggccggcagccacgcctacatgccgttgcccgaatccgcgttcaaggacccgaagaagttcggtcagcacccagtgagcaacggcccatacaagttcgtgtcctggcagcacaaccacagcatcgaaatggtgaagaaccctgactacaagggcaatcgtgtcgccaagaacgatggcctgaacttcaagatctatacctcgcctgattcggcatacgccgacctacgcggtggcaacctggacttcacgaacacgattcctgacaccgcacttacctccttccaatccgacaagtcgctgaaggcatacaacgagcccggtggcaatacgctcaccttcaccattcctgaatggctggaacacttcggccagaacgaggaaggcaacctgcgtcgtcaggccatttccatgtccatcgaccgcaagaccgtcgccgagaagatcttccacggcaccgccacgcccgccgtcgacttccttgcagccccaatcagcgcctactccaaggaactcaagggaaatgaagtactgaagtacaacccgtccaaggccaaggaactgtgggccaaggccaacgccatctccccgtggagcggtgagttcggcattgcatacaatgctgatggcactgcgaagaactgggttgaggcaatctgcaactacatcaagaacacgctggatatcgatgccaagagcatcccgatgtccacttccgacgaattcctgtccaatgtggattcaggcaagatgacctccgcataccgcagcggttggggccctgattatccatccgcggacaactatctggtacagctgtacgattccagttcggccgacggcaagggcggcaacagcggcaactacaagaaccccgagttcgatgccatgatggacaaggctctttccgccccgtccaccgaggaagccgacaagtattatcagcaaggtgaggagattctgctgcaggaccttccggctatcccgttgtggaaccagaatgccaccgcagccagcacctccgcagtctccggcgtcgcattcgactacggcggcggcccagtgttcaccgcactgaccaagaagcagtaagcagtaagtaataaacagacagcgctagcccccccgctggcgggggctgtcggcaaagccgactgggggtggtctcaaacagcagaccacccctatcttgttatatgagcgagctcccgtaagcgggagcaatcgagaacatacaggagcacattaactatggaattcaccgtatccggcactaccgtgcgattcgatgaacgaacaatgcagttcgcttttacgcgcgacggtgccgaatggaatacctgcgctgatttcaagccgaccctgcaatgcgcgcaaggcaccttcgcgttcgcggatgccacttccatcacccatgagcagcgtgaaaccggcacgggaaccggcattcgcagcatcttcaccggctttgggcacagcgcatactcctttgaaacctatgtatgggtggagcgtgcctcaggcgatgtgctcttcgaatggattccgctcaatgagcaaggcctgaacatcaccaatgtgacgtggcccgcagccatggacttcgattgcgccgatgaccatgacacgacactcatcacccatgagcaaggtgtgatgatccccaacacatggcctaccgccgtgagcaccaaagatatcgccttcgacggtcgcttcgaaacggctggcggttacatgccgtggttcgcgcagctccgcgcagacggacacgggtatatcgccatctgcgaaactccatggaatgccggttacggcatcgaccatcccagcgatggcccgtacacccatatcaatacttggtttgagccaagcctcggcacaatgaattatcgccgcgtggtacgctaccagttcctcgaccacgccgatcacacggcggtgtgcaaggcctatcgttcgtacgtcaacgaacgaggtcgcctgcgtacgctcgccgaaaaggcggcgcgcaatccctccgtgcgtgacctgattggtcgttcatgggtgcacatcggcatcaaaaccaaagtacagcccgactcgtactactacgataaggaccaccccgagaaaaacgattcattggtcacctttgcgcagcgcgaaaagcaaatgcgaacattgcacagcatgggtgcaggccgactgtacatgcacttggatggttgggcacagcccggatacgacaacgcacaccccgactatctgccggcttgtcaggaggcaggcggctgggaaggcatgaagtcgctggtcgacgcctgccatgagcaaggcgatattttcggcacgcatgaccagtaccgcgattactacttcaccgcgcaaacctttgatgccaacaatgcgattcggctggcagacggtacgatgcccgaacacgcacgctgggcgggcggccgccagacctacctgtgcgccgagctcgcaccggactacgtacgccgcaatttcgccgaaatcgccgcgcatggcatcaagctcgactgtgcatacttggatgtcttcacctgcaacgaaggcgacgaatgctcgaaccccgaacaccgcatgacccgccgcgaatgctttgaccgccgcgccgaatgcttcgaatatctgctctcgcacggcatcctctcctcgtccgaagaggtatcggactgggcagtgccaagcctgatattctgccattacgcgccatacgacttccagatgcgctcacccaacgagccgcgccaaggtgtgccggtgccgctgtataacctcgtctaccatgattgcgttatcgagccgtggatgatggagcgtgtggtggacggcgacgattacatgctgtacgccttgctcaatggcggagctccatacctgattcgcgatgccgcatacatcggcgttgacggcgacatggacgacgaacagcgcgctcgcacggaaaacgacatcgaacgctgccatacggtcgctgcattccatgagcgggtcggcatgcaggaactggttcgtcacgagttcgtggatgatgatccgctggtgcagcgttcggtattcgcggacggcactgcggtcacttgcgacttccatacgcaaacctatcgcatcaccgattgaccgcatcactgactgaaaaaacaatgacacacagtgggttccgatggactggtggcaaattgccgccgataagcgggtaatatagccaacagtgtcaccgtcgaaacaggagtagtgaaatgccgaatcgtgcagaacgccgtgcccaagccaaagcaggccgcaggggagtgccgtcgcagtatgaccagacccgtggccgtggccgttcgggaatgattgacgaatatcagctgcagcagaagtcccagcgtctgcaggacggcaccgacggcaccgaatggaagcccagcggcggtacgattgcggaccccgaaaccctgctgaccactaacccgaactacacgaatccgaagatgttcaaggcaccgcattcgctgcgtcagtggttccgtgtgggcagctggacgctgatcgctatcgcgattatcgcgttcttcgtggttatgtggctgccaagccatccgatgtggctggtcatcaccgtttccgcggtgttcattgtgggtgtgctgagcctgttcttcaccgctggcgattccaagcacaatccgaatttggatcagaacggcacggcagtctgatcttttgcccggtaaatccggcttgaaaagcaaaacgcacgacggaagttgtgcgttttcttgtatgcggtgccctaaagtaagaagtgcttgagtttctttctgacgcacgaaggagaggcagtccgatgaaagttgatattctaacccgcgaatacccgccgcatgtgtatggcggtgccggcgtacacgccgaggagctgtccaaggttttggccgagcgcattgacgtgaccgtgcgtgcgtttgatggcaagcgcactgaggctgatatccccgcgattcccaatgccgctaatgccaagggcagtctgaaggttgtcggatacgatacgccgtccgagcttgccgatgccaatccggcattgaagaccttcggcgtggatctgcagattgccaacgacgttgacgccgatatcatccacgcacatacatggtacgcctgcctggccggctacctggccaagatgctgcacggtacgccgctggtcatcaccgcccactccctggagccgttccgcccatggaagcgcgaacagcttggtggcggctacaacctgagctcctgggccgagaaggacgcctacgagcacgccgaccgtgtgatcgccgtttccggtggcatgcgcaaggatattctgaccgcctatccgaatcttgatccagacaaggtggttgtggtctacaacggcatcaccatggccgacttcgctaccccggcaccagacgatccgggttggaaggtgttcgagcgttaccacatcgaccgttcgaagcccaccctgctgttcgtgggccgtatcacccgccagaagggcctgcca

SEQ ID NO: 1061 - DNA, 45144 bp, Unknown
  R13_10m  MAG No. k141_4076
catgcacctgtcgggcggccagcgtcaacgggtggcggtcggccgcgcgctggtcgccccgggccgcgcgatcctcgcggacgagccgacgggcagcctcgacccggagatgaccgacgaggtgattcatctgctgcagcatgccgcccatcagctcggcaaatgcgtaatcgtggtgacgcattccaagcgtgtcgccgactccgccgatgtcgtgctgcgtctcaggagcaagaaactgacccgggcgtgacccacctgggccgggcggcacccatacaccgcttcggcatttcggcaccccggcgaccgggcactccggtatcccggcccttcggcattctggcacccccgcgctccggcaccccggcgacccactcgcgttgccggggtgccgtattcgctctgcgccataatgtgcgtgataatggaaccatgccagtgatgaatgatgaagtgcccggcgaggttgaaccgcaccccgattgttggactggagtaatacagattcgatgatcggaggtgcggttcaaaaggcccttttttgtgtcggattacgaaccgcgcgtttcaccgcttaccgttgtagatctcgttgtcgatcacatcggcgaacacgcggttgacggccgggcgcactaccttcagcgacggcgtcaggcacttgttctcctgcgtgaactgcgtgcccagcacggcgaacttgcgcacggattcggcacgcgagaccgtcgcattcgccttgtccacgtactgctggatctcctcgcgcaccgcggcgttcgtggcgagccggtcgaccggcgtctccgtggacaggccgtgcgcgggcagccaaatggccagcgactccgggtcaagtgtcaccagcgcgccgatgaacgggcgctggtcgcccaccaccacgcagtgctccacgatcgagcacttggcgatctcctcctccagcggaatgggggagacgttcttgccgccggcggtaataataatgtccttgattcgaccggtgatgatgatgcggccggcgtcatcgatctcggccaagtcgccggtcctgagccagccgtcggcggtgaacgcctcggccgtcttctccggcagattgtggtagccgcggaacacgttcgggcccttgacctgcagttcgccttcgtcggaaatgcgaatcgaggagccgggcgcgggctggcctacggtgccgatcacattgtcggtcacgcgcgtggcggcgaacggggcggcggtttcggtcatgccataaccctgaatcatcggcagaccgatgccgttgtagaaatgcgccagatcaagcgaaagtggtgcgccgccgcaggccacatacttgatcttcgggcccagagcactgcgcaccgtgcggtagacgagcgtttcatacttggcgcgctcggcgatttcggcaaacgtgtgctgctcgccggcctgctccttgcggctccagacgcgcgcagcctcggcggccttgacaaacaggcggcccttccagccggcaccggccttgtgcgaggcggcgttgtacaccttctcgaacacgcgcggcacgcccagcaggtaggtcggttcaaacgaacgcaggtccggcagcagggacttggtgtccggcagataaccgaccacgccgtcatcggaggcgatggaggcgtactggataaatcgtgcgaagcagtgggccagcggcaggaagagcagcaggcgcggatggtcgtcgagaaccacctcatgcaacgcctgcgaggcggcgatggtgatggacacgaagttcttatgggtcagttcggcacccttcgggttgccggtggagcccgaggtgtagacgatggtggccagatcgtccgtgcgcacggtggccacgcgctcgttcagttcctcgtccgaaacagccacgcccagaccttcgagcgcgcccagtgcgttgccctcgatcatgagaatctgcttcaaggcagggcagtggtccttgaccgagtcgagccggtcgaagcgctcgcgattgtcggcaaaggccagcttgaccaccgaatcgttcatgatgcgctgggcctgcggggcggagtcggtgtcatagatcggcacgcttaccgcgcccaccgcggccagtgcgaaatcgagaatgccccattccagacgggtggaggaaaagatggtcaccgcgtcgcccttggcgatgccgagcgcgatcaggcccttggcggccgagaccacgcgctcgtggaattcgccggtggtgacgttctgccagcggccggggccgattttcttggcggcgattaccgtgtccgcgccggtgcgggcaaggcgatcggtaagtagggagtagatggtctggttgtcgcggatttcgatggattcgccaggcgtggtgtagtggtcaagcataagcgggccgtgtccttacgtgcgttgcgtgatggctgttgacaaaatcgagccattctgacaagttaggttacgctggcgtaaggttgcgcgcgttgtgggcaatggagaagttgtctgtctggttttgtggattgtatacaacgccgtgtctaaccggtttgctctacggttatgacaccgtgtccatttcgggagccatcgacttcctgcaggacaagtacgcgctgagcccggccctgcagggtctggtcatcagctccatcatgatcggcggcgtgatcggcgccggcttctccggcttcctgtccgataagtacggtcgccgccgaagcactggtcgccgcgcaaaaagcagcactaggccgcgtttgctgcgtctattggcgaattgatcatatgggtcgtctgcgtgcagacgacccttttgcgttccgtcggcttctgacaccgtagaaacgtgctttctcggcttcgaggggctgattttgccttatctggaagtctacttccacttcgaggggctgatgcccaagtagacacggccctaaaacggcggaatgacgttgacgtgtagccgtttatacttccgattacatggatgaggagcccctcgaagcggagatagacttccggcaaatgcgaaatcagccccttgaaacggaagtaggcctccggcaaacgcaaaaattagcctcctcgaaacggataaatgcacgtattgggtgtagtggatgcttcagcccctgatatcgaagcatattttttctggttggcgcgtctagcatgcgcactccgcaatcgataattctgtggcctctctcactttaaaagtctggcgtgtgcgagggcgttcgcttaaggtgaatgggattgcgcggaatgtggagcgcagggtcatgaccatgcgcgtgctgcagatccagctgcgctcgctgaccgccatggatatcgtggcctacggcggtgcggcggccggcattggtgtggctctatggcagtatgcgcataccaccgcagccgccgcaggagccagcaccgccggctggtcgccgatcatgctcgccgcccacctgcccggcgcattcgcctatctggcctacggcctgcaatacctgatgccgttcggtgcgggcttccgctcaccctcgccggactgctgctgattgtgctgctgtccgccgaattctttattcccatgcgtcagcttggctcgttcttccacgtggcgatgaacggcatgacctccaccaagcgcatcttcgctctgctggacaccccggagcccgagcatggcacggcgaccctgccggccaacgattccgattccgctgacgacggtctgacggtccgcttcgaccacgtcggctattcctatgatgatgccgggcacggcgactccaagtccgcatccgcaaagaccgataagcaaggtgaaaccagccccaattccgccgtcgctcctgcgctcaccaacatcaccttcgccgcacggcccggtcagttcaccgccattgttggcatctccggttccggcaagtccacggccgcctcgctgctcgccggtacactggtcggttaccgaggttcgctcacgctgaacggcgtcgaggtatccgatttgtcaggcgaaacactggccggagccgtcactgtgattggtgccagcagccatctgtttgcgggcgcattgcgcgagaatcttctgatggccttgcccgatgacgagattcctgattcgccggattccgtggactcccgtctgtggtccgcgctcgagcaggcgcgcattgccgacttcgtgcacgcacagccgaacggactgggcatgccgattgagtccgatgccgccaacctgtccggcggccaacgccagcgcatcgccatcgcccgcgcgctcctgcatgattcgccggtatttgtgttcgatgaggcgaccagcagcgttgacatggaatccgaagagctgatcctggatacaattcgcgaattggcgcaatcccgcggcaagacggttattatgatcacccatcgcatggccaacgccgaacacgctgatcaagtggtggtgctcgaacacggcaagtcggttgagaggggcacccataccgagctgatgacggcggacggcgtctacgccaagctgtttaccacgcaggcagatattgagaacttcggagaaggccatgctcggcgtgtgctgcaggttggttcccgcaagcaggagctgtccgacgacagtcggactgagggtggcgcagcgcgcgtaagcgcagaggcgggtatgacggttgaccgcctgcagtcagctttgccgacggcttccgctggcgggagtgagcaggcctcggctgagactccggctggtgctgcaaatagcgattcgtcttccaaaatgagcacattccaagtgctcaggcgactgcttaaggaagcccgacctctggcaggactgatggcagcggcctccaccgccggcaccatcggccatctttcgtccaccttcctgcccgtgttcggcattatcgcggcatttgcacttaccggtaatccggtgtggggcatgggtgttgcgcccgccgtcatcatgatgattatctgcgctcttctgcgtggtatcacccgatacgtcgaacaatatctgaaccacaatgtggcattccatctgctcgcactcttccgttccaaggcgttcgccgcgttgcgcagactggcgccggccaagctcgcgggcaaaggtaagggcaaccttatcgccatgctgaccaccgatgtggaactgcttgagatcttctttgcccacaccatcagtccggtggccatcgcggtaacctccaccatcatctacacgattgtggccgccaccctaagcccatggatggcgctggcgttgattgctgcccacctggttatcggcatccttgtgccgcgattctttgccaccggcgtacgtaaccttggccctgccatccgtggcgctgccggagaactcgacgatgtgatactcgatgacatgcgcggcctggacgaaatcatccgatttggccgcggcgaggaacgtgcgcaggccatcgaggaccgtacccatgcgttgtggaaggatcacgccaaactcagcaaggtcaacggccgtttcaccggaatcagcggactcttggtggctgtgctcacagcggcttcggtcgccgtggctattgcctgtgccggcgcgaacccgcagagcattccggctctgattgccgccttcgtgctgttcgccagctcgttcggaccgactttggcgctcgccgccttgcccgctaacctgactcagaccttcgcgtccgctagccgactgttcggactgatggacgaggtgcccgctgtgaccgagaacggcactgttgtgccgcaggagtatatgggcatgcgtcttgatgacgtcacctttgcatatgcgggggagcatgaagtcctgtccgacttctcgcttgacgtgccgcagcatggcgtgctgggtatccaggggccgtccggccgaggcaagtccaccatgctcaagctgctgctgcgctactgggatccgcagcgcggtcaggtgacgttgtccggcacgccgttgcccgaggtcgatgtgcatgctcgccgatgtattcaggccatgatgagccaggaaacccacctgtttgatggctctatccgagacaatctgctgattgctttgcctgagtccgaggttgaagctgcaaatgttgcaggcaatggggaagtgggtgccaggaccgttgattcccgacagcagcagttggcggcgcaatcggcagagggcgatgccgttcaggtggcagcagctgacggtctcgatgctcgtttgcgtcaggctctcgccaaggcctccgtgcttgatctcattgattccctgcccgatggccttgatactcaggtaggcgagttgggcgaccgtctatccgaaggtgaacgccagcgtatcggtttggctcgtgtgttcctgcgcaatgctgatctggtgcttttcgacgagccgaccagccgtttggatgctttgaacgaggctattattctacgttccattcacgctatggccgtgggtgagcagcatgcagacaaggagcgcggcgcggctgtggtgctggtctcccaccgcgaatccgccatgcgcattgctgatgcggtactcaatctgtaactgcctgtaactacgcgggaatcacatcgcattgcgttacgttaccgcgttgcattgcggttcctcgcgggtggcggcgatgccatctccggtcgtcattgcgttgctgcgtttgtgttgcgatatgtgatgcggcaacgcagcaatgcggcaatgcaatgtgatgtggcaacgtggcaacgtagcgatgcaataacgcggtaacatggcaacatggcaatgcagtaacgcaacgcagcattcacgccttgatcaaagcgccgatgacgctgtcgaacgcagtgagactgaggggagccaaagcccaaaaccggcaaacacagcaccggccatgagccgatacaataaaggatctgattaatatgactactcatagagcatttaggtggccgtccctgctgacggaatccggccgcggcatcgcgttcggcggcgactacaacccggaccagtggcccgaggagacgctggacgaggatatccgtctcatgggtgaggccggcgtgaacgtcgtatcgctggcaattttcagctgggacaagatcgagccggtcgagggcgcgttcacgttcgagtggctcgaccatgtgatcgacaggctcggcagagccggcatcgccgtggacttggcctccgccacagccgccgcgccgctgtggctgtacgaatcccatccagaggtgctgccggtagaccggtatggtcataccgtcaacgcgggctcacgccagtcgtggcagcccacaagcccggtgttcaaggaatacgcgctgcgcctgtgccgcaaacttgccgaacactacaaggacaacccgtatgtgaccgcctggcacatgggcaacgaatacggctggaacaaccgctacgactactccgacaacgccttggccgcgttccgcacgtggtgcgaggccaagtacggtaccatcgacgcgttgaacgaggcgtggggcacggccttctggtcgcagcacgtgaacagtttcgacgaggtgctgctgccacgtcacatgggcggcgacgccatggtcaacccgtcgcagcagttggattacgagcggttcggcaacgacatgctgctcgacttctacaaagccgaacgcgacgccatcgagcagatctgccccgacaagccgttcaccacgaacttcatggtctccaccgaccagtgcgtcatgaactacgccaaatgggcggatgaggtggacttcgtgtccaacgatcactacttccatgagggtgaatcccacctggacgaactcgcctgctcggacgcgctcatggactccctcgcgctgggcaagccgtggtacgtgatggagcactccacctcagccgtgcagtggaagccgctgaacacacgcaaacgggccggcgaactcatgcgcgactccctggcccacgtggccatgggcgccgacgccatctgctttttccaatggcggcaatccaagtcgggcgccgaggcgttccactccgccatgctgccccacgcgggcgccgattccaaggtcttccgcggcgtatgcgagctcggtaaggcgctgaagaccctctccgacgccgggctgcagggcactgagctcgagcgtgccggcacggcgatcctgttcagcgcggaatccgaatgggccacacgctccgaaaccctgcccagcatgaaactcaaccactggcacgacgtgcgcgactggtaccgcggcttcctggatgccgggctgcgcgcggacgtggtgccgctcgcctacgactggaccggctacaaaaccatcgtgctgcccaccgtgctcagcctgtccgacgaagacgttctccgtatcgccgacttcgcgaaggccggcggaaccgtcatcgtcggctatgccgccggcctgatcgacgagcacttccacatcggcctcggcggctaccccggcgccggcaacgggctcctacgcgacatgctcggcatccgctccgaagaattcaacatcctcggtgaagaagccgaaggcgagcccagcgaaatcagcctgtccaatggtctgacgacccgcctgtggcagaacgacgtgacttccgtagccgcggacaccacagtgcttgcctcttacgcaggtgagtccgccgccgactgggagctggagcgcacccccgccatcaccagccgcccctatggcaacggtaccgccatctacgtgggctgcgacctcaaccgtcacgacattgcccagttgctcaaagcacttggctcccgatggcaggagttgtcggcgcagccgactgagagtggtcaaactccaacctatcccaccacagatccccgcatcctgcacaccatccgccgatccgcagacggctccacccgcttcgatttctacctcaaccgctcaaaccagcccgtcgccatcaacggtgtggaaggtgatcccatcatcgcccaccgttgcgagactgacgccgttggatatacgctgaaccgcaacgccattcttatcgctaaaacgtcctgctaaaccgcgctagaatggcaatgttgtccggatagaggagtgcggcatgagcgacgagaaaacagccaagcgtcgagtgacgctacgcgatgtcgctcaggccgccggtgtatcgctcaaaaccgcgtcgaacgtgatcaatggctccgggcgtatgacagatgagacccgtgccaaggtcgagtcggtcattaaggacctcgactaccgagtcaacgtggccgcccgcaacctcaaccgcgatcacaccggcttcatcaccctcgccgtgccttcgctgattccgccatatctggccgagctcgccaaccgcaccatcgaggccgcccgtcagcgcgactattccgtatacgtcaccacatatgcggaaggctccgcgaaaggcgcgcgcgagctgctgaagaagttcaactccacggtgtccgatggcatgatcctttccatgagcgaggtggaaaacatttcgcccgatgatctgaaggttgattttccgctggtcatcgttggcgcgcgtaccacgtggggcattgtggatcacgtgaccccagacgatgtatccgcagccgccatggccgcaggctacctgtatgaccgcggttccaccagacttgcagtgatcggtgcccgtgacgtttacgacgaagatgcattgctgaatgccgtagaaggcaacgcgcagctgcgtctgcgcggcatcatcgaagagacccgtaggcgtgggctctccttggatccgcagctgattggcaacaccgatcaggattggaccatcggagccggtgcccgtgtgacccagcggctcattgattccggcgtgccattcgacggtgtgattgccttgaacgatcagttggccatcggcgcattgaccgctctgcgcaccgctggttatgaggtgcccgtgcaggtgcaggtcatcggcttcgataacaacgaggaagccccctacctgcagattccgctgaccaccatggattcccgccttgactggacggctcccacggcagtggatcgcatcctcggacgcatcgacggcagcatcaccaagtccgaactgctcaccaccgaatcccaggtcatcgcccgcgcctccacacgctgaacgacattgctgtaatgctggtgttgctgtactgggccgtacgaggcgttgatacaccggttgaccaacacggcataaagcgctaaggtgacgattgcgtggtacacagctgtaccgcgtggcgcgtaaggaaaggaagcgccaagcatcactgggcgttcgttctgagcgttcaccattcaaaggagaaaaagcatgcgccgaaataccgcgcttactcgcattatggcatccggcgtggccgccataatgctctgcgcaggaggcacgttcactgtaaacgccgccgaaggagaaccagttaaagccgacgtctcggtcaaggccatccaaggcttaagcgatgatttcatcggcggtatggacgtctcatccatgctctcgctggaagaaagcggcgtcacgttcaagaacgccaatggcgaggtcgaggatttgttcacgttgctcaaggaatccggcgtgaactatgtgcgtctgcgtgtgtggaacgatccgttcaccgcagacggccaaggatatggcggcggcaacgtcaacgccgatcgcgcactgaccatggccaagcgagccacggcagcagggctgaaagtgctggtcgacttccattactccgatttctgggccgaccccagcaagcagcaggtgcccaaggcgtggaaatcctttgaaggcgacgcggacaaaaccgccgacaccgtatacgattacaccaagcagactctgaccacgttcaaacaagccggcatggacgtcggcatggtgcaggtcggcaacgaaaccactgcgaaaatcgccggcatctccggctgggacggcatgtccaaagtattctccgcaggttccaaagccatacgcgaagtgctccccgaagccaaggtcgtcattcatttcaccaacccggagaaagccggcacctacgccacttacgccaaacagttgagcaaccacaatgtggacaaggtctcactcgtcaaaaagaccgaaactccggtgaagccatccacggagaacctggacaaggctgtggccgaagccgggaaaatcaatcgcgatgagtacaccaacgagtcgctcgccaaactcgatcaggcgcttgccgctgaccagttcacgctcgattacgatttctccgctcccgctgatgtggcgaaggttaccgtaacgctcaagtcgaatccgaatgtcaccgaaacctatacggttgcggttaccgctcgggccgaaggtggttccggcaacggctcggacggtgcgggtaatggcggggctactatcaatcccgatacgggcgagggcgataagaccaacggtgcgaatggcgacaagatcactggtgtgctgagcaataccggtagcgcggtgactgccgtgggtcttgcggttgtcgttctcggcgtggccggcggggtctcgcttgctttgcgtcgtaagcgctcctgatagagactgatgcggcattatgatgcggttgccggcagccggcaaccggctgccagatgccatctgtcggctgtcgtttatcggttgtcggctgtcagatgcgtctgtctcggcgcagcgatgcgattctgtcccggttcgtgcatcaatcgtttgatgtgggtaccaggacagaaatcactgtcctggtttgcgaaaacgggtgtttttcgcgtaccgggacaattcccgttgccccggtttgcacgtcaatcgttctacgtgagaaccgggacagtatgttgatttcgggattggctgtattccgccgattctgtttgtcggggtatgtggactttggggattgtcttgtcctggttctcgaaaatggcccgaaattgcgtaccgggacaacgatttctgccccggtgcaaacgtcaatcgattgacgcctgtaccggggcaaattcgcgcccgggaacaatagggcgagggccggtcgcaggagtagagcgtgatgttgtcatgattgcgcccggctctcccacacggaaggccgggcgcaatcatgccgtttggttgcagcacccgcacatcgcctgcataaccgtgtacagtggcgtgtagttgcagtacatgaaggagcatcacaagccatgaccaacggacacatcaatcccgccaacgtgccggacatcgccttgaaagacggccattccattccgcaggtcggccttggcatgctacgtatcgatgacgagggcgtggcccctgtcgtcgaatctgcgctggaagccggataccgccacatcgatggcgccgccggatacaacaacgaggccggcgtgggtcgtgcgctcgccgcttccggatacaacaccggcgccaagcgcgagaccctgtgggtcaccaccaagctgcgcgactccgagcagggctacgactccgcgctcaaggcattcgacaactccctgaaactcctccagctcgattacgtggacatgtacatgatccattggcccacgccgttcgactggcgcagcaccgacacctggaaggcgttcgtcaagctgcgcgacgaaggcatggcacgcacgctcggcgtatgcaacttcatgcccgccgatctgaagcgtctgcacggggagaccggcgcatggccggccgtcaatcagattgagctgcaccccacgtggcagcagcgcgaagtggtggcgttctgcaagaagcacggcatcgccgtggaggcctactcgccgatggcgcgtggcgccgacctcaacgccggcgacggcaccatcgagaagatcgccgccgcccatgaggtcagcccggcccaggtgattctgcgctggcacatcgaaaacggcacgatcatcatccccaagtccgtgcatgccgaccgtcagagggagaatctcgacctgttcggcttcgccctgaccgccgatgaacacgctgccatcgacgccctcgacggccccacccgcgccggccacgaccccctcaccttcacctatgcgtgattgatggcacgtcgtaacgcccacttccgccgtcgtttcaacgcctctggaccgctggagcgcgtgctgattctcatcgttctcgccgtagcaatcggcgtgaccatcggcctgttactgccgcaggtcagctccgacgtggccaaaatcaccggtggctacactgccaccggttcagccgccgacactttgaacgcgctcgccgtagacgacaaccaaagctcctccggctacgaccgcgattccttcggtttccgcaccaccgacgtcgacggcaatggctgcgacgtacgcgacgacgtgctcgcccgcgatctcacggacatcacctacaaatacgccggttcctgtgtggtcgagtccggcacactggccgatccgtacaccgcccagaccatccatttcgtacgtggccgcgccaccagcgccaaagtgcagatcgaccatgtggtggcccttgaaaacgcttggcaatccggtgcgcacgactggtccactgccaaacgccatgaattcggcaatgacccctataacctgctggccgtcgacggtccggccaatcaggagaagggttcggcttccgccgcctactggctacccaccaacgccgactaccgttgcgactacgtggcccgccagattggcgtcaaagacaagtaccagctcaccgtcacctcccaagaaaaggacgccatgctcgccgtcctccatacctgcccgggccaggccgtgcccgcagacgaataggggctaccgctcaggattgttgagcataggtgcctgcccctcgtcataagcgcgcaggagccgtcggagcaaaaatgtggtgaagtatggtgtggtgaacacgtgttcgctgctaccgatattgccggcggatagtttcacgccgaactgaatttccggataagaatccgaagcgattagcgtccgcatggatttggcggtgccttttttcgatttcacctccaccggcaccagccattcgcgcgtgcggacgaagaaatcctgttccagtgtggaatcctcttttttgtagtagtacaggtcatagccggatttccgtagcgcttcagagacgatgctctcgtacatagcacccttatagacaccaagattacgattggcccgcagatcatcactggcctcgtcgtcaagcatcgctacgaacagaccggtatcgccgaaatatatcttgaacttgttttcgtcataattgcctttcaacggcagttcaggataggacatacatcggcagatattcaccattcccgaggtttcaagccattccacgcatcctcgatagtctttgaaacgcgctccgctggcaaccttgctgatttggaacttcttgttttccttggcgagttgcacgggaatatggttgaacacgttgagaattcgtgcctgatcgagtccttgcgcgtatttgcggatatcctcctggtagtccaaaataagctggcgctgcaattgcagtgttccctcgaacgtgccagtgcgtatatgggaggcgacaaccgcaggcatgccgccaagcacgcagtaatccataaatgccgtggagaagacgttcatttccacttcagagaatggcgtagcatcacacaggtgggtgaacatgctttcgatgacggcctcatcgtatccgcgagcccacagaaattcttcgaagtccaacgatcgcatttcgtagtcggtcttatatcccacgctattgctttcgatttgcttatagctgatgcccaacattgaaccgctgcaaatcacatcatatttgccgtcgattttaaagaacttcagtgcagtggcgatatcaggatgggcctggatttcgtcgaaaaagatgagcgtatcgcccggaatgaactttttggctgggtcgatcagggaaatattgcggacgatggtattcgcgccataaccgtccgcagtgattgcacgatatttcggttcctcaacgaagttgatttccactaccgaacggtagttgtgtgcggcaaagtaatcgatagtctctgtcttgcctacttgacgagggcccttgatgattagcggggagcgattcgggtcggatttccatgcattgagataggcatcggctttgcgtttgagatacatgaggagcccctttccgaattactgctatatcaatgattttacactttcatgagcgagttttctaccgtctggcacatttcatgagcgagttttctagtaattacctcatttcatgagcgagttttctaccgtctggcacatttcatgagcgagatggcgggaaatgccagctgccagtccgccagtcatccatcaatcgtccgcagattgtccgtctgttgactcgggaaacatgcctgcgctataactgtgcgcggtatgaagggaacaggtacaaacaatatggcagtaacacacaccgaagcagatgccactgcggcaaccgctatgacgaacgctgtggcagacatcgaacaggaaacaccggaaatcgggaaggaacgccagcttgccggagtcggaaccggggccggagcagggacgaataacaataagaagccgcatgaccatgcgctggccagcatccttggccccgcgttcgtggcggccgtggcctacgtcgatcctggtaatgtggcggccaacatcacctccggcgcacgatacggctacctgttggtgtgggtgctggtgctcgccaacgccatgagcgtgctcatccagtatcagtccgccaaactcggcatcgtgaccaacaaatccctgccggaactgctgggcgagcgtatgagcgatgccggccgtttcatgttcttcatgcaggccgaggtcatcgccatcgccaccgatctggccgaggtgatcggcggcgccatcgccctgaacctgctgttcggattgccgctgttcaccggcggtttggtgattggcacaatctccacggtgatgctgtggttccaaggcggcaagacacagaccacattcgagcgcatcatcatcgtgatgctgctgattatcacattcggcttcatcgcgggtctgttcgtagccccgccgaaccccggcgaagtggtcaaaggcatgattccacgcttccaaggcgccgactcggtgttgatggccgcctcgattctgggcgccaccgtgatgccgcacgccatctacctgcactccacgctggtgaacgaccattacgcaggcggcgaaaagccgtcgatcaaaacgcagctgagaggctcgaaaatcgatgtggcctgggcgctgttgctggccggcaccgtgaatctggcgatgctggtgctcgccgccaactcgctgcatggcatgtctggcacggactccatcgacggcgcacagcgggcgatcacgcaggtgctcggcccggtgatcggcacgatcttttccatcggcctgctggcttcgtcgctgagctccacatcggtcggcacgtacgccggctcggaaatcatgcacggtctgctgcacgttaacgccccgatgtgggcctgccgcgtggtcacgctggtgccggcactgattgtgctgtggttcgccaaggacccgactcaggcgctggtcatcggccaggtggtgctttccatcggcatcccgttcgccgtgattccgctgatgcgatacacgcatgacaaggaactcatgggcaagtgggctgatggaaccgtcaagcacgtgatcttcatgatcgtcgtggcgctgattgtggcgctcaacgtgctgctgattgtcctgacgctaatgggcagggcgtaatagactccagctgaaatcctgcgatagcacaacataataagaagccccggtgttggaaaccggggtttcttattatgttgagaatggttggatctgccgtcagttcgcagccatacgccgcgcacgccgttcgcgcagcgaacgcagggaaataatgtctcgcgtacgaccggcaccgtcgcccttgacgccgaagaacaccatcaacaccattaccaggcagatcattgcggagatgcgcagcgcccattgaatgccaaaaatcgaagcggcgacggcggaggcgccgccctgcttatgcaaagcggcaaacgtttccatcagaatcaccaacacgggtgcgcccacagcgcccgcaatctgacgcgcggtattcgtcaccgatgatccggcggacacttcgctcggcccgttcaggcaattcagggaccacgtggtaatcggcatcagcaggaaacccatgccgatctgacggatgaactggcagatcgatacccaccagatccacgtatccatcgccaccagcgacatgcccaaggtgccaagggtcaacacaatcgaaccgaacaaagccacgggtcgtgcgccgaatcgatccatcgcacggccgccgaagaactgggagatgcactggccgatagcgcccggcagcatgatcagaccactcatcgtggcagaatacccacggtcggtctggatgtagagcggcatgatgaccagaatcgaactgaacgcgaaaaatgccagcgacgcggtaatggtgccgacggtgaacgaacggttcttcagcacttccaagtccagcagcggcggctgggggagtgccgacttgtcctcggctacggcctcgcgataccgcttgccagcgcgcaggttacgcagcacgaaccagacaatgccaatcaggcccactgccatgggcccccacgttaccggtgcggcgaacccgtaggcctccgaattggtgaagccgaacatcagcccgccaaagccaatcaccgacaggcacaccgagaagaagtccgcgcgggtcgaagggtcgtgtgaaccgaaattatgtagtccgaacatggccgccacgagcgagattacgccaatcacggtcatggtcaggaagattgaacgccagccgttggcatcggtctgccagccgcccaaggtggggccgattgccggagccacgctcatggccatgcccacggtgcccatagcaaagccgcgtcgggacagcggatagatcgagaacaccgtgatctgcagcaccggccacatcacgcccgtgccggcagcttcgagcacgcgcccgaccagcacccatacgaagtttggccccaaccatgccagcagggagccgaccgtgaacaccgccatcgagcagatcacgatctggcgggtggagaaacgacgggtcaggaacgcggtcagcggcaccatgacgcccatgaccagctggaacacggaggtgagccactgcccggtggttacggagatgtggaattcggaaacgataatcggcagcgcggaactcagctgcaactgcgtgaagttgcccacgaaggtaataaaggtcaatatcgcgatggagatgaacgccgcccggctgagtttgccgtctacatatgattcctcgcggctcagcacccgctgcagttcgccgcgacgattcttgattccccgagctccgttcattccactcacgtgcatactccactctcgctgatcgaccgcaacaacgcatcaggcagtctctcaaagcaaccccaacacgctacacccaggggtagtccgtcgagatgcaatgccgagatgactggccgcccggttgcagagcaaattagtcccgttattcgagacgtcaaaatgaacgtagttactatccgatcacgttcgctatgtggttttccaacaccccccccctagcggttaggggtgtgatgtctgtaccatgttgaaggggtaaccccgtatacacccgtacacaggggaatccagagaagtgagagccgcgagacctgcggtatacggttgaaaaggaagaattggtgtttgagatgtcatctctgagcagtaacggtcagccgtctacacgcagcagacaggccaatagcggtgaccgaaccaccgctcagctcagtgatatccgccaaaagcagctcagccacgtgctgtactggcgattcttcgtcaatctcgccctcatgcttatcgacgccgccatgtacatcatcaccggagccacggtgctcaatctgcgtcatgaggcaacgccgttctattcgagcagattcaatttcacgattgactccaccgtttactttatgattgtggcctgcttctgggtgtggtcgctctatgtcgccggcatttatcatcgccatgttatgggtgacggttaccagctcaatgtgctgctggtcaaaggcatggtcgtgtgctgggtggtgcagtgcgcgttcaactacttcttcgatctggggctgacccttacctcgctctgcttggtggtgattgccggatggttgctcaccatggtggaacgcattgccagccgtgcattcattacgcgtagtcgtcgcaagggcgcctacgcttacggcacggtgatcatcggttccccgcacggcattggtcgcacgctaaaattcctcggtcagcgtcggcaactcaactaccgcccggtggcagtatgcccgattcatctcaatcccgataccggattgattgaacagagcaccgaccatgagacactccgtgaggagatgcaaaagaacgagggctgccagctgcccgtactcgagtacagcgatcataatcttgctgaacagattattgacatgaacgcgcagaccgttatggtggctgacgagctgcatcgctattcggataattacgatatcttctccgtgcgcatggaatcgttcggtctggagattgccgtgctggcttccgccgctgacacttctaaccatgagattcaggttcgatccatacagggcaccacgattatcacgcaacgtcttgcgcagtacacgccagcccgccgtatggctaagcgcctgtttgacttggtgatttcttcgctagcgatcatctgttcgttgattatcaccatcccggtggcgatcgccatcaaagtcacggatggcggaccggtgttctacaagcagacccgtatgggcctgcgcggcaagccgttccagatgtacaagttccgttcgatggtggtgaacgccgacgcgctcaagaaggagctcgcaaaagaaaccggccagaccgaccgcttcatcttcaagatgaagaacgacccacgcatcaccaaggtggggcatttcattcgccgcttctccattgacgagttgccgcagttcctcaacgtgtggatgggcgatatgtccgtagtggggccgcgcccgccgctgcctgaggaatacgcccgttacaaccgtctgtacgccacccgcatgctggtcaagcccggcatcaccggtccgtggcaagtgtccggtcgctccgatttgtctgccgaagagagtgaggcccttgatgtggcttacgtgcagaactggtcgattatgggagacattgtgcttctcttccgcacggtcggtgccgtgctgagtcacaagggagcgtactgatttctttccgtttcgctgcttcagtcttgccgcgcccttgccgccccgcccttgaacgtgattccagaaagataagtcgatatatctatgactgattcgaacacaccagaaatacctcagccgccggcaccctccgagcggtcggaaaacgcggatgatcgccaagtgatacagccgtatgttgaccccgaggtacttgctgaagacgcccgagcggcggaacggcgtaagcaccgccggcgtatgagccatgaacatatcaggcggatcaagcgcaaaaagcgcattcggatggtgctgattgtaatcggcgcactgctgttgactattgccgcgctcgcggcgtggctcggcctttccgcgctcaaagcgaaaaatgaagtggaagcagcgattcaggccgcaagccgcatccaatcacaagttcaagccggcgacaccgacaaagcgcaagccagcattgaagcattctcccagcatatcgacgctacgtatgcgcagaccaagcagccggtatggaaactggccacattggtgccctattacggttctgacgtgaaggccgcgcgagacatggtgcacattttggaagacgtgtcgaacaacgcattgccgaagcttgccaaggcggcacaggccttggatttcaacagcatcggtatcaaagacggcacgattcagctgggggatatggccagcgtggctcaggatcttgccgccgccaatggagtagtggcggatgccagcgtagacatgggcaagattggcgatacgcatattccgcagattaccgaggcggtgcagcaggggcgtagcaagttcaaggagcttgccagcctgacggatgcggccagtcggctggcggatgtgctgcccaagatgttcgacttggatagcagcgagggcagtagcagtggcccgcgaacctacctagtgctggcacagaacaatgctgagctgcgtgccacgggaggcattccgactgcgtgggccacgctcaccatcgatgcaggcaaaatcagcatgagtacgttcggcgatccgcctcggaatggtctgttcagccaggatgaagccgcgagcgtactgacggcggaagaacgcaatctcttctccaccaagatggccacagactatccggacatcaatttcactcccgatttcccgcgcgttgctgatatcgcgcgtcagatctggcatcgagccggtcatgacggtgtggatggcgtcatcagcgtggacccggtgttcctgcagcggttattgaaggttgccggccccgtgacgctctccgacggcacggtgatgagcggcgacaatgccgagcagcgaattctgaaccagatttatattgataccgatacgcaggcggagcaaaccgacttcttcacgatggcggccagtgagatcttcactcatgtgctcaagaatgtggacggcaagaatcagcagctggtgcaaacgttccagaagtccgtatccgacggccatctgtatgtatggagtgctcatgagggcgagcagcagcgtatctcgggtacgaccatcgccggcgaattgcagtcgaacccggctcattcggttacgggcgtgtacttcaacgacgccaccatgggcaagatggactggtacctgaagcgtgaagtgaccagtacatatgacaaaacctatcccagtggcgccaagcaatacaccattcacatcaaactgacgaatacggccgatgccgccaaggtgaatgccgctccggatctgttgcgcggctatgaccataacggcaacccccgtacaggggagatcgaaacggtactgtacgtctacgcccccgatgaagggcgcattgtggattggacccaggatttcgatcagttcgctgtgcacgatggactgacggtgggtgtgaaaaccgtgacattgcggccgggggaaagtttcgagaccacggtgcatgtgctggccagtcctgcggccgatgagaatgaaatgattttgagacagacccccttggttgattaaaggggcaacccctatacattaaggtggaatcatgaataaggaagaacggagtatggctgtggatgaagctgaacaggtgcaagatggtaatggagtcaccattctcgatttattcaatgcggtaagaaagcatgtgattaccgcagtggtcacactggttattgtgatggtggcaatctgcgcgtacacctttacccgcactccgcaatacaccgcgacttccgaactcttggccacttatcgcagttcagcggctgcagcgggcgcatccagcaatgcaggcgagctgagctctggcgccaattacatcaatagccagattcaaacgtatccgcaattggtaaaaaccgagtccgtattgcagccggttattgatgatctggggcttgacaccacggtaaagggattggctgcgagcgttaccgcttccaacccggaggacaccatgctggtggatatttcggttaataatccagacccgaagcaggcgtccagtattgccaattcggttgccgaaaacctgagaaaacaggttacttccacgatttacagcgatgagggcgataagatcatctctcccgtcaacctgactgtggtgcagcaggcgtacgctccggcttcccccagctcacccaacgtcaagctcaatctggcggcaggtcttgcggtcggtgtcattctcggcatcgtggttgcccttatcaaggatttgctggacacccgtgttcgccgcgattctgatgttaccgctgttatcgacgcccccgtgctgggctcgctgagccgcaatgaggcttatgccggtacgtcgccggtgattatctcccgcccggcctcccgcgaggcagaagagattcgacgcctgcgcaccaatgtgatgttcgtgctgcccgatgagccgttatccaatgtgattgtggtgacttccaccggcccgtccgaaggcaagaccatgctgagcacgaatctggcgaccgcattcgccgaaaacggcagcaaggtactgctgatcgacgccgatgtgcgcaacccctcggtgagcaaggctctcggcattgagggcgcagtgggcttgacccatctgattaccaaccgtgtatcgtcgcatgatgcgattcaacgctactggaagccgaacttccacgtgcttcctgctggaaaacaaaccatgaaccccagcattctgctgaattcccgcgctatgaaggcactggttgagcaggtttccggagcctatgactatgtgattatcgataccgcccccatgcaggtggccaatgatgccgccgtattcgctaaggatggtccggaactgttgttggttgccggcttgggcgttacggagaagaaactgctgaagcagaccgggcgcgaactgagcacactgagcatcgatcccgtgggcttggccatgaattacggcgagacggagaagccccagaagggtggctattactattacggcgacgagtctgacgacaacggcaggaagcgccaaatccagcacaaaaagtctgaaaagacgaaggactgagcacatgaaatcgcagtatgagatcagcaagaacggtagcaacatgatgtccgataagggccgtcatgtcagttttgtgggggttgtggcgtgagtggggtgtcggctgttcagcatgtgttcgttgtggggtcgaaggggattccgggcagttacggcggttatgagaccttcgttgatcgtctgactgagtaccacgagggtgagccggggttgagataccacgtagcgtgcaagtcgctgtcggagtcgggtgagttctcgtaccataacgcgcgttgtttccgggtacgggtgccgcagatcggaccggcgcaggcaatctggtatgacgtggcggcgttggcggattgtgtggcgtatattcgccgcaaccgtatcccgcatccaatcgtgtacgtgctggcgtgccgcatcggcccgttcacggcgcatttcgcgcgcgcggtccaccgtctgggcggcaaactgtacgtgaacccggacgggcacgagtggatgcgcgcgaagtggagcgcgccggtgcgcaggtactggaaggtgtccgagcggatgatgacgaagcacgctgacctgatggtgtgcgattcggtaaacatggagaagtacatccgcgaggagtacgcgaggtaccgtccgcagacaacgttcatcgcctacggagcggaggggcggcggagccgtctggcggacgtcgacccgaagctcctggactggttcaggtcgaagggtttggagccgaagtcgtactacctggtggttggccggttcgtgccggagaacaactacgagaccatgatccgcgagttcatggcgagcaactcgaagagggacttcgcgctggtgacgaacgtgagcgacaggttcctcgaggagttgaaggagaagacgcatttcgaccgggatccgcgcatcaagttcgtgggcaccgtgtacgacagggagcttctgatgaagatccgcgaggacgcgtacgcgtacttccacgggcacgaggtgggcggcacgaacccgagcctgttggaggcgttggcgtccacggatctgaacctgctgctgggcgtgggcttcaaccgcgaggtcgctcgggacgccgccctgtactggtccaaggagcccggcgacctggcccgcctgatcgaccgggccgacgccatggatccggacgagatccacgcgttgggcgacaaggccaaacaacgcatcgccgacgcgtacagctggcagcacatcgccgaccaatacaaaaacctcttcctcggcagagagcagaaggaagggtgaaacgatgaaaatcctcgccattcacaacttccatcgttcaggttccgcaagcggcgatgatcaagtattcaagagtgaaaccagtatgctcgaggaacatggtcatgaagtaatccgttatacggtgtcgaatgatgagttcgacaaggcggacgcagcgggtaagttggccgccacgttcggaatgctgtggtcgtttaagaactaccgagcggtggtctctctgattcgcgagcaccatcctgacctagtgcatgtgcatacatttttcccgctgttgtccccgtcaattctgtatgcagcaaaacgtatgggtgtgccggtagtggcgacattgcatgacacacgttttgtatgccctgtggcaacctcgctgcgcgatgggaagatttgcaatgaatgtggtgacggccattatctgcgtatgactcgtcatgcatgtttcaaaggatctcgtcttcagagtcttctcgtggcaggcatcttcaaataccatcgcgctcgtcgaagcttctataagcaaatcgatagatatatttgcctcaatgagaatcagatcgacttgttgaagggtatcggattcgattcatcgaagatagttaaaaaatataattttgttcctgatgctcaggcgaatatggccgctgaacgtgtatcagggttacctgagcggtatgcagttttttatggtcgcattggtgctgagaaaggcattcgtgtacttcaacgcatatggaatgagattgacgacattccgctggtggtgatgggcggaggcccgttggaggacgatttcaaggcttgggcggataagaagccgaatgtctatttcctcggatatacgccgcatgagcagtgcatggctattgcgaaagccggagagttcgtggtgtttccctcgatttggtacgagggctgctcgatggtcgaaattgaatctgaaagtctcggactgccgcttatcgcgaccgaccttggcttttccgcggaagcagtcaacgatggagtcaacggtgtcaaagttccgttgggtgatatgcatggttgggttacagccattcgcggcctatggaaagagccagagctatgcaaaaagatgggtatgaatgcccgtcgggattatgaggacaaatacacacctgaaaacaactatcagcaacttttaaatgtgtatagagaaatagtctccagcacggcaaggcgttaaaatggatggatttgtgaaagcggataagcatcgatggtctgatcatcgttttccatatgtaataccgcaatatcgttttttgcgcatcaaacgaaaatgcgaatattggagaaatagattcctacctttttttattgtatataggcttcttttcgagcactataaaattaaatatggaaccgatataccagcaaaggtacagataggaaaagggctacgtattgagcatttaggtggaattgtagttaaccctaaggctaaaatcggtagcaatgtaactttattaaatggtgtattaattggtgctcaaaatagagggaagcataaaggatttccagtaataggtgattatgtttggattggaacgaattcgataatcgtaggatccgtacatgttggaaacaatgtactcatagctccaggctcttatatcaattttgacgtaccagataacagcattgtactaggaaatccaggaaaaataatccataaagacaatgcgatcgaaggttatataacctatccgtatgagggagactaatgtctttagttacaataattcttcctgcgtataatgctgaaaagacgattgcaagagcgatacaatcagcgcgttgccaggagtattcagatttagagataattgtaatcgatgatggttcctctgattcgactttgaacatttgcaatgccttagctgataaagacaataggctcaagatctggcatataaacaatagtggcccaagcgcagcacgcaactacgggctatcacaagccaaaggtgaattcatttgcttcatggacgcagatgatgagatgagccctacaatgatttcacagttagtatccaatatgcaggacgacacagatctagtggcatgcggatacaaggtccgatccaataacggagattacgctttcgagcaaaagcttgacgacaaatcatatcccaataatcgcttatatgaatttatcgaaaacctccaagaagcaaaagcgttcaatcctttatggaataaaatattccgtcgcagtattatcaacgataataatataaaaatggatacaaccgttgatatgggagaagattatctattcgtcgtagattactgcgagaagagtgaaaaagattgtaaagcactatcttcatctttatatatctacgaattatctaataatggtttacaagtctctgcaaataaaaataataatcttaaacgcagattgtctcaactggataaattggagaatttattcaaacgaagaaattatccaatgaatgcaatatataaagaaaaattacgcattatatatacctcattattggaatccaatgatttacatgatgacttgattgaagtattagaaaatggttatttagatgatttaattcattcagatataaatctcggtaaaaaatataccgtttttctggaaattcttagaagcagacatataggtgttgcatatttatctatgaacatctttagggctgtgaaaaagatacaaggaaaaagttttaactggggatgatatgaaattaagcaagaatcttcagatattatttatagcgctcgccattatccccttcttccaaagcgcgattgggtacaaatatccaatacttggacttagtgttcaatactcgaggtattttttctttggaataatcattattctgattctaattaatacccatgcttttagttttataactagaaatacgaaaatatatctaaccattttgcttatatttatatttttcacttccgctgttgtgaataatacgaatatcgtgtcagtttttcagttgtctttatatctattgtatccgttcttgctgttctctgtatgggcagatagctcgaccggtactttaaacatatgtaaaggcataacctatggtctaaatacacttgtccttataaatcttttcatcatgttattttttccacaaggtttatatcaaacaataagttcgaatacaatatcatattattatttgtttggcgcaaagaatcagatggttgcgccaattatgacttgtttgttctttaatatggagacagcatatagaagttataataaaattataacgagaacatcgttatctatgtgctttatatgtgcgtttgaattaataataggtggtagtggaactggccttattgttttagcagcatttattattctgtgtttgcttgaattgaaacatcggaaaattagttccaacttatcactagtcgtgttacttgcatctttcttggccattgtcattttcagaattcagaatatcttcagttttcttattgtcgatattttgcataaatctttgacgctttctgatagaacatatatttgggacgctgcaattgaaagcatcttgtcacacccaatacttggaactggaatcacagattcgctatcaggtaatgtgcatttaaaacttagctatttggtgaaagatattttcgctcatgatctttaccttgattatttgcttatgggtggaattccggcattatgtatattcgtttgcattctgatttctgttaaaaaatcttacgatagttttttgaataagaagaataccttaatttggtggggaatagtagtatatttatttgcttccattgttgaaatatatacgactaacttctgtctattcctcatgtttgcatatatcaacatatgtgattattcaactagacataggtatgaaggtcaaaattaataggataatcatgactagtttgaaaaagaaccttgtttataatatggcctatcagatattggtcatattacttccgcttattacggctccttacgtttctagggttctcggagttgctggcctaggtacgtattcgtatgtatattccatttcatattattttggtcttgtaggcatgcttggtatcaccaaccatggtagccgaagtatcgcattgtaccgaacggacaaggttcagactgcgcaaacattttggaatatctacgcgattcagtttatcagtacaggaattgccgttttttcatataccatctttgcttttgtcttatttaatggcaataagatagttgcctatattaatattctttttgttatttcgtatttacttgatattaattggctattctttggtcttgaacagttcaaaataacagtcatcaggaacacgattatcaaagttgcgaccgcatgctcaatttttatcttcgtaaaagatcgcaatgacttatggttgtatacgctgattatggctctgggagcttctctaagtcaaatctatctttggatgaatgttcataagttcgtttcattctgcaaaccagaatggtctgaagtgaaaaagaacgtcaagccagtaataatattattcatacctgcaattgcctatagcatctacaaagtgttagacaaaatcatgcttggcgccatgtccgacatgactcaagttggtctattcgacaatgctgaacgaattgtaaatatccccgtcagcctcattaccgcttttggcacggttatgctgccgaggatttccaatctcatcgctgccggggactctaatcaaataaagaaatacaacgccatctcgttccgctacttcactatgcttgtctgcggtgcggcttttggtcttgcaggaatcagtaatattcttgctcccgtttattttggagacgaattcaaaggaagctcacctattatatttggcttaagctttagcctcatttttatgatctgggctaacatcatacgaacccaatatttgattccaaacaaaaaagatatgccatatgtcatctcaacattgtttggcgcggctattaatatttcagtaaacttgctcttaattcctcatttgcaggcggtaggcacgatgattggcaccattctagccgagctatctgtattttgcgttcaatacttattcaccaggaaagactttccaactcttcaatacctgaaatcaggaatcatattcttcccaataggggcattaatgggtgtcattgtctggattgtcggtcagattcttggcccaacgattatcactctgattattcaaattattcttggtgcattcatctacgggattgggtctctgatttatctaattgcaatcaaagacgacatattcatctctatgttcaaaaagacttttcatattaacgcaaattcacgcctaccgaagcatcgatctgtttgatttaagtatcaacaaaaaggagaaataatgtctcgtaatgataaaaccgctactattacattccataattcttacaactgtggatccatgttgcaagcattagctcttcaaaaagttttaattgacaaatatggtgtcgataatgaaattcttgatttttcaaatcaaggacaaaaagaaatgtacagcaccttttggaaagttactggctttaagtcatttatcaagaatgcactttgggctaccgtttataagcgaatcaagcagcaggctgccgcatatgaagcgttcgaacataaatatttccgtctgtcacaggatacctacacttccaataaagaattaaccgccacgaattccaagtatcagaaattcatcactggcagtgatcaggtatggaacattcgatgcatggatgctgatgatgcatattatttgaactttgtttctgatttcaacagacgatacgcatatgccgtgagcttcggcgctaacaatccatttgcggacagctctcttaaggatcactaccttaatcttgtcaataagtttaataagatttcggttcgcgagcagaacgcaaagaaatgggtttccacagccaccggcagagaggtctcgctttgtgtggaccccaccatgttactttctcaaggagaatgggaaaaaacagtacagctcggtagtgccccaatcatccaaggcgactacatcttctattactgcttcagcatctcacaggagatagcatccttcctccaccaagtatccaagaaaaccggtatgccggtatacttctttgaacccaaagaatgggctcttcgctgctgctggaagaacaagattcgtctggtaaagaaatatggcccggaagccttcttgaattacatgaaatacgcaaagatggtcttcaccacttccttccatggaacagctttctcaacgattttccataagaacttttggtacatcgattccgggcataatgatttgtccaaggacgatcgtgctgtatcgttcctcactcagcttaagctcacagatcgttacaaaacaatttcttcacttctgcagacagacctgtcactaattcccgattacacccaaccagatcaagcgcttgcaaagctccgcgaagaagcttttgaatatattgaaggcatagtaaatgactgataaatccgataagcaggcgtacctgctcatggcacacaacaatcttgagcagcttaacttcctaattagatctttagattcagaattcagtgatatctttcttcacctcgacgctaaatctaaaattaatccggatgagattgttagacctgtttcttcccaactttatttctgtgatcgaatcaatgtatattgggcggaatacagtcaagtgcaatgtgagttaaatctattgcgcctcgctactcggattggtaagtataattactatcatctgatatctggtatggatttccctttgaagaaccagaaggaaatccataccatgttaagaaatcgaaacgatatattcattcatttcactacacataaaaatgttgaactaactataccttttgtacggtactaccatttatttcaaaaacaactttgtgtagcaaacagagatcatactttttctatctacaaagtatttgaaaaaatatcgattttaatccagcgattaatacatctgaaccgtatttcgactgatattgtaatcaaaaaaggagcgaattggttcagtatccctgacgatttcgcaagatacgtccttgaccatcaggattgcataaagaagctatttaataatactcgcagccctgatgaattctttatacagactcttgcattcaacaatcccgattacaagaaacgtatatacaggttcaaagaagacgattcatctgaatcatgcctccgccatatcgattggatgaggggcagcccttacactttcaccataaaggattatgatgaactcgttaactgcgggatgatttttgctagaaaattcgatttgaacaaagacagacaaatcatccttaaactcatgagtcatctttctggctaaaagcagtcaacaagcttgaggcatatgtaatagatgatcgcaatgtggcctgtttttgctttatgcacgtccaacgccagttcaaaccggaccaggaacttgaagcttgcaggtgactggaagccgaaaggtgtcttgtcggcttgcgtcataacggcatcgccgaataggcccatccaacggggcgtttccacggggtacccacccccttgtaggatatgagagcatggctgatgaagtgtttactcctcataacatcattgtgaccggtggttgtggtttcatcggttcgaatttcgttcattacgtgtataacaatcatcccgatgttcatgtgacggtgttggatgcgttgacgtatgcgggcaacttggagaacatccgtccgatcctgggcgaccgtgtggagttcgtgcatgggaacatctgcgacgcggagctgttggatcgtctggtgccggggcatgacgcgatcgtgcactacgcggcggaatcccacaacgacaactcgatcgcgaacccggagccgtttttgaagacgaacgtggagggcacgttccgcctgttggaggcggcccgcaagtacgacgtgcgctaccaccacgtgagcacggacgaggtgtacggcgacctgtccctggatgatccggccaagttcacggagcggaccccgtaccatccgtccagcccgtacagctcgacgaaggccagctcggacctgctggtgcgcgcctggcaccgcacgttcggcatccgcgccaccatctccaactgctcgaacaactacggcccgtaccagcacgtggagaagttcatcccgcgccagatcacgaacatcctcgaggggctgaagccgaagctgtacggcaacggggagaacgtgcgtgactggatccacacggacgaccactccaccggcgtgtggaccatcctgaccaagggacgtttgggcgagacgtatctgatcggcgcgaacggcgaacgcaacaacatcacggtgctgcgcgacattctgaccgtgatgggccaggattctgacgcattcgactgggtgaaggaccgtcccggccacgaccgccgctacgcgatcgattccaccaagctgcagaccgagcttggttggaagccgacgcacacggatttccagaagggcctggagcagaccatcaagtggtacacggacaaccgtgcctggtgggagcccgcgaaggccgctaccgaagccaagtacaagcagcagggacagtgagtagatagaggggagttctaccgtttggtggctcccctcagtcgccttaaggcgacagctcccctcggagaggggagccagggattaaggggaatgtatggcatttgaattcgagaaggaactgaaggtcacggagacgaacatcccgggcctgttggtgtttgaccttccggtgcacggcgacaaccgcggttggttcaaggagaactggcagcgggcgaagatgaccgcgttggggttgcctgatttcggtccggtgcagaacaatatcagtttcaatgcggtcaagggcgtgaccaggggtattcacgcggagccgtgggacaagtacatttcgatcgcggccggtgagattttcggcgcgtgggtggatttgaggcctggcgagagcttcggccaggtgtttacgacgcgtcttgacccgagcaaggcgatctatgtgccgcgtggcgtgggcaacagcttccaggcgcttgaggacgggaccgtgtacacgtacttggtcaacgcgcactggagcctggagcagaagaagacgtacacgttcgtgaacctcgcggacccggaactggacatcgattggccgattccgctgtcggagtcggagcgtagcgaggcggatctgcatcatccgatgctcagggatgcgaagccgatggcgccgaagcgtacgctggtgacgggctgcaacggccagttggggcacgcgattcgcgcgtacgcggaggcgcatggtctggaggggttcgagtacacggatatcgacgagttcgacttctctgacccgaaggcatacgaggcatacgattggagcctgtacggcacgatcatcaacgctggtgcctacacggccgtcgacaaggccgagaccgccgaaggccgtccgatcgcgtggaaggcgaatgcccagggtccggctctgctggccaaggtggccaaggaccaccacatcaccctcgtgcacgtgagttcggattatgtgttcgacggcaccgccaaggaacacacggagacggaggcgttcgccccgcttggcgtgtacggccagaccaaggctgcgggcgatatcgccgtggccaacgcacccgagcattacatcctgcgttccagctgggtgatcggcgaggggcgtaacttcgtgaagaccatgatgatgctgtccaacaaggtcgccgacccggccgacaagctgaatcaggtcaccgtggtggacgaccagtacggtcgcctgaccttcaccaaggacatggccgaggcgatcttccacctgcttgacagccacgccccctacggcacctacaacttgaccgggtccggtgcggtcaagtcgtgggcggagatcgcccgtgaggtgttcgatttgacgaacggtaacggcgacaaggtcaagcccatctcgacggccgagtatttcgctaacgcgaccagcccggtcagcccgcgccccgtgcacagcgcgctcgacctagcgaagatcgaggcggccggatacatgcccgccgactgggaggaaaccctcaaagaatacgtcacccgcgaactcaacaagcggtgaaacaggaagtgaaggaaaacaccatgaagggtattatcttggctggtggttccggcacacgcctctacccgttgaccaccgtcacgtcgaagcagttgctgccggtgtatgacaagccgatgatctactatccgctcagcgtgctcatgcttgcgggtatccgtgacatcctgatcatctccacgccgaaggacctgccgaacttcgaaaagctcctcggcgacggttcgcattacggcgtgcacttttcctataaggtgcagcccagcccggatggtctggcgcaggcattcctcttgggagaggagttcatcgacggcgagccgtgcgcgctcgtgctgggcgacaacatcttctacggcaacggtctgggtgccacattgcgcaaggccgtcgccaaggccgaaggcggcgagggcgcgagtgtgttcggctactatgtcgacgatccggaacgctatggtgtggtcgagttcgacgagcataagaaggccgtgtccatcgaggagaagccgaaggagccgaagtcgcattacgcggtgacgggcctgtatttctatgacgagcgtgtggtcgagttcgccaagcgggtcaggccgtcggctcgtggcgaactggagatcacggacctgaacaagatgtatttggaggacggctccctgaacgtgcgtacgctgggccgcgggtacgcgtggctggatacgggcacgatggactccctgtacgaggcgggcgagttcgtgcgcaccgtacagcgcgcccagggcctgcccatcgccatcgtggaggaaatcgcctacgaaaatgagtggatttccaaggaggagctcctcgaatcggccgaacgttacggcaagagcccctatggcaagcatctcaaggatgtggccgaaggcaaagtcgtgattgttcctaacgactgattgactcggacgaatgcggaaatgccatagtattttgagattaatgctgagtgcgatagcagattacgcatttgccgatgtatatgacgacattgttcatcaatagtaaaaggggctgctgcattgcagtatgcagcagccccctatagcgtgcaataacgcgaattcctgtaccttggtggttattctgcctttttgcggccgcggcgcttcatggtgccggcggtggcattggccgcatcgaagatcacggtcttgctttcggggtaggcggtaccgttgacggactggtaggcgatttcaccttccggagcctcgggcagagtgaagtatgccttcactgcttcaatgagcgtggcttccttgacgcttaccgaagcagcctgcttgccttcgggcttgctgaacttaatggcgttgtcggcctttgcggtggtcggggtcacggcgatctgcttggtcttgtcgttaatcagcaccttgacgtacgccgggaatccgagcacttcagcggtggctttgttgaaacgaatggcggaatcggtgacggtcagaacggtcttgcccaccggcttgaccagctgaacctcttcgaatccctgaagcaatgaagccataattgctctccttattgcattggtcacgtgtttttatttacgtcactaattgtaaccagctaatttcgcattatgcaaatcatatgcatgcatgattgcataattgaagaacatttgacctacgtattgcgctcctcgaatagcactgatttaaccaataccaagaaaagcggaaacaagaacccgcaatatcagccgtattgaatatagcaatatgcaatttcaacatcgcaataactgacggcctttttgcttgctctattcgccgatattgcattcaggccacagcgccgagcataatatcgacgccgtgcttgatctccgcatacacgcgttcaaacacctcgcgtgattgacgatgagggtcttcggtttcgagtgccgtaggcaaaaacggccgcagcataggtacgcaatccatgatttcgatgagcttgtctgcggcggtatcgccggcaatcggactctcagcatgcatatgtttgcaagcgttcacgaagtcattgaacagaaatactttgcgaatagccagtggattctgctcaagcaaatcggaaatttgctcacgctcaaaacacagaatcaggtcggcttgccggctgatatcggtggtgagaggggtggaagaatgggaattcgcgtcgatgccgtcgttcttcagcaaatcgataaccatcggatcagcgggatgcgggggatagtgcagagtacccgcgctgcgcacggtgatattgccgctctgcaagccaattcctcggtcggcaagcttggctcgggtgtagtattcggccatcacggaacggcattgattgccggtgcatacatacatgatttgcataacaacgtcccttctcaagtgttgtgagcattccctcatatattccagtgagcattcttcgcgaatatgcgtgcgttatgtaccgtagcaataacatgaaaaaaccgggaatcatcgactcccggttcagtggtattcgcgaactatgcttcagcgtctaccgtttattatgtcagtcacgtcagcgacgagtggtgctcttgcggacggcgaacagggcgatgcccgcggcggcaagcagcacaacggccacaccgtacggtgcgatggccgcaccggtgttggcggtggtagcagtcgtggtaccggactggtcaccggttccggttgccggaacctgaatggtggcggtcttggtaccggatacagcgccaacagccttgaccgcgatggtcttgccagcctggctggccttgaacgtgtacagcaaagtcaaggaaccatctgccttggcagtgaacgtcttggatacttcagcgatctgctggacgtcggcgacgatggcatcatcgtagtacacggtgacggattcattcggttggaatgtgcctgcagggaacgtcacggtagcggtggtgccgctgtaagtaaccgttgcaccgtaatcatcagccatggcggtattcgttgcgaaaccaaagcccagaactgcggcgataacggccagcacggccataatcttcttcttcataacttcgaacctccacaatagaaccggttactaccaataaaaaatcggttcttatcaatagaaaatcggtcttttttcaattacagcccccaaccatacaccccccccttgccggtgtataaggggtaattatgttaacggataaggggggtgtgacaacgtggtcacatcatgtgacaacgttcgaacatattgtcgccgcattaccgttgcggcggggtctcctgacgttctgaaaacgttgctattccaacgattgcggtgattggcgatacgtgcatggtaaacaacagggaaatttttttctgcgacacgccgacgggctactcggattctgattcgtactcgtcgtcaaaactgaacaggtcctctacggtggtgccgaacacccgcgccaaatccatggccagacgcaatgatgggcagtattgcccctgttccagccttcctatggtctcacgtcgcacgttgaccagatcggcgaggtcggattgcttcataccgcgttggagtcggtgaagtttcagactagtcttcatcgtcgcccccggtgccggtatcgtgttccaaccatagatatcgaatatcggaaatggccaaggcgcacatggccaatgcgggcagtagcattggcggaataatgtgaactatcgagcggtcaatcaaattcagtgtggtgtagatgaaaccgacaattaccagaatgcccaccaaactgaccagcgcgaattgcatggccgcgctttgatgcatatcggaaagctcgtcgcgtcgcgggttctgccgtcggaatacagtcatgccccatacttcgccgccgatccacaacagcgccgcgatcgctgccacgattactccgagcaggttattgccaataagagccatcagcatgcaggcaatggcacctatggattcaaggatggcacgaaagcaaatataccgattaaaggtcatggccgtctccgtgaattatgcgagcgatattgaattgcatacgcaattataaagttaggggggtaaccccttgtgtggtggttaggccaaccggcggaggttctttgcgtagaccgagaataatcgcaatcagtaattgttatgggcgatccagtagttgtacgctgcgacgatgccgccgtagcgctgctcgcagtagctgatgaaccacttgaactgggtcttgtagttggtctgccagtccgcgccggcggaagccatcttgctaccggggaaggcctgacccaagccataagcaccagacgtggggttggtggcggtggggctccaaccggactcgtgattgatgatgtagttcgcagcggtgaagtccgcttcgctatacccgttgtctaacagatactgatgcgcccaggactgaacttctccagccggaacagtggtgccgagatcggccgacgatgatgacgacgtcgacggcgactcggtggaaccagtgcccaccaggatcaccttatccaccggggccttcttgacccatgaggtgaatacgttggaagagacgaccttgtcgccggctcgcttgaccagcgaggtggtctccataatgcccttctggccctcggtctcgaccttttcctgacccttgggcaggctgctggtctccttgcgcacttcattgaaggcgatctcggtatcgttggtctccacatcggcatccgcgcgattaatggtgaccacggtggcctcggtgaccttggatttcagcgagggcgatacggcatcatccgggtcaagcgtgatatcacccgtctccagcacgtccttgacggtggtcatgttggctttttcgccaagtactacgcgcgaatcgccattaatcttcaccgtaatgaacgtggtgttcttgtcggcgctgttgattgcgccacgagtggcagaacgggatgcggccgaatcggtagccgagaacgaagtgatggtggaaatcggcttcacatcatcagcatggtagaaactgcgcgacaccaatcccgccgcgccgagcagacctgccgcggccaccacagccgcgatcttcatccactggcgcttgttcaacggcctgagcatacgggtcggcttggcatgtctcgtcattgcgctccttgattggatttcacactgcccaccatgataggcggcgcagtggatgaaggaaaatcaggctcaggcctgctggtcggcaccggactgggcggccttggcggcggcgaggtcgagtgccttggcctgggcgatcagatcgtcgagatcggcggcctgcagcgcgccggcctgctggaagatgacctcgccctgcttggcgatcatcagcgtgggcaccgcctggatgccggcggcctgggccagatcctggttggcgtcgatatccaccttgacgaaggcgatgttcgcgttctccggctcgttggaggccgcctcgaaaatcgggccgaacgcgcggcacgggccgcaccaggtggcccagaagtcaacgaacacgatctcgttgtcggtgatggtcttctcgaaatcggcagaggtgatggcggtggttgccatgatgttcctttcttctgtgttttccttggcgtcgccgtacggccctcgtgcgtggccgccgggcgattgccttattcatgcaatacgtcttggcgcttggagccgtgcggttcgtggccgtcggctccctgctggctaccagcttcccagcaccacccaacatttgtgtcgtattttccgccgccggccaaacgtttcccaagatttcgctggaaggtgacgcgcggcgcgctttgacgcgcaataatgggatgcatgccagtcatgaatgatgaagtgcccgacgagggcgattatgatgccggccgtggccgcggcgaattcgacaacatcacgcccgaggacttcatccacgggggcggttccggccacggcaacccgccgggctggctgggaccggccgacatcaaccgggcgcgtcatcagatgcccatcgcatacgtggagatcgtgcccgtgcgcaccgatgagatgggccgcatctcccaggtgggctcgctgctgcgcgtatccgatgacgggtcgatcgaacgcacgctgatcaccggccgtgtgctgtaccacgagacgctgcgcgaggccatcgcccgcaatgtggccaaggacctgggcgacatcgccctgccgctgctgccggtcggactccagccattcaccgtggccgaattcttccccacgccgggactgagcgaatactacgatccgcgccagcacgccatcgcactgtgctacgtggtacctatcgccggcgactgcaagccacaggacgagacgctggatgtggaatgggtggatcccaagagcgacgtaatgaacacgttcgtggcgcagatggtcaacggccacgggcgcatcgtgcggcaggcgttggcctgggccggaatctgacagttgttttgcttcccgctggtgggacgtgaatgtgaaggagtaattcatggcaatcgaattggccaatcatatctatcgcgatggcgaaggcgtgccggtggtgctgatgaacgcctacccggtggaccaccgcatgtgggacgtgtgcgcgaaggcgctcgccgactccgccgacctgaacgatgtgccggacttcccgatctgggcgccggatatggccggctccggcgcatccccggtgccgagcgatgccgattctggcccccgcatggcgaacggcgcgtacagcgaggcgctggatcgcctggccggagcctacgtggacctgatcaaggccgccggctacgagcaggcgatctgggtcggactgtcgatgggcggctacgtggcgatggacatccagcgcctgtaccccgaaacggtggccggactggccttgtgtgacacgatggccgcgtccgacggtgtgggcggagagaaccgactgaagatggcggacgccgccgaacagacgaactcggtcgaaccggtcatgcacttcgcgcaaccggccgatggcgattccaccgtcaagaagactcctgaattcatcgcgaccatgaccggctggatcaacgaacagaacccggctggtctggcctggcgtcagcgcatgacctatggccggcccgaactgggggcggtgccggaaacgattagcgcaccgagcctggtggtgtccggcgaactggacccctccagcaatccgagtgtgatgcgtccgctcgccgagcgaatcgccggcgccgaattcatcgacattccggactgcggccatttcagtgccgtcgaacatccggataccgtggcgcgagcactgctctcgctcgtcaggcgcgtgcagaacgcgcagaagaacgcataggagacctcgatgggcactgacattcatttttcgcccctggcgctgactcatgcgctgccgttcctgccgctcgcgcaaggtgacatcgactatcaggtggaccggcgcggtgaacccggcctgatcgacgagctgttggccgagccggccaccaaagtcgtgcttacgcgcggcggacttgtcgccgtaccgcgcggccaaggtgagctcgtggactatgagaacgtgaaaatgcggctcgccacgttgccgggctcctatgtgtccgccgaactggcacgctaccccgaagcggtcgccatgttccttggctcctatgtcggggcgcgcggcgaatccgtggtcgccgtggatatcacgcgcgtgccggaagccggcgttcccggtgttggcgggattgctggtgtttccggtgctgccggcggcgtgctcggcacccaggattccggcaccgtggacggcgcgctgggcaagaacggcatcagcggaggtgctgccgccggaatacggcagccgggaaacgccaagggcaatggcggcgtagccgcagccaaaatctccgggccgctcggtgtaccggattcggcagggcaaggtgcggacgatgccttcgatgattcggtcggcgcgcccgtacaacccttggccccgaagcccacgctgctgcaacaggccgtgacccggttcgactgggtggacctgcgcggattcgcccctcacgccaacgcgcgcgaggctgggcaagccaccagtgccatcaccttaagcatctggcacagccgccagcggttctgccccacctgtggcgcggcggtccggccggcgctcgccggatgggcgcagcgatgcaccaacgaggcggacggcaaccgtgtgctgttcccgcgcgtggagccggcggtcatcaccgccatcgtggacgggcacgatcgtctgctgctgcaacacaacgcggcatggaaggattcgaggctgtattcggtgtccgccggatttgtggaggcgggggagaaccttgaacacgcctgccgccgcgaggccatggaagagaccggcatcaagctcggcgaggtacggtacctgggctcgcagccgtggccgttcccggcttcgctgatgatggcgttcaaggcacatgcgatcaccaccgacgtgcatgtggacggcgaggagaccatgaccgcgcgatgggtcacacgcgacgaatacacggccgagctcatcgccggccgtatggcggcgccgggccgcgccaccatcgcccgctacatgattgaggaatggctcggtcgcgagctgtgacggaccgcgaagataggttaggcttatgactatgagtgatgacaacgaaaacgaacagccgctgaacctcgacattcccgaccacctcgaatactccgaggagcatgcttgggtggaccgttcggtcgaccccgcaatcatcggcataaccgaatacgccgccgaccagcttggcgaacttgtgttcgtggatttgcctgagcctggcgcccgtgtggaggccggcgacgagatcgtggagcttgaatcctccaaggccgtccagccgttgatcagccccgtggcgggtacggtcaagtatgtgaaccgtgacgtggcggacgacccgtccgtggtcaacggcgatccgtacggcgaaggctggctgctgaaggtcgagcttgacgacgatgagccggagctgctgagcgccgacgaatacgcgaaggtcgtgcggtagttccacccatagctcccctccctgaggggagccagtatgtggcatcaaacctatatgcatcgtgcctcttatggagggaagccaagaaaatgaggcgtatggcctatattggtgtctatgagaagcccacgcgaggattttgaggcggcaggcaagcgactgccttgggatgctgctgctcgcaatgcagcgctgtccgccaccgcgccagtctctgacgtcaaggcatccgccaatggcgccgacaatgccagcaatgccagcaatgctgaacattccgatgacatgcccaccgtgccgattcccgcacgcaaggctgccacgacgttcgacaccc

SEQ ID NO: 1062 - DNA, 19514 bp, Unknown
  R13_10m  MAG No. k141_4263
cacgagcttgcccagaccgaagtccatgcccgtgacgagggccatcagcagcagcacgaagataaacacagccagagaccagaagaacagttccttggcagtaggggttacgaccttgcgaagctcgtcgatgatctgcttaataaacagaccgatacgcatgaagacattcggcttgactaccttttcgctgttgttcgtcttagccattctgtacctcgcgtcagctgcttgattattgaaaacttggcagggaaggcgggactcgaacccacaacctacggttttggagaccgttgcgctaccaattgcgccacttccctaggtgaaaatccacctcggcgtgcattccgtagagaacgcttcgccacggcgaaaccgccaagttgttatagtaacggctccggtggattatcgcaaatcgcgtgtcgcgcgcgtggcatgtgcgcggcacacgactcttctcagttagctcagttagcccattccttgaatcgacgcatgccttcggctaggtcttcgtcggccagtgcgtaggagaaacgcaggtaaccgggagcaccgaaggcctcaccagggacggcggccacgtgggcctcatccaacagtgcggcggcaaaatcagcggacgtatcggacacagtgccgttgggccccagcggcttgccaagcaaagcggtgatgtccgcaaaagcgtagaacgcaccggtcggagtcgggcagttgacgccctcaatatcgttcagagcagccacgatcgcgcggcgacgtgcatcgaacgccttgcgcatctcatgcacctcgtccagcgggccagccacggcggccagagccgcacgctgggagatgttggccacattggaggtcatatgcccctgcagcttggtggcggccttggccacctcaagcggcgcgaccatccagcccacgcgccagccaggcatcgcataggtcttggccacgccgttcagcaccagcagctgcccgcggcattccggcacggcggcaccaatgtaggtggtgcgcgcgtcgtcgtagttcaggtgctcgtagatctcgtcggagataacccagatgtggtgctcgacggcccaacgaccgatcgcttccacggtttccggcttccagacggctccggtcgggttgttcggggagttgacgatgattgccttcgtacgctcggtacgggccgcttccagcgcctcaagcgagggctcgaagttcacgtcggcaccggcgaatacttcgaccggcacgccacccgccaatttgacggcttcaggatagctggtccagtacggagcggggatgatgacctcatcgccatcgttgagcaagatctggaaggattcatacacggcctgcttgccaccgttggtcaccacaacctggtcggcggacacctcgtagccggaatcgcgcagcaccttagccgcaatcgcttcgcgcagctcgggcaggcccggcgtaggcgtgtacttgtaattctttgggtcaaggcaggcatctgccgcagccttgaccacgtttgcgggggtcgggaaattcggttcacctgcgccgaagccgataacgtcaagtccggcggccttcatggccttggccttggaatcgacggcgagcgtagcgctcggtgccacagtgttgatacggtcggaaagagtctgccattgcgccatagtcatggcttccatgctaaacctacagcacgaaaaatcgccagagccgcactatggtgatgggatctgtcgtgtgacagatcccatcagtcacacaagtacaagattgtcgcgatgaaccagtgggtgggcgtactgggggccgaggaaacgcttgagttgggcggtgttacgcccgagcatctgcggaatttcttcggaatcgaagccggcgaggcctcgggccaggtgttcgccgctttcggcatcgatccagaccggatcgccggcggaaaaatcgccatgcacttcgagcgcgccggccgccagcagcgaggcacgcccgccgcgaatcgcctggccggcacccgcatcgaccacaatagtgccgcgcgggtcggcggcgaagccaatccacagacgacgcgacgagccgcgggccttaaccggtgcgaacacggtgcccaccggatcgcccatcatcgcagggcccgcgttcgaggcgcaagtgagcaccgtggggatgccggagacggccgccacgcgcgcggcctcaagcttggtgaccatgccaccggtgccgaccttggagccggagccggaaacctggatgtcgccaaatgcatcgataacgttgggcacatattccacacggcgggagccgggctgggaaggaggtgccgtgtatagcgcgtccacgtcggtaagcaataccaaagcttccgcgcgaactaggttcgcaaccaatgcggacagacggtcgttatcgccgaatcgaatctcgttggacgccagcgaatcgttttcgttgataatggggaccacaccaaggtccagcaatcggtccagcgtgcgttccacattgcggtactgggtggcacgaatcgtatcttcggcagtgatcagaatctggccgacgcgaataccgaaacggccaaaagcagtctcgtagcgagccataagcaaaccttggccgaccgctgcggtggcctgctgagtagccacgtcggccgggcgttcgtcaaagcccagcgggccgaagccggccgcaatagcaccagaggaaaccagtactacacgcccgcccatcagtcgtatttgggcaagggcagcggccagagcgtcgagcttgtccgggtcgaggtgaccgctcggctgggtcagcgagctggagccgactttcacgacaatggttccggctgctgcgaccatgcgccgcacctcggcctgactcggagtgctcatttattcctcggtttcaccatcttcgctggactcaccgtggccgaacagactggtttcgtcatggcgatcgtcgtcaacggtcgggtcggcccagtggccggccttgcgttcggccatcatcgcgtcgcgcacggcggcacgggcgtccatcatctcgtggtattgggcacgacgttcggcgttggagcggcggtgcgtgcgcgggtcctgttcctcaagacgcagatccttgcctcgggcaccgaggttggagccgtcgagcatttcggcaccggcggagatggtcggatcccaatcgaattcgaccatacgggcaccgcgaccgatgcgcacctcgtcaccagggtgggcacccttgcggcgcagctcgtcttccacgcccagcttggccaagcggtcggccagatagcccacggcctcgtcgttgtcgaagttggtctgcatgacccagcgctccggcttgacgccacgcacctcgaagaacacttcgccattgccgagttcgcggcgctcgaccgtgaactcaagcgcactgccgccctcgtcagcgcgacgcggacggcggcccttggtctccaatggcttgatgaccacgcgcgtctcctcttcggcctgctcgcggttggccacttcctcacgcatctcatgcaccagcgcagacaacgcgaagttgagctccttcagcccctcatgagaggcggtggagatctcaaagaccttcagcccgagtttctcgaactccggacgcacgaactcggccaattccttggcctcgggcacatcgatcttgttcagaatcacgatgcgcgggcgttcgggaatcgggatggcgcccaatggcagttcgagcttgtcggcgtagagtgccaactcgttttccagcgcgtggtagtcggacatcgggtcgcggtccggttcaagcgtggcgcaatcaatcacgtgggcgatgatttcggtacgttcgatgtggcgcaggaactccagtcccaggcccttgccttcagaggcgccaggaatcaggcccggcacgtcggcgatggtgtatcgagagtcgccggcgatgacgacgccgagattcggcaccagcgtggtgaatgggtagtcggcgatcttcggcttggcggaactcatcgccgcaatcagggacgactttccggccgaggggaaaccgaccaacgccacgtcggcgatggacttcagttccagaatcacgtcgcgttcctcgccgagttcgccgagcagggcgaagccgggggcgcgtcgggtcttgttggccagggcgatgttgccgaggccgccggcaccgccctgggcgacgacgcagcggtcgccctcgtgacgcaagtcggcgagctgtgcgccgggatgcttggatttgccctgttcgccgcgcgcctcaaagacgacggtgccgcagggcacgggcagaatcaggtcctcgcccttggagccgtccttattgtcgcccaaacccatggtgccgctgccggcgacacgatgcggcatgaaacgatagtcgagcaggctggtggcgttacggtcggccacgaacaccacggaaccaccgtcgccgccattgccgccgttcggaccggccaacggcttgtatttctcacgacggatgccggccgaaccgttgcccccatcgccgcccttgacatggacggttactcgatccacaaaatcactcatattgattaccttacaaaaaagccgcgtccttacgggcgcggcttgaaaaagcttgacgctatatcgctcaggcgatgacgtcgacaaccttgcggtcgcgacgcacaccgaacttcacggagccatcggtgagggcgaacagcgtgtggtccttgcccatgccgacgttgtggcccgggtggaagttggtgccacgctggcgaacgatgatgttgccggccacgacggcttcgccgccgaacttcttcacgccgaggtattgcgggttagaatcgcgaccgttgcgagagctggacgcacccttcttatgtgccatgattcatggtcctttctataactcaggcaatcgccgtgatcttgacgatagtcagcttctggcgatgacccttacggcgagcaacaccagtcttgttcttgtacttctggatgtcaatcttcgggcccttggcttcatcgttcacaacctcagccttgacggacaccttggccagatcggcggcggcgagggtgaccttgtcaccatcgacaacgagggagaccgggaattccacggtatcgcccttcttggcgtcgagacggttcacgaggatgacgtcgccaacctcgaccttttcctgatggccaccggccttcacaatcgcgtacattatcgttccttttatgttttggaaagctaccttgcctaacacgcaccgagcctgcggtcagacaccgagtttcaaatctacaccaccatgcggactaaatcaaatgatttttgcccgcgtgtcaagcacgacacacctgttactcttccgccgtattgttggcggcgacggcagcggcggcaatctgagccagtttggctttgacgtcggcgctggaaccagccggttcgggagcgggagcggtgccgcgaccgtgcttgttggttttgacgaacgggtcgccaccgcgaagcgcgtagggatcgtcgtagtcggccgaaacggtcggctgatcatgcaggatgaaaccacggcccttgcaggtcgggcattcctcggagaacgcctcgaccagaccctggccgatgcgcttgcgggtcatctgcaccaaaccgagcgaggtgacttcggccacctgatgcttggtgcggtcgcgtgccaggcattcgaccaagcggcgcagcaccagatcgcggttggcgggcatgaccatatccacatagtcgatcatcaccatgccgccgatatcgcgcaggcgcagctggcgggcgatctcttcagacgcctccaagttgcagcgcgtcaccgtttcttccaaggacttgcccttgccgataaagcggccggtgttcacgtcgatggtggtcatggcctcggtgcgatcgatgacaatcgagccgccggacggcaggtagacctgacgttccatgcccttacgcagctgggagtcgatggaccatttgtcgaacacgtccttgccttcgtgctcggccgggtcccacttctccagcttgtccttcaggtcgggggccatggtgtcaaggtattcctcgatacggtcgtagaccttgtcaccttccacgatgagcttgctgaagtcgtcgttgaagatgtcgcgcaccacgcggatggccacgtcgggctcgccctgcaggagtttcgggcgcttgccgtgccagaattcctcgcgcttggcgttgatgcgctcccactggcggaccagtgattcgagatccttgacgatggcgtcttcggatgcgccttcggccgcggtgcggataatcacgcccatgtctttcggggcgatcttggagacgatgttcttcagacggctgcgttcgcgctccgaaagcttgcggctcacgccggtcatgccaccggagggcacgagcaccaggaagcggccggcaagcgtgacctgagaggtcaggcgggcacccttgtggccgatcgggtccttagtgacctgcacgagcaccgggtcgccggacttgaacgccagctcgatgcggcgcggctgaccttcgagacgagcggcatcccagttgacctcgccggcgtagagcacaccgttgcgggactggccgatatccacgaatgcggcctccatgctgggcagcacgttctgcacgcggccaagatagatgttgccgacggtctgtacttcctgaatgtcggagacgtaatgctcgaccagaacattgtcttccaccacggaaatctgggtgtggtgttccttctcgcgcaccaccatcaggcggtccacgttctcgcggcgtgcaaggaagtcctgttccataagctggctttggcggctgcgctcacggcggttgtcacggcggcgctgcttcttggcctcgagacgagtggagccttccacatcggtgatttcgtcgatgtactgctgcttgcgggagcggcggaccagcggctgttcgctgttctgactctggtcgtcggtgccctcgccgttcttgccgccacgacggcggcggcgacggcgagtgacggtctgctcctcatcgtcctcatcgcgatcacggtcatgatcatcgcgatcgtcacgacggcgggaacgcgtatcctcggcatcgttctcggcggtatcgtgctcgccgttggcaccggtttcgccgcgtgagccacgacggcggcgacggcgcgaacgggtgcgggtgacgtcggattcctcgtcgccctcctcctcggcaatcggcgagtaggcgatatcgtccagctcgaggtcttcctcaatctgctcgacttcggcggctgcacggcgctcctgggcgttcagacggcgggagcggcgcggacggcgggagtccgaggtgtcgtcggcgtcgaaatcgtcgtgatcggcgttggtatcgccggacgcggcgtcacgggaagcgtcacggtcggcggaggcgcggccgcggtcgtcgcgatcgtcgcggcgacggctgcgcggctgggcatcgtcatcgtcgtggctgcgcgagcggcgggagcgacgagacgggcgttcgtcggcgtcaacatcgtcatcacgagtgtcagcggtatcgtgcgcatccacggcggcgggcagcaccggttcctggaacagcagggacgtcatcggcttgccacggcgcacggtctcgtggccagagggcagggattcgaccgcgtcgaacaggcgctcatccggggtgtcctcgtgcgtatccgcaactgcacggcgagaacgacggcgaaccgtacggtcttcgtcatcatcatccatatccataggcgcacggcggaggcgggagcgaaccgggcgatcctcgtagtcatcatcgtcggactggcgggagcgagagcggcggcgaaccgaacggtcctcgtcgtaatcgtcatcgtccacgactgaacggcggcgggaacgcggggcgtcatcgtcatcgaaatcatcggcactgaccgtgcggcgcgaacggcgcggacgatcatcctcgctatccaagtcggccactgcggaagcggcgcggcgcgaacggcgcggagtctcgtcgtcatcatcggtatcgctggaagatgcggcggacgtacgacgggtgcgacgcggcgtttcggcggcatcgtcggccgtggaaacgcggcgcgtacggcggcgggttggacgttcggcggaatccttggaatcgctgggttcatcggaatcgccggaatcggatgacttggaatcggccgcggtgctggcattgggaagcgcgggggcttcgaacagcggggtgcgttcctgcacttgcagttccagggaggcgccggcagcaccggtgccgcggaccacgcggcggccgccacgacgacggcgaacaggttcgacgggctgggaggcggcggcaggcgcagcgttcacggctgcagccgaatcggcattggatacggttgaattatcggttccgtcgttgacgaaaccttcacggttgtcagtgggcacaatgctcctcgcggcgcgctgcatcacgacgcctatttccaggcctatacgcttgactcacaccacgctctcaccgtggccgcgcgaaaacgcgccgcgtaaaggcaacttcgtctcaagtctgtcctgcgggtggcggacaccggcgcttgcgttgtctcattctcgagagccgcaaggggatcgacgccatctcgcacgctgatggttatgcagaaccaccatcctttagtatgccacatattttgtgcgggcgtggcccggcgaggctgacgttctctcggctcccctccctgcggtgacagctcccctcagagaggggagctagagaggtgtcagaccagccagtcggcaagaattgcggtcatggcggccaggtcggattcgggcacctgctcgtcgtgcttgtgcgccagcagcgggtcgccggcaccgaggttgacggccgggatgccgagctgggagaagcgtgccacgtcggtccagccgagcttggccaacgggtcgcggccggtgcgctccttgaccagtcggaccagatcttgggcgagcggggcgttcaggcccgggcgcgcggaggggctttcgtccttcatttcgatgccgtagccctcgaacacgccgccagtggccacatgctcgccattgccgagttcggcaccggcatccgcgcccatcatcagagccttggcctcggccagcgacttgtccggggcgaagcggtagttgacgtgtacgcggcattcatccggaatgacgttcgtgcctttgccgccggaaatcagcgtggcgttgaggccctcgcgatagtcgagcccgtccacgttcacggtggccggctcgtaagcgttgagtcggctcaggatgtcggccgccttgtggatggcgttctcccccatccacgcgcgggcggagtgcgctgccacgccgtgggtcacgacgtcgaagcgaatcgtaccgttgcaaccgccctcgatgccgctgttggtgggctcgccgatgatggcgaaatcgccggtgatccaatcgggatgggcctcgacgactttgcgaaggccgttcttttcggcgacgacttcctcatggtcgtagaagacgtaggtgaggtcgactttcggggtggtttccggcgtgcggccgtcgagcgtggcggcgaggtagagcatcaccgcgtcggaggccttcatatcggtggcaccgcggccccacagcacgcggtcttcgggatgagcgtgggcgatttcttcgcgaatcagcgaatcgccgggctccagccacttcggtgggaaattgtcgatgaccggcacagtatcgaggtgcccggccaagatcacacggttcggctcgccgaagtcggtgctggccaccactgtgtcgccgtgacggcggacggtcaggtgctcttgctcgttaaggaaggcctcgacctcgtcggtgagggggccctcgtggtcggacacggagaagttctccatgatctgggtgagcaggctgttcagctgctcggcagtggatgcggtgcggttcaattcaagcgtcatgtgaacagcgtaccgcgtgggcggcgggcccagcacacccactacatgagattttgcggccgaatacatttttatgtgccacactggggtggcgaaagggaggattatgtcaggtctaatcagcgccatgcaaggcttctgcgttatcggcatcgtgattgcggtgggatatgtcgccgcacgaatgcgaatcggcgggccgtccgctcagatggtgctcaaccgtttctccttcttcgtatcgagcccgtgcctgatgttcgccatcctctccaaggaaccgatcttcgacatcttccatccctcgattatcgtggcgttcttctccgccgtgctggtaggcgtggtgttcctggtgctcaaccgcatgttcttccacctgaacgccccggacgccaccatcggcgccctgaattcgctgtacctcaattccaataacatcggcctgccaatcgccacctacattctgggcaatccggctctggtggcaccgattctggtcatgcagcaggccatcttcacaccggtgggcctgacagtgctggacgtgaccaccaagggcaaggtctccatcaaggaaatcgccaagcagccactgcatcaaccgctgcttatcggttcgctgctgggcattgtggtctctgcgatttccgctaaaagcggctggttcccagtgccgaaattcattttcgacccgatcgacatgatcggcgattcagcggtgccaatgatcctgatggcgttcggcatgtccctacacggcaccaagccgctgcagcagaagggcgatcgcccggccatcttcacggtcgcggtcctcaagaacatcatcatgccaatcatcgcgttcctgctcgcctatttcgtgatgggcttccgcggctccgagctgtacgcctgcgtggtactcgccgctctgcccaccggccagaacgtgtacaactacgcggcccgctacaacgtgggcctcaccttcgcgcgcgacggcattctgatgagcaccatgaccagcccggtgtttatcgcgatcatcgcggcgctgctgagctgagccggcaactgtaatcaccgtaaaaaaacttccgcgaaatccaccgtaggattccgcggaagcctgagatatacgctacttgagaatcgccttaatcgcctcatactgctgagcagtgagttgcaccgctggctcacggatcagggtggaaatgttcagtcccttggccttgaccgcacccttgatggcggagatgaacaggtcggtctgatcgtacagcgccatcaggtggctgatgcgttcggcggcctcaattgcggtgccatagtcgccggcctcatatgcacggtgcagcgtaacgaaggtctccggctccacattggtcatgccgcagatcacgccatcaccgccggagacgcggttgacgagatagtactcgtcgaaaccggagaacaccgcaaaccgtggattcacggccttgaccgcgcgaatcaccttgcgggtgtggctgattgtgtcgaccgtgtccttgatgccgacgatgttcgggtgcgcggcggcaagctcggccacgagctccggggtcaagtcgctgccggtgcgcggtgggaaattatagaggatcaccggaagattcgtcgcttcagcgaccgcgccgaagtacgccttcgcgcctcccgcagtagggccgaagtaatacggcgaaacgaccacgagcgcatccactccacttgcttcgactgcccgcgcgaagtcgatcacattgttcaagttggtatcgcccacgcccgcgaacaccttgatgcgcccggcgacatgcttggccacgaagtcgaccgcctgcttcttgacgtccagagggaaggcatagaactcgccgatgctgccaaacaccagcacgccgttgataccggcctcgatcagatgatcgagatgctgcccccagcgttcatagtcgatgtcaccgtcgtccttggtgatggtgatggatgggcagatgatgcctgagaattcggcgctgctcgtcatgattgttcctttcgttacggaataggggtgccgcacaagcggcaccgagtttgcggcctctcccccagtcgtcctgcggacgatagccccctcatcagagggggcttgggtttagtcgatgttgtaagcgcggcgggcgttgttttcgaagaagtcctcgtcctcgccgaacgtgtccagcatgagttggaagtgcgtggcaaaggtcgagttgagttccacgaccggccagttggagctgtacagcaccttcttcgggccgaatgtgtcccgcacgtatttcacgatgtccgggtccaccgggttgtcgccggaaaccttgatatacgaattcggcagttcggccaacgctgcgagcgcggcgcacgattcctcatcaagcccgggcacgttgccgagatgatcgatgatgaccgtcacttcgggaacctgcgagaacgccttggccatgtcgcccaactccgggccccggttgcacagctcgaatggcaatcccttggcggccatcgcgcgtagaccggcgatgaattcgggttcgagcgcacggccccgcggctcggaatccacatgcagcggttccctgatgccatcggcgttgatcgggacacgcatccaagggcttacccgtccttgcaacatgcgcttcaggatcagagggctggcattctcgtacaacaaccggtcctcgagctcatggtcggccgcgtcaacctccacgtatacgccgccgaggaaattcacgccaaatttggcgtactgtgcggctaggtcttcaatcgtgtacttgtgttgcagcgagggcaatcctgccagccatggcagatcctgcgcatccggatcccagatatggaagtgggaatcgattacgttgagtgtcatgtcaggcctccttcagaccgatcttggaaccccagaatgcgtaccatgccacgaacaggaagcccgggaccatcaccaggatggcgatctcgatgcctgccgcatcctgaatcacaccgagcagcagcggaatcaacgcggcgcccacaatgctcatcaccaaagccgaggaaccggtcttcgccgcggaacccttgatacctttcagcgtcagggagaatatggtcgggtatccgatggaaatgaacagatacgccaccatgaacgcgatgacggagaccttgcccaggccaaggaataccacgaacatcagcacggctgaaatggtcatgtatacgccaagaatcttcgagggatcgaatttggccatcaatggggtggtggcgaagcgtccgatggtgaacagcagggaaagcacggaaagcatcatcgccgcggtgccggctgtgatgcccgcgccccagtgcttgagcgcgtaggcggagaagaccgccatgccggccacttgcaggccgatgaaaatgaactcggcaagcacgcccaatgcgaagtgcgggcgcttgagcaggccgaagaaggagctgttctcggaggaggcgccgcccgcggcctcctcttcgtctcccggaggcgtgggcagcttgaacagcgcgaacacggcgagcaccacgaccagcacaacgccgatcacaatgtatatcgtgcgggtatcattcaggaactgcgccttagcggcgtcgaagccggactcgcctgatgcgacggtggtgccgagaatctggccaagaatcagcgggccaacgatgttgccgacgccgttgaaactctgcgccatgttgatacggaacgattcgcccttttcatcacccagcttggtgatatacggattgcagttggtctccagcgatgccgcgccgagcgcgataacgaacatggcgaacaggaacagaccgtagctggccatgttggtggcagggatcaccatgaacgcgcccagagcgaacaggaacagaccggagatgacgccgcccttataaccgaaacgcttggcgatcaagccggccggaatggccatgacgaagtatgcgccgtaataggccacctgcagtaatgacgcttcggcgctgctgagttctatgtagtttgcgaacggcgagttcaacgcgttcacgaggttcatggtcaaaccccagataaagaacagtgaggtcaccagcacaatggcgatggtcgccttggaaccggttgtgtttttggatgtcatcattgactccttagtgatacgagtttccccgatattgcctagcgagaagtggaccaccctgggccatgttggtaaacggatgacccagggcgcgggtgatacgggcggcatacgcggatacggcgtacggatggagcaatgatcaaagctccggaattgccgcgcgaatattcgggaaagggctgcttgtcagctcagcgcacggtcaaggtggacatagccgccatcgacgtacacccactgaccggtggtgtggctggagcggtcggagagcaggaatgccgcttcattaccgatctcttcggtggtggtcatacgatgttccagcggaatcttgtcggtgatcaccgacaggcgcgcctgctgggccgcttcatcgccaaaggtcttgatccaatcggcatagagcggggtccagcactcggagacgactatggcgttgacacgcacgctatcgtgcaccaatgcggcggcccattcacgggtcaggcccaggatcgcgcccttggcggccgcataggcgctggtcttgccttggccggtaagcgcggtcttggacgagatgttcacgatggatccgcggctttccttgagatacggcacggccgcgtggaccagctcgtaatagtgagtcaggttgccgtgaagcgattcctcgaactcacgccaagtagtggtctcgagatccttgttgtcgttctttccggcgttattcacaatgccatcgatatggccgtacttcttgtatgttgcttcgacgacgccggcgatcttgtcggtgtcgttgaggtcaagcaagtgcacatcataggtggtggtgtactgctcgatatccttcttgaactcgtcgagagcgctgtcgggtcgattaatcaccaccgggatggccccctcctgggccagttgcagcgtgatgcctttgccgatgcctttgaaaccgccggtgatgatgatgactttgccttcgagatgcagatccatgggaactccttcgtccatccttattctgcgtttcatgggtgttccatgtcacgcccggccggggcttcggcaccccagccggagtggttgtgtgttgttgtgttgagttgtgttgttcagttatgaatttccagttgcggtcagccgcgatacaggtacttctcggccgtctccagcgtcatttcggtaccgttgcccggagcggtcggagcgacgtagttgccgtccttgatctcggtcgggtggacgaaatgttcatgctggttatcgacgtattcgatcatgcggccgtccatcgtgccggacacggccacgtaatcgaacatcgcgaagtgtcatacggcctcgcacaggcccacgccgccggcgtgcgggcagacgggcttgttgaacttcttcgcgagcaggtattcgagcacgatctcctgcggaccggccacgcgggtggcgtcgatctgcatgatgccgaaggcgttcgcctgcagatactgcttgtacaggatgcggctctgcatctgctcgccggtggccaccttgatggggttgatggcgcgggcgatggtggcgtggccgatcacgtcgtcggggctggtcggctcctccacccaagccagatcgaagtcgtggaacttgttgatccagtcgatggcggtgggaacatcccacacctggttggcgtccacggcaagacgcacgtcggggccgatggcttcgcgggccttggccaggcgacgcagatcgtcgtcgatgttctggccgaccttgagcttgatctgcttgaagcccttgacctgggtctcctccttggcgagggccaccatcttctcatccgagtagccgagccaaccgggagcggttgaatagccggggtaaccgacctccagcagatgcttgatacgctcggccttgcccttctgaccctctttgagaatcgcaacggcttcctcagggcgcagggcgtcggtcatgtagcggaaatcgagcgtggagaccagctcctccggctccatctcgcccagcagcagccacaacggcttgcccgcacgcttggccttgatatcccacaacgcggagagcaccgcgccgatggccatatgctccacgcccttttcagggccaagccaacgcagctgggaatcatgcacgaacaggtcccatgcaatgcgcatgttgtcgagcagttcctcggtgttgcgcccaatcagcacctgcgacatcgattcgatggccttgcaaaccacgtcgttgccacggccgatggtgaacacgaatcccacacccgtgatgccgtcgtcggcgctggtggaaatctccacgtacgcagaggaataatccggatcggggttcattgcatccgagccggaaagcgtcgttgaagtggggaatcggaagtcatacgtcttgactttggtgatggtactcatgtgttcgggctccttcgcctggtgtgaaccaacggctatatcgtacgtccgaataaagaaatttgcaagcctatttgcgaaaatttttattcaaggccggacaaagggcaagaaaacacggaattgttacggcacaatgcgtcataatggtgggaacaacgacgaaatcgtctcagtaattgaacggcgaatatccaagagggaagcaccgatggttaacgatacatccacccacaagctcaaggtcggcgagctcgcaaaaatcgccggcgtatccgcatccactgtttccaaagtcatcaatggcaggtcaggcatttccgacgagacgcggagacaagtcgagcaaatcctcaaagatcacggttactcaaggcctctggtcaacaccaaactctcccccaccatagagctcgtcgtcgaatacattgagcacaacggcacgatggaactcatcaaatacgcctcatactgggcgcagcaggcgggcctcgccatcacggtcacccagaccaaccatggcgatgccacggaagactgtttccgcggcatcatcgatagaaatccccaaggtgtgattatgcagcagatgggcggtctgaccactcaagcgaagtctttgttgaaatcgcgcagtattcccgtggtcatcatcgacccaatcgataccgtcgattcggatgtgatgagcgtgtccatcgataactggaccgcaggataccaggccggcaaacacctgctgtcgctcggccatcgacgcatcgccgttatccgggggccggcgaacctacagaccagcatcgcacgctatagcggattcaccgccgctctgcaacaggccggggtggacctgccggagtcctatatcgaacagggcgactacttccccgccgaaacaagctatgaagcagcctgccggctgctggaactcaccgaccgacccaccgcgattttttgctgcaacgacttatctgcagtaagcacgtatcgtgccgcacgagagcataagatcgcgttgccaaagcaattgtccgtcatggggttcgacgacattttccccgccggccaactcatgccctccctgaccagcgtgcatcagccgttcagcgaaatagcccaacgcgccgtgcagatgatcatcgacagccgcaagggcaatcagggtgatatgcacgtcatcctccccaccagtgtcgtcacccgggaaagtaccgtaccgcctcagtcatcggcccgataatcggccagattcaagctggcggccacccgattggacgcgaacgcacccaccgaaaccagcgcatagcacagcacaagcccgccgaagaagctggccagcgtggccggttcggtcatcgaagcggcgaacagaggggccataagcagcatggaacagccgccggccacgatcaccacgatgttgagcggggtgagtacctcgatgaatcgcgcacggttcaaggtcttgacatcagtgccctccaacaccagcatgcgatattcgccggcctgatcgtacacgctgccggcctgcatcacaccggagctgaccgcggcaagcacagcggcgaacactagcgtcaggatgccgccggtgccgatgtcgcgaatgaacacggtggacgggtcgttggcgtcaccgaccacggcggccgagccaaagaatccgcagatcgaggtgatgccggcgatgaacacggccagtgcaatgccggacacattgcgccaggcgcgcttcggattgtcgagaatacggcgcatggcaatcatcgtggccgcatccttggggcgcttggccttggccttggcgcgagcggtgaccacccaggagcccacgaggttcaccagcgcgaagcacagcagcatgaaaccgatgatcacgccatacatcactacttcaccggcctgagccagcaccatcggattcttgaacagaagaacggcaatcaccatgatgacggcgaacaccaccacacgccagccggacggcagcgtagtcgcaacgcgtgaagtgacgccgagtggcgtgatggccacgcgccgaagcgtgaccagcgaagagatcagcgccaacacggtcacgccaacaagcgtaatgatcaaggcaatcggccccacccacagttgctcgaacgtaaacgtctgattctggaaatgcagcaacatgattagggggatcaacacgcagtaccccgcgatgccaatcagcgcccccaccaaggcctgcccagccgcatcaagcgccgtaaggcgaataacttgccccgtggtcgcgcctgccaagcgcagggatgcgagccgagcgtcacgacgggacgcagccaatcgcgcggcggaaccggcaagcgccacgaacggcacaatcagcagcaggcaggcaaagaacgccagcacgacgtatgccgtggcgtattgatccaggctgtggggattggcgatacgctgcttccagatttccgctgttccgggtttgcaagcgtcgagattgattgcgcatccaatggtgtggtcggcggaggcgcgccacatgaacccatgcacgccacccaaaacggtgagaaagatagtggtggctgcggcaaaagcaatgatggccaacaccgaagtatgacccgcactgccacgcgagccggggcgatggaacaatcgccacaatgcgaaagcgctcatcgtacgcctcccagctggccgtcctgcatggtcacggtgcgcgagcagaacgaagcgacgttggggtcgtgggtgacgacgaccacggcggaaccgttgtcccgcgcggcggccatgagaatgcccatgacctcgcggccggtggcttggtcgagcgcgccggtcggctcgtcggcgaagaccacggcaggtttgacggcgagcgcacgggcgatggcgatg

SEQ ID NO: 1063 - DNA, 37847 bp, Unknown
  R13_10m  MAG No. k141_4283
gcccgcggcgacgccggagacggtgcacaggatgaggtagatgaatcctgcctgttggctttgcgagagctcttccttgtccaccttcttgcgcagcgacttgagcgccagcacctgggtgacggacagcgcgtccacgtatggggagcggatgcggatggcctggccgagcacgtggcggtgctgcaacggccacttgtcgcccacgatggccagaacccacttgcgggtgagctccatctcgttgagcaccttctcattgaggtcctcgcggtcgccgagggcgaggtacatcctggcgatgcgctcatccgtcttggcgatggacatctcgatgttgtcgatgaaggtggagaacagcggccattcctcgtaagcctgacgcatggtctccagatcgccgaacttctcgcatgcagtgccgagaccgtaccaagcggccaggttgatgcgggcctgggcccaggagaagatccacggaatcgtgcgcaggtcgtcgagcgacttggcgccgaggccacgcttggccgggcgggagccgatcggcagcaggccgatttcggtcagcggcgtaacgatcgagaaccacggggcaaagccgtcggtgttcaacaggtcgaggaagcggttgtgcgcggcctcgtcgagctgagcggccatgtcggcatacttctcggtcatctcggtgttgcgcttctccacactcggcgcggactgcagcaaggtcgccgcagccacggattcgacgtggcggatggccagcaccgggttgccgtaacgggcgaagatgacctcgccctgctcggtgagcttgaagcggcacttgacggaaccgaccggctgggcgagcaccgcgcggttggcggggccgccaccacgaccgacggcaccgccgcggccatggaacagggtcaggtcgatgtcgtgcgactcagcccatttggcgatgcgctcctgagcggagtgcagggccagcgtggcggaggtcgggccggcgtccttcgaggagtcggagtaaccgagcatgacctcgagcttgttgccggtggccttcagacgagcctgaacctcggggatcttgatcatttcctcgagcacgtccaccgagttctgcagatcctcaagctgctcgaacagcgggatcacgtcgatggtgggcacgtcctccgggtgggagaaggccaagcggttgagctcgtagacatccttgatgttctgggcgctcttggtgaaggagatgatgtagcggcgggcggccttgaggccgttgcgcttctggatggcaccgagagcgcggaaggtgtcgagcacctcgtgcgtcatcggctgcagttcgccgcgctcgccgtgcagaccgtgctcgcggatatccgcaagggcgcgggcatgcaccacggagtgctgacggaactccatctccaccatgtggaagccgaaggtctcggtctgccagatcagatcctgcagcgggccgtaagcggaacgcttggcgccggcggcggccagcgaacgctggaccaccttgaggtcggcgaggaagtcgtcgcaggagtggtacatgaggtcggcgtcgcgctcgatggtgtagtgcagacggtcggccatcaccagcatgaccgcgcggtgcatctccttggtggagatcagggcggccttgtcggtcagacgctcgctcatttccttctggtggctccagaggctcttgagctcggcgctcggcggcgtggtctcggcttccatcgtgaggttgcggcccacggtgcgggtggcttcctcaagggcggcgattacgtgatcggagaacttgcgggccacggcgcggctcaccttggcggtgacgttcgggttaccgtcgcggtcggagccgatccagctgcccgggtggaagaacgcggggcaagcgggctcgacgagaccggccttatcgcccaggacccagtcatcgaagcgacggtagaccttggggatggtgttgaacagcgtgttgtcgaagatgtcgagaatcgtgtccgcttcctcaaccggggtcggcttcttcagcgcgatcggagaggtgcggaacagggcgtcgatctcgttgtagagacggcgcaggcattccttcttatccgagccgccgaggcgcttgtactcctcaagcaattcggaaacgcggcggatcttgccttccacggccttacgacgggcctcagtggggtgcgccgtgaagacggggtggaattcgagctggttgagcagttccttggccttggccgggccagtctcattgatgagctggtggtaggcgacggtgagctcgttgatcggatcgaccgcctggtcaacgggcacgttgttctcgcgctcgtggagcacggaaacgcggtagttctcctcggacaggtttgccagatggaaatacgtggcgaatgcgcgggccagcagctgggcgtcgtgcaacgtcatgttgtcgatgacgttcacggcctccttcaggccatcctggtcggggttcggatccttcagctcggcgaaatgctcggcgctggcctccaccgcgtaatgacgcacggtgtcgaacgtagacagcagttcggggttgtattcgcccagtacgttacgcaggatctcaagacacagatccatgtcgtacttcaggctttcgggaagatcatgctcctccgggccctttcggccggtcccggtagtgacgatggcggcgtcagcgggagtgatctgttcttcaggtgttgccatataacctcctttgccgaataacaggttgctcggtctaccggtcgtctgcggctcctccgcagttgttgaggccagtcgttgcgagcccacagcccatattcaacgtggttgttgtgtgggcaatagtgtatccccgcgaaatcgctatttgcgttacggagtccatatagtgcgccaagttgtccacctatagagaccgaatatcggacagcatatgagacactgtccgattcgcggaagatttgagcgccttacgattgccggcgggggaggcagggagtagtaatgagggatgtgagcgaacagaagaaaaaaagtgcgcccgaagcgaaaggcgcaacggctgtacgtaaattccacacccactccattccgctggacatggaagatattgcacgcgattgggaaaaaccggtggtggacgccggtatcgccgccaaagccagcgtgattgtacgagtcggcatgttggacctgggagccggcaccggctccttccgcgtgcgtgaaatgatgcaccgcatcgcctacccgctgggcgtgcacgtacgcgccgacgtgaacctgacggatatcgaggccacctgcacggatggtcgtaaccgcatcaccgaagtcgtggatttgccgagtaccggcgtgaacaccgaacgtatctggctgctggaacatttcgccgactggttctccgtgaatctcggcaaggggtcgatgtatcacgtcgattcgcaactgtccgatggcgtggtcaagcatttggacgaacgtgacgcttcgcagtattcggccgatctggccaagcgcctgcgcgaacgtgccaaggccgaggctgaggcggccaacggcagcgtggacgagacgctggatcttgcgttgaaaaccaaggtactcgtgacctccgtggccaagtccttggatgatgacaatggagaagcccaccgacttttggcggacagcgcggaagtcactccggtcgaagacaaagcggccgaagagaaggcctacgacgatgccgaagtgtttaccggtgactccaatgagtcggttgaatcggcgaacgcggcgaacggcgcaaccgccgaaagccctgctgcaagcagtacgaagcgcaagaatcgcgtgcccaaggaatacgccgaacacttcaacgagcgctccgacgaagagaaggccaagggcggtatcaccgtgcggcaggcgcacgagcgactcgatctgattgagcgccgcaagccgctgtacaagccgtggttctccggtctggcctccgccctggcctgcgcggccttcgtgttcctgctcggcggcggcccatacgacatgatcggtgcgttcgtgggcgcgggccttggccagtggatgcgtcgccggctgtttgcataccatctgaaccagttcttcgtcacctttgtgtgcgtggccgcggcggcgctcgcctgcaccggcaccctgcgactcatcggcattttcgacccagtcgcgctctcgcacgatacggcctacatcggcgccatgctgttcgtgatccccggtttcccgctcatcaccggcggactcgacatggcgaaaatcgacttcccctcgggcatccagcgcgtggcgtacgtgctgtgcatcatcctgatggccacgctggcaggctgggccgtggccgtgatggtgcacctgcacccggaaggctttgaaccgctggggcttgacccgtgggtcaacggattgctgcggttcgtggcggcgttcgtcggcgtgtggggcttctccgtgctgttcaattcgccgcagcgcatgtgcctggccgccgccctgatcggtgcgatcacggacacgctgcgcttggaattgcaagacttcaacgtggcacccgagatggctaccttcatcggcgcgttcctggcgggcattctggcatcggcgtggcgttcatccgtgcgacgtggctggctaccgccgcacctcggctacccgcgcatctgcctgaccgtgccgtcgatcgtgatcatggtgcccggtctgtatatgtaccgtgccatgtggtacctcggcagcttccagaccatgaatgcgctggactgggcgttccgtgcgttcatggtgattatctgtctgccgatcggcttggcgatggcccgcgtggtgaccgacaagtcctggcgctacgacatctgaccgtcatcttggctcccctcaggtggggagctcggataaaacagcgtctcagtatggaaacggtggaaggtgcttgagcccttgtatccactaccatcaggcgaagtgcgttgcggccgtattcacggctgtgacggtctgtatgacgccgctccggcgtcaatcgcatatcagcacgcatatcagcacatagttctgccatggcggtagccgcttggcgtcatgattggggaggtgtcgcagttggccaacgatttctggattctgctggccatggtcatctattttgcggccatgctgtccatcggattcatctactccgaacgctccaactcctcctccaaggaatactttgcgggcgggcgcggcgtggggccgtggctcacggccctgagcgccgaagcctccgacatgagcggctggctgctgatgggcctgccgggcctggcctacttcaccggcgcggccgacccgatgtggaccgccatcggcctggcgctcggcacctatctcaactggaagcttgtggcccggcgactgcgccgctactcggtagtggccggcgatgccatcaccattcctgacttcttcgccaagcgtttccatgacaagaagggcgtggtctccaccatcgcggccgtgatcatcctggtgttcttcagcgtgtacgtgggcagctgcttcgtgaccgtgggcaagctgttcgccacgttgttcggtttcgactaccacgtcatgatgatcatcggcgcggtggtcgtgttcgtctacaccgtggtgggcggctacttgtccgtggtgatgaccgacttcattcaaggcatgctcatgttcttcgcgctcgcggtggtgttcatcggcactgtggccagcgcgggcggcatcgacaacaccgtggaattcctgcgtgccatccccggctacctgtccggcacgcaggtggccgcgcccaagctggacccggccaccggccagcagctcgtcgaggcgggcaaggccgtgttcggcgcgccctccgactacggcatcatcaccatcatctccatgctggcgtggggcctgggttacttcggtatgccgcaggtgctggtgcgcttcctgtccatccgcagcgtggaagaagtgcgcaagtcccgaatcatcgccacctcctggtgcgtgatttcgctgggttgcgcagtgtgcatcggcttggtggggcgcgcgatgatgcccaccgaactgctgacctccaccgatgcggaaaccattttcatcgtgctggcgcagaccctgctgccgagcttcatgtgcggcgtggtggtctccggcattttcgcggcctcgatgagctccagctcctcgtatctgatcatcggcgcttcggccatgggcgagaacatcttccgcgggctgctgcaccgcaaggccaccgacaagcaggtcatgatcgtggccagggtcacgctggtggtcatgttcctgttcggcattctggtggcatacgaccagaactcgtcgatcttccaggtggtgtcctacgcgtgggccgggcttggcgcctcattcggcccgttgatgctgtgctcgctatactggcgtcgcgccaacaaggccggcgccgtggccggcatgctgtccggcacggcggccgtgctgatctggcacaacctcgtcaagcccttgggtggcgtattcgccatctatgagctgctgccggcgttcatcatttcgctgctgttcatcgtggtggtttcgttgctgaccgccaagccgaacgagcgtatgctctacgaattcgaccactacatggacgatccgctgcccggcaccctgccgtccggcaccgtgctcgtcgacgagcccatggaagccatggagtccgaggttcgcagcggcaaatgacacgtgcctgctgtgcggtcgcctcgtatggcagaggagtggcttttttgtggttcggcaggaaccattgaggccaaaacggacttcgaggggctgatttgacgttctggagaggtctactgccgtttcaaggggctgatgcctgagtagacgcggctccaaaacggcggaatggcgttggcgtaagggcattgatacacgtgatctagcggatgatcagccccttgaaaccgaagtagacctccggcggaggccaaatcagccccttgaaatgggttttgaataccgtagcgcggtgcggacggtgcggactgactctaccgggcttattattcctgcgtcgtcggaataatcggcagcagaggctcgaatttcagccgtttgtacagcggaatacggcgtagctttcggacatcgctaatttgctgggtggtttgccgcatcgtgagctggaccgttttgcccgtaacctcctgtatcctttcggcaacccttcgggcaagggcctcttctcccgcttcgtcgccaatatctaatttggtgacttgaatgtacttccagccagcgtcttcgatcatctggcggcgtctcgcgtcattcagccattgcccggcatgatgagagccttcgtattcgatgcatatcttgaattcagggtatgcaagatcgagatatatgggtctggtgttgtttcctacgaatattggataattcacctgcgggcaatccagaccgtatttcaagagaaccaaacgagttcgtgtttccatggaggaatctgtgcccgcgcgcgccaaaagcagggcgcgacggcatttgttatacccgcggaacaaatacgaattggtgccattctctttgtcggctcgcacctgggcctcggcctcatcgagatacagagaaagggcgtcgatggttgttctgcagagccttcgatctcgtcgcatcatggaatcagcgagaacgatgagttcttcaagttcgagatacgcggagaacatggcccatgtgcaagctggtgaagtgcatgtgaattgtccctcgattatgaccgtgtctagtgggaaaggccatacaaccactttgacccccacaatgtgccgtttgtcattggcgtgtggaaccgcaacaatggttgtagttgcaaggcctctgtgtttgcttgatatgcggggtacttcaattgacaaaagctccaacgctgttgtcagggcatagggtgggcgccatgcgcttcgtcgttgaacatctgcgcacgtctgcattcgttgatacttctgcattgtcagctcggtcaatgccgttgagctacccatgatgatcaccccttcgtgatgttcgctttgtcctcgcagtgtagggtccggctaccggccctgtctaccgccccaatttttcggtggataaatgtggataagtcggtggataaactatgggtgttcatcgcagttgcaggccatcccgcaattacatggaacgtaggggtttgcaggcagccagcgggaatcgccgccgacggcgcgattcagcttgaacgaatctccatggcgttcatgcaaaggtggcatgatggcgggtatgagtagcttggtgcgtattgtcaatgccggtgttccggggtctcaggaccgcgtggatgtggtgcttcgcgatggggttgttgcgtctgtcggccctgctggaacggtctcggcttcggacggcacgatgcagactaaggcgcatacgacatcgttggcatacgcgacgaatgccattgcttctggcagcgtctcaatcccaacgtcggcctccgcacctgctgacgaaaccaccatcgacgccgacggcctgtgggttattcccggcctgtgggactgccacacgcacttcacgcaatgggctaagacgctgggccgactggacctcatcaatgcccgttccgccgccgaagcgatggacatgttgcgccgtcatctggatgagcgccgcgccgccggcacgcttgacccggatgccttcgtggtgggcatgcgattccgtcactcgctgtgggccgacgacgagcagcccacactggctgcaattgacgccgtgaccggcgaacagccggtggccctctccagcgcggacatgcactgcggatgggtgaactccgccgcggcccgcaggcttggcgtacatgtggacgaatccggtctggtcggtgaactcgaatggttcaacgcctacaccgccttcgacaaggtgccgggcgctgctgaagagactgaccgtctgctgcgcgaggccgaacaggacgccgcaagcaagggcgtggtgggcatccgcgattatgaaatggccgaaaacatcgatacatggaccaatcgtttcgcggccggcattaacggtttgcgcgtggacgccggtgtataccccgagcggttgcaagccgccattgacgcgggttggcataccggcaacccactgccgggcagcgccgggctcggccatgtgggcgccatgaagctcatctcggacggatcgctcaacacccgctccgcctactgctccacgccgtattcgggcatcgagccgccgacgtatggcacgctgagctacacgccgcagcaaatcgaagactatatgcgcctagccaccgagcatggcttcgacatcgcctgccacgctattggcgacgaagcgaacaccattgcgctcaacgcagtcgccgccacgcacgcacatggatcgatcgagcacgcgcagatgctcaaacccttcgatatcccgcgtttcgccgagctggggctcgcggccagtatccagccgcagcacgccatggatgaccgcgacgtcatcacccgtttctgggccaacccggccggtatcccttatccgttcagggccctccacgacgccggtaccacgctgcgcatgggctcggatgcgcccgtggccccgctggacccgtggctggccatttccgccgccgtgttcggctccgaaagctctgaccgtgagccgttccagcccgagcagtgcctcgatgtgcgcacctcgctggcagcctcgaccgccactggccgtgaccgccttgcatccggcgacccggccgatatggtgttgttggacgccgacccatacgccgccgatactccggaagccatgcgcgctatgccgcaacacgtcgtaatgacattgctgtgcggggagcgtacgtattgatgcaagccatcggcatgaagtgaccagaggtccgtcttgatagccgcgttgcacggaaaacatgttgtgttttttgaattgagagttactaacgcttgattctccgtttcaaggggcggatttgagcctttccggaggtctatctccgtttcaaggggctggtcatgcgctcaatctcagataaaatcccattcacgccaacgtcattccgccgtttttgtgcctcgcctacttgagcaacagcccctcgaagcggagatagacctccggaaaacaagaaatccgcccctcgaagtgaagataggacacagcagacgccgcaatacaaaaaacgccgtgtcagttgcccagttggggctgacacggcgtcttgctacgagcggcgggaaaatcagtacttcatgcccatggcctcgcgcacctggtcgagggtctcctcggcgatggcgttggcgcgcttgttgccgtcgtgcaggatgtcacgaatggagtccatgtccttggccagctcggcgcggcgctcgcggtgcggggccaggaactcgttgactgattcgatgacgtatgccttgagtgcgccggcgccggaatcaccgatctcctcggcgatgtccttcgggtcgcggccggtcaccagaccggcggtggtcagcagggcggagacctgcgggcgggcaaccgggtcgaaggtgatgcggcgctcggaatcggtcgggctcttcttgataagcttggcggtctcctcggcggtggcgcccagcatgatggagttgccgtacgacttgctcatcttgcggccgtcgagacccggaatctccggtgcctcagacagaatagcggccggctccgggaacaccgggttcttcttggcgtaacgctcgttgaaacggcgggcgatggtgcgcgtgatttccacgtgcggcaggttgtccttgccgatcggcacgacattggccttgcagaagaggatgtcgcacgcctggtgcaccgggtaggtgagcagcaggccggtcagcgcgtggccggacgcctccatctcggacttcacggtcgggttgcggtgcagctcagcctcggtgaccagggacaggaacggcagcagcagctggttctcggccggcacggcggagtgggtgaacatcatggtcttgttcggatcgatgccggcggccatgtagtcgagcaccaggttcagcacgttgtcttggatgtgctcggtggtgtcgcggtcggtgatcacctggtagtcggcgatgatgatgttcgtgttgacgccgcgctcctgcatggcgacacgctcacggatcgagccgaagtagtggccgaggtgcagccggccggtcggacggtcgccggtcaacatggtgaaggacgacggcttggcctccagcttggcgagcgtttcgtccgaacgctttttggccgcgaggaagctcgcgcttatctcattgcctgccgctgtcagttgctgctcgtcggtcatgcgaaaatcctttaaatagggctcagataaacgctttttatggtaaaagtgtgagccgacaacgaacaagccactattagtggtactctctattgttgatgaatcgaacagcacagtaatcgcagggggtcagatgggccgcggacgtcaaaaagcaaaacagcagaaaattgcccgaaagctcaagtacctgaccaccgataccgattacgatgagctggcaaaagagctaagcgagcaggagccgggaacgggctctcctgacccgttcgccgacatggatgaccagtatgcggacaaggatgtggattccgctgctgacgaccacgcttccggtgccgccgaggcagctcccgccgcgcaggaggacgacctcgacgagtacgccaagtgggcagccgaagcggcagccaaggcgaccagtggagaattccccgcatcggcacccaagaaggcggtcaatgtaccgaaaccggctccccgtaagccgattccgatgcccatgccttccgcgctcaagcccaagaagagctgagcgcacgtaggcatatgccggatatcagcgggcaggatgggccaaggcccaccatgctcatcatggacaacgaccgcatggccctgatggcattacagtcgattttgtcgaaggccctgccagacttcgaattgttgccgccggtgagcgagggcagcaaagccattcagctgtgcacggccaccaaacgcccgcctgctgtgctattggccgatatcgcgatgaacgacatcaatggtccggatgtggtgcgtgcaatccgcagggaaaacgcgaccacggcgatactggccattaccgcctcgattgtgggtcggcatgcccaggagatggcccgggccggcgcacagggcatcatgagcaagaacgatgatgtgcggttgcagggcgtggcgattcgtcaggtacaggccggcaaaacatggggcgatggtggcgacgtgcggttcgagaccgcggccgttgcgtccgcgcgcatcaaggccgagaaggacaaccgtctgagcgcgcgtgagatggaggttgcggaactgtggtcccgcggccggactatgccgcagatcgccgccgaactgtccatcaccgaaaccaccgtgcgcacgcatctgatgcgtgcggccgacaagctcggcgccggcaatctcaaggaacttatcggcgcatggattcgcatgaacctgcactgatgaaggcgccgatgggtgtgtggggacacggtagaagaagcgcaaggcgcataaggggagcgggccggtgaaacgtccgattatcatttcgcggcattcgtcgtattcgtatggtcacgccgacggcaagaagcatcatcagattgatatcgatatagaactcaatcatccgctggcgatgttcggcccgatcggtgtgcttgcggtggcggccatcgtctatgcggtgaccgggtcgtggctggtcacggcgtcggcggcgttgacggcaagcgtgctgctggtattactgggcattgcgttgcgctggcgcaagcgcgtggtgaatcaggagaacgaaaacgagcagatggaatcggcgctggccgatctgcgccacggcaaccagctcgcgatcgaactgcacgacacgctgtccaacgatctgacgtatatctcgaccatcgcccggaataatctggccgcgccagccggcatcgatggtggcgactggcagcgcgtgctggatcgcagccaacgtgcctttgcggaagtgcatggcatcatcgattttctgaccgagcagagcggaatggacgccggcttccgggacgagtccttgccggtcggtggcaccgggacatctgaggtggcgactgcagaatcagggcaggttgattcgccgacgaaagaatccgccctgactcgtgacccggtaggcgccgggagctgtccagcgattgcgaatgaggtggttgacaatgccgtgcccgagaacgccggtggcgatgaccgtacgcaatccacagcgggcatgccgcagtccttcgtcacgcgtgtgaaggcgcagatcaccgataccgaggagtttctggaggcgcagggctatcgggggacggccgcggtcaacggcatcgccatggtcgtggaccccgaggcggcggccgaggcgctgtcgctgatgacggagatcggcacgaatatccgccgccatgcaccggcgggagctgattcctacctgctgttcgtcaccctgtctcccgaatggattgagattcgcgagaccaacgatatccgtgacgatgccgacgcgcagaatggcctgtccgcgcaggagcggtcggggcgtgggctggccatgcatcgcacccgtgtgcaggagttgggcggtgaattgaccacccgttcggatgatggcacgtggatgatctatgtgcgtatcccgtgcgtgcggggctgatggggcagaagctgcgatgtccggcgtccggcgctgattgtgccctgtcctcacaaatgaggacgacgaccgcagccatgtccccataaccgaggattgcgggtgttcggctcggcggcggctccctatggtggcgtccataaggaccaatcccagggaggacaacgatggcaagtgatacggaattatggcggggaactgattacggatggtggctggctgcggacacgtccggcgcggtcggtgccagcctgatcgcgttcgcggtgccgctgatcatgctcgccacgacaggatcctctgccgccgccaccacgacggaaagcatctgcgtggtggtgcagacggtgctgggccttgccggcggcgtgattcaggaccggtatgatcgccgtacgctcatgctgatctggggtgcgtccggtgtggtgctctcggcggtggcggcggcagcggtgatgctgttcggcaatgcgccgaagacgagcggccatggggttaacggggcaaacgctccggcattcggcggaccgtatgcccacgtgcttccgatcgcgctgctgtgtatcgtcgtgctgttttcggtgcgcgatgggctgttggagaatacgtcgaatgccatgctgcgtggcgtggtgccggatgagcagctgccgcacgcgatggcgttgaatgacgccagggattcgacggtcacgctggcaggcgggccgttgggcggtctgctgatgaccgtgggacatgcggtgccgttcctgaccagcgcggtgctgagcgtgctgggcatggtgtccgcatggcgtatccgccgctattggaaacgtgcgactgtgagcgatagcggccgtccgggcaatgttgataccggttcggaggtcggggccgtctcggacgccgatgatgccgatgactccgccccacgctggcgcgacgcactggacggcatgatctggctgctgcgcgaccggttccaacgccatctcatcatcgcagcggccatggtgaccggtgccagcaatgccttcctactgctgaccgcgctggacatctcccaaggtggcagccagctgatatccgccggattcatcaacgccgcctccgccgttggcatgttgctgggcgcactgatggcctcgcaactggtcaaccgtgtgcccggcggcgtactggtgggcgtgatgttcgtcttgctggctgtaggattcaccggtgccgcgttggtgccctccatggttggcaaggccatatttgtggcctgctcggtactggcattgcccgcgggcaacgcggtgcttggaggcctcagcaataccttggtgggcaaggacaagctcggccgcgttggagcgggcagcatggtgttgcagtacggtgcctatggcgtggccgtggcactcgccggctggggtatgcagaccatcggctacggtccgacctgcctgattctggccaccgtactggtagctgccgccgcttacgcgctgacgatgcgcagcctcatcaccctacccacgccggaccgctgggccgagcacatccagcgttggagcatcgcacagttctgataaagggcatccgataccgggcatccgacgatttacagcggcagcaggtcgctcagatcgtcgcgctctccgaccgcgctgatgtggccggcgtccttttcctctgcccacgtggtgatgccgcaggccagccgtagccagacctcgggctccagttcgatgacgtccggtggagtgaggttgtgcgggtccgattccgggccgtccaggattttgaccgcaccccacggcgcaacgcgcacctccacgccagggccgggcgcgcgccgctccagcaggaacagcgagtagcgcacagccatcgcccacaccgggcgcggcagaacgggggaggtggtcaggcgatgtggtgtgttgtcggccagttccaaggctgcggcacgccattgcaccagtgcgtcgtgccctcgtttcaagtctttttcgagaattactgccatatgctccatcatggcaccggcacgcgaaaccgcaaggtatgcaaacgatggcatactgtaggatgcggaaccgtgagatatgtgatacgctctcaatgagaacgtatgcaagaacgctccgccatcgtcgttacggagagttcatgcttacgtctatgcgacgatacctatcgcgcggcataataaacacgggcacttatcccggaaggaaagtcagaatgaccgaaatcaccgcaccgaagtctcctgtcacggcggaacaattcgccgacgagattcgtgaacaactgaaatacactcaaaacgtcaccgccgagcaggccacccctgctgacgtgtatgtcgccgcgtccaaagccgtgcgcaaccacctcgccgactcctggttcaagacccaggccgacaccgtcaacggcaacaccaaggccgtcggctacctgtccgccgagttcttgatgggcaagcagctggagaacgcactgctgaacgctggcctgaccgaccagttcgacaaggctgtggaagcccttggcttcaagccgaaggacatcgtggacgccgaatacgagccgggcctcggcaacggtggccttggtcgtctggccgcctgcttcatcgactccctcgcctcgctgggcgtgccggccttcggctacggcatccagtacaagtacggcatcttcaagcagaagttcgacgagaacggcaagcaggtcgaaaccccggattactggctggccaacgaagagccgtgggggcacgtcgactacaaccgtgatcagaaggtctccttcggtggcaaggtcgtcgaaaacgccgacggcaccaagacctgggaaccggcctggtccgtgcgcgccgtgccggtggactacatggtccctggctacaagtcccagcgtgtgaacaccctgcgcctgtggaccgccaagagctacgacgagttcgatctgctcgccttcaaccgttccgagtacatggacgccgtggccccgcaggtcaaggccgagaacatctccaagattctctacccggaagactccaccaaggtcggtaaggaactgcgcctcgagcagcagtacttcttcgtctccgcatccctgcacgacgccatccgcgtcttctacccggggcaggacaagccggacctgacgaccttcccgaacaagatcgtcttccagctcaacgacacccacccggtgatcggcatccccgagctcatgcgcatcctcatcgatgagtacggctacgactgggataccgcgtggtccatcaccaccaagaccttcaactacacctgccacaccctgctgccggaggcccttgaggtctggccggccagcctgatcggcgagctgctgccgcgtcaccttgagatcatcgagaagatcaacgcgcagttcgaggccgagctcaaggccaagggcgttgccgccgacaccatcaaggacatggccatctacactggcgacgccgtgcgcatggcctacctggccacctacggcggctcccacgtcaacggcgttgccgagctgcactcccagctgctcaaggacgtcaccctgaagaacttctccgacgtctacccggacaagttcaccaacgtgaccaacggcgtgaccccgcgtcgcttcgtcaagctcgccaacccgcgcctgtccgacctcatcaccgagggcctgggcaccgacaagtgggtcgccgatctggaactgctcaagggcctcgagccgctggccaaggacgatgagttcgtcaagaagttcgccgccgtcaagaaggccaacaagcacgcattcgtgggcttcgccaaggaccactacggcatcgatatcgacgagaacaccctgttcaacaccatggtcaagcgtctgcacgagtacaagcgccagtctctgaagattctcgccgtgatctccaactacgccgacatcaagtccggcaaggtcaaggccgaggacatcactccgcgcaccgtgttcttcggtgccaaggccgctccgggctactacctggccaagatgaccatcgagctgatcaacaacgtttcccgcgtgatcagcagcgatccggccgtcaagggcaagctcgccgtccacatgctgccgaactacaacgtcgagatggctcagaacctcatcccggccaccgagcttgacgagcagatctcccaggccggcaaggaagcttccggtaccggcaacatgaagttcgctctgaacggcgccctgaccgtgggtacgctggacggcgcgaacgtcgagatccgtgagcgcgtcggcgccgagaacttcttcctgttcggcatgaccgtcgacgaggtcgagaagaagtacgccgagggctacaatcccgcctcctactacgaggccgatccgcgcctgaagcaggccatcgatctggtggccgacggcaccttctccaacggcgaccgcaacgcctactccccgctcgtggccgactggctgaccaaggactggttcatgaccctggccgacttctccgcctacatggacatccagtccgagatcgaggccctctacgccgacgagctcgaatggaaccgcaaggccctgctcaacgtggccaactccggctacttcagctccgaccgctccatggaagactatttggaacgtatctggcacactgctcctctggcctgacggccgccggagcagcgcgccggctacgtgctggtttctacctcgcggctgtcgccgctcggcgtcgcctacgggaagcccgccgggcttcccgcttaacggctccgcatatctggcacactgctcctctggctgactgagtcggtggggcggctcccctcggagaggggaaccagaacataagaagccccgcaaccgacatccatcggttgcggggcttcttgcgttgaaagaccgccctatcaggcttcggccggggcggcttccgcctcgccatcggcctcatcctcggccttgttcagacccaggtcgaccggcgaggagctgttctcccacggctcctcccacggatcgtaatctgggttctgctgcttgtagatgtacaagccaacaagcgcggcgagcaatccgccgaacagcagcgcgaagaacttccaaccgttagaagacttgttctccatgacggctcctttccctagggatcgtctggtcggtatgcccattcagaccgactctgctccctattctaggccgctgtttgtgacgattgggtggaatgacattcgtgggcgattcatccacgcccgcatgccctcggccggctcagcatcttcgcggcgcgtggaacgcatccgagaccttcgatacagtggactgcatgcatattcctacacagcgggagattcgataccagtgggagcgcggtggtccggtgatgacctgggcgctgattggtgcgtgcgtggcagtgtggctactggaggtattgctgggatttattgccccgggcctgaggacttggttgatgtacctcggcatggcggctccggtcagactggtggctgagccgtggacgctcatcacttcgatgttcctgcatgcgccgaactcgctattgcatatcctgttcaacatgatcgccctgtattccgtgggcccagtgctggaacgaatgatcggccactggcggttcttgggactgtatgtgatttccggccttggcggctctctgggacttatggtgtgggctgcggtggctccgggaggcatcggctggcagatggcagcctatggggcttctggagccttatttggcctgtttgcatcattgctggtggtatatcgccgtatcggcgccgatatccgctccatgttgatctggatggcggtgaacttcgccttgccgttcgtggtcgggggcgtggcgtggcaggcgcatgtcggcggctttgtagtgggtggaatactcacatggctgctggtgggtggtgtgccggcgtggcgaggtaaaagcctgaaatggcgtatgcaggtttacggctgggccatggtggtactggtcattgtgttgattctgttgtgcaatatggccaatccttacgggtggatgagtttcggctccctgcactgatatggcttgatacggccgcaaaaaacgattgatgccgggtattgcggaacatgcagtgcccggcatcagtgtatgtacggaaagcggcgatgtggatattagcgatgtggatatcgtcattcggtgagtgggcatgcgctgtatgaaggtatccacagtaatgaaggtatccacagtaatgaaggtatccacagtaatgaaggtatccacagtaatgaagatatccacagtaatgagatgcgcgcaatgacgagttatccacgataacgagttatccacaatggtgacttgtgcacaagtgtgtagaaaagtgcataagactgtggataacttatgtggataagttaggaatgccgcggtattactgggtttgttgcagtggataactcgggtgtataactgttccctcgctgtggcgatatatgccaagccaaagttatgcacgagatatacaccgagaaacgccgcttatccaccacttatccacatggttttccacattcggtggaaaactacatgggtgtgattcatccacaggctgtggataacgtagtggataagtcgtggataagtcgtggataagtggtggatagctgtggatgaacaggtgaaggcacgaaaaaggccggcctccgcatacgggaggtcggcctttcgcataagaactaagaacaacctaacgatagaaaaaacgatctaccgatagataagcgcaacgagtcggaactcagcgccatcccatcgtcatcaggaatccgatcatgatcagggcgaagccgatgcccaggttccacgcgccgatgttcggaatcggccaggagccggacggggagaggtagtacaccacacaccaaatcaggccgatgatcataaacgcgcagaacagcggcacgaaccaacgcgggttcgacttggtgcccttaatggtttcttcaacacgcttggtgttctccgcctgacggttcatcatgcgctgcatctgcggggtcagcgtggccttatcggcagtggcgttgagcacggcctgcacctgctccatattcacgccgtaagccgcgtcttcctcggcagaagtgttctctgcgttctgctcggtgtctttgttggcggtctcgtcagcagcggtgctggatgaggtctcgctctgccagtccttctggttgttcgagtcggtctcgtgcagctcttcgtcagccatcagcatagtctccattcaataggctaaaagtcataatagtggctacactcgaaagcggcgaccagagtcggcaagaagacaggaaattcatggccagacatgtaggtaagcacggcgcacggcactccctatggggtggtgtcgcggtattcgtcgtcattgccttgaccggttttctgctgagcaccaacgtgagggtcaatcgtacggttgccgccaccaacgatacggccgatctggtggagcaaggcgtggacgaggccaaccagctgcagcaggacgtcagcgatctgaccgaacaggtcgccaatcttacggacgcgctcaaggccgatggcaccgacggtactgacagcacgcagaaccaaggcaaggactccagcaatgtggattccagcctgatgctgcccgcgctcagcggcagcggcgtaacggtaacgctggatgattctccgttatgggagaacgccgtcaacaacaatggcacgaccgccaatatcaacgattacgtgattcatcagcaggacgtcgaatcggtggtgaatgccttgtgggccggcggtgccgatgcgctgatgattatggatcagcgggtgctgttcaattcggcggtcatctgttccggcaacgtgctgtcgttgcacggtaagaaatactcgccgccattcaccatttccgcgattggtgacccgcaaagacttcgcgcagcgttgaacgactccgaagccattaccattcttaagcaatatgtgaccgcgtttggcattggctacaaggtggagaatgccgagggccttcagttccccgctaccgccgccttgctgcagcagttgaaatatgccacggtcgatacgtcaaagaccacagatgaggagcagactcagcaatgagacacggcaggcacaacagcggcgcaccggcgcccattgatctcgcgtccgtgtcggacgtacagcccttccccgaggacgacgccgcacgaatggcggcagacccggccaatgccagcagggcaaggtcccgtcgtgccgcagtacgcggcgcgtcttcgccccagcggagcttgatctggcaggcactcggcatctgcgccgaactgctgattaccgctgccgtgatttgcgccctgtacatcgtctggcagatgtggtggaccggtgtcgaggcggagcgagcccagaacgaaaccacccagtccgtcgactggagcgaccccagcaacaacgggggaacggtcaccatcgccaaagcccaggagggcgatgctccagtacagccgaaagacgcgaaatatggcgacttgattgcgcagatctacattccgcgcttcggctcccaatggcatcgcaacatcgtggaaggcaccacgctcgagcagctcaatcgccacggtctgggccattacgacaccacccagatgccggggcaggtcggcaacttcgccgtcgccggccaccgcaacggctacgggcagccgttgggcgatgtggacaagttgcaggaaggcgatcccatcatcgttcgtaccaaggattactggtacgtctaccactacacccggtatgagattgtgctgcccacggacgtgtatgtgatcgcgcccaatccggaagactccactgccaatcccaccaaacgcatgatcacactgactacctgtgagccgaaatactccacccccacccatcgatggatcagctatggtgagttggcgtactgggccaaagtgtctgatggcgtgcccaaagagctggctactactgattcgtccggtgcagtgaagttctccaccaccgaaaccccctcgatcgcttcccgcattggctcgctggacaaggtggtattcggcgcgctggtagtgtggctggttctgttcatcgccgctgcggtggcatggcgctggccggtgctgcgcgagattcgcgcgggtgagcgtcgccgcccggatgccagcatctatggcggactgttgcgtctgcagcccggcgtggcaccgattcgatggctgctgctggctctgctgctgttcgcagccgccgcggcgctgttccagtggggattcccttgggccgccgccaatatcccattcctacagcagatgtcgaacttcgtggcagtgagctgacggcagcctagtactatgtcttgcagtacacgtccctcaaggagagccctatgaccgattccgcgcatattttggtggtggataactacgattccttcgtctacacgatcgtaggctatctgcaaacccttggcgccactgttgatgtggtgcgtaacgacgctatcgacccagccgcgccgggtgtactggacggttacgatggcgtgctgatttctcccggccctggcgctccggccgaatccggtgccagtgaggatatgattcgcctgtgcgcggccagcggcgtgccgatgtttggtgtgtgcctgggcttgcaggcgctcgccgaggtgtatggctgcactgtgggccatgcgcccaccatcatgcatggcaagaccagcttggtggaacatatcgatgacgagattttcgagggcgtggccaaccccatgaccgccacccgctaccattcgttggccgtcgagcccgattcggtgccggatacgctggtggttaccgcgtggacgcagggcgaccacattattcagggcatcaaggtcaagggcaagccgatgtacgccgtgcaattccatcccgaatccgtgatgacccaggacggctaccgtctgctggccaactggcttaaggtctgcggccaagacaacgccgtggccaagtccgccggccttcagcccaaggttacgaagtagcttttccgcgcgcggcgacgctttcccgggaatgttgcgctgggatagctctttatacagcaaaggggaggggtgcagaaacccctcccctttgcgttgtgtgattgcgttgcgcatgtgttgcgcatgtgttgcgctatgtgcgttgcgtatgcgcaacacacacgcccggcgctcactcactcacgggttccgccccccgttgccgttgttggcaccgttgccgttgccaccgtctccggtaccggtgtcgcctccggtgctgccggccttcgtggtaatggtgacggtcgatcccgcatctacttggctgccagcgccaggattgatgctgactaccacagcggtgctgtcggttgggccactggcctgagccttgaggcccacggccttgagcatgagttcggcggtggcgtagtcagtgccagcggtgatattcggtacagcgaccttttccttgcccgtggacacccagatggtgatggacccgccctgcgcgatggaagagcccgaatcggggcttacgcgggtaatcagaccggcctccaccgtatcggagctttcctgctccacggtgaagctgaacttgccctcatactgctgtagcacgctgtccttcgactgaccgaccaaattgctcggtacggtggtcatgccggaagaaacatatatggtgatggtggtgcccttgggaaccgactgaccggcggcaggatcggttctcgtcaccatatccttggcgatgtcggcgctgtcttcggttttgacggtggcgttcaccttgaacccggcgctttccagaatgctgcgcgcctcttcctggctgcgctccttgacatccggaacctgagtggactgcgggcctgcggagaaccacaccttcacggcagatcccctggccaccttggagccggcgtccgggctcatcttggtgcaggtgccttccggctcggtggagtcggtgtcttgcttttcggtcatcttcaagcccaatctctcaagcttgagcttgatgttgtccttggacgtggaagcgttgcacacttcagggatggtgacggtgtcttcagaggacttgttgccggagccgttcatggcgaacatgatgcccacaatgacgagcaccgcgacaatcgccgcgatcgccgaaccgatgatgatcttcttgcgcttcttggccttggccgccgccgcacgctgctgcgcacgggactgcaacgccgctgagttggcaccattggccggtggaatctgctcgaactgaccggtcaccgggttgaatgcctgggtgggctgctgctgcggttccaccggcgtggtgggcaaatcacgttcggcttccttgcgggccttcatattcgacaggtccgtcaatgggttgaacgcggccgccaccggcacgccgccgttcatgtaggtcaggatgtcggtcttgaattcggaggccgtggcgtagcggttctggcggtccttggccatggccttggcgcagattgaatcccacatcttcggcagccccggcaccacggcggatggcggcgtggcgacttcggagacatgctggtaggcgatggccacagcggaatcgccggtaaacggcgggcgcccggtaagcatctcgtagagcacgcagccggcggaatacaggtcggaacgcatgtcgacggtctcgccgcgcgcctgctcgggagaaaggtactgtgcggtgcccaccacgccctgcgactgggtcatggtggttgcggaatcgtccagagcgcgggcgatgccgaagtccatgaccttgaccgcgccctgctcggaaatcatgatgttgccgggcttgatatcgcggtggataatgcccatgcgatgcgaatagtcgagcgcgttaagcacgcccaacatcacctgttcgcagtcgcgctggctgagtgcgccgttgaccttgatgatgtcgcgcagggtctggcccttgacgtattccatgacgatgtacggcaaacgctcggtatcgccgctttcggaagaaaccagttcttcgcccgaatcgtagatgttcacgatgttcgggttgttcatctgggccacggcgtgtgcttcgcggcggaaacgggccaggaagatgtcgtcgttggccagatcggcgcgcatgattttcacggccacggtacggcccagacgggtgtcaagagccacgtggacctcggccatgccgccacgaccgatgagctggccaagctggtagcgtccgccggccaatgcggtgggcatactggtgctcattgcttattccctcccaatcttgaggccggggcctccaaaacaatgcgtggcgtgctggtcactcggcgcggcagtcgattgccggacgtggccatggtggtgtcggccatttcggtctgctgatccagcagacggcgttcgatgcgtgccagcgtacgggacaccaccagcgcgtctttcgggcgatccaacgggtccttggccagcatcgacatgacaaattcgcgtaactggacgtccaccgagttcggcagcggaggcacgggattgttcacgtgcgctgcggcgatatcgaccggagtggtgccggtgaacggacgatgcccggcaaggccctcgtacgccactacgcccagtgaatagatgtccgattgcggcgtggcctgctggccctgcgcctgctcgggggagatgtattgtgcggtgcccaccaccatgccgtcctgggtgatctggccttggccggtggagtagctcacgccgaaatcggtgatcttcacttcgccggtgtcggaaaccatgatgttggccggcttgacgtcacgatgaatcacgccgtgcgagtgggccacgaataggcctcgcgcggtctgaatcagaatgggcagcagttcgatgggatccatcgcgcccttgctatggaacagatccgccaacgatttcgaggggacgtattccataatcagaaagccgatgccgtcatgctcgtagtattcgaacaacgcagcgatgttcgggtgcgccagattggcggaattatgggcttcggcacgcaggcggcgcagcttggcctcggcgttggtcacgtccgagcgcagcgccttgatggccacttcacggccgagctgaatatcgtagcctttccagacctcgcccataccgccttgcgcaagacgcgaatcaagacgatatcggcggtgaataagctgtccttcgataagtttcactgctgcaaagcctcctgcatcatcgcgcgcatgatcgggccagcggcgagcgaaccgtatacatctgtgttatgcaccaacaccgcgacggcgatctgcggattgtccgccggcgcgaaaccgatcacccagccgtcgatggcagagttgtcggtaccgatttgtgcggtaccggttttgaccgccaccttgatgccgtcgatggccagctgcggattggcctcggtcaccacgctctccatcatcgtggtgagcttgtctgcggaatccttgctgaacgcgttggccatggtttgcggtttggtctgcgaaagtacggtgagatcggcggcgcgcacacgatcgaccagcgtgggctgcatcagtttgccattgttggcgattgcctgcgcgaccatcgccatctgcaacggcgtggccgtggtgtcgccttggccgatggatgccagcgcaagcttgtcgtcggtcggatcagaggggaatgtggacgcggtggccgtcatcggggtgcccgtggattcggtgccgtcaatggtgatggtgctgccgaacccgagcttggtggccatgtccgaaaccttgctcgcgccgagtttcacgccaagctgggcgaaagcggtgttggacgaccatgcgacggcctcttgcagggagatctgtccgttgacgccatcggcctgtgcctcgtcgttcggcagctgtgtggcggttcccggcaaggtatagctggagcctgcaggaatcttcgtgtccgtctgataatcgccggtttccagcgcagccgaggcgacgatggtcttgaacgtggaccctggcgggtacagctgcgaggtggcgcggttgattagcgggctattttggcccgcagagagttcgttgtaggcctgagacgcggctttggcgtcatgggtcgccagtttgttcggatcgtagctgggcgtgctcaccatggcgaggatacggccggtgttgacttcgatggccaccgccgcaccatcgcgcgtaccgagctgatcgtaggcaacctgctgcagcttggggtcgatggaggtttcgatggacgcgccctgattcgtagtgccggtgagcatggccttggcccgctgccagatcaatgaatcggcctcaccgttgagcagcatgctgcgggaggcttccaggccgcgatcggcggtctggttgatggagaagaagccggtgaccggagcatacagcggaccgttggaataggtgcgcaggtatttgaacgcgtcgttgaccggttcggatttggccatgaccgtgccgtccgaggccagaatggcaccgcggtaggcaccgagctggtggtacagcgaacgggcgttgcgcggatcgttgttcagcgcgttggcccgtaccgccatgatgatggtggacgacaggccgagaatcacgaacagcgcgaccacggcggtgaaaagctgacgaagatatttgttcatacgcgagtgcctccgttaacgggaggaagcgggggaatcgtaccggtaggcgtgtacggttcatcggcgccggcatacgccggagtggtggcatccacaatgggctcggcgatgggggccgcagcggagcccgcagaggtcacaattgcgggcacttcgggtgcctcaagtgtgtctggcgcgtgcttggtgatgtccacaatggggtcgtcaaacgattccgcctcggactgcgacgccgtagccgacgcgctgcgaggctgaacgatcggttcagtggcgcgggcccgggcctcaagctccttgttgcgcagcacggccaaggcctcgtactggaacgtatccgaggtcagctccggctcgggcgcattggccgagttcgagatgatgatgagcagggtcgcgagaatatagttggcgatcagactggagccgccggctgccatatagggcagggtcagaccggtcagaggaatcaccagcgtgatgccgccgaccacggtgaacacctggaaggccatggtgaacaccagtccggaagcgagcagcttgccgaagccatccttgattttcatggcggtgatgaagccggaggcaatgatgagcaggtagagcatcagaatggccaggacgcccatcaacccgagttcctcgcctagagaggcgtagatgaaatcggagttcgcgaacgtaacgagcgaaggatggccttggccgagaccggtgccgagcatgccgcctgatgccaggccgaaaatgccggtgaccagctgccaggagccgccgggggtcttgttgtattgctcgttgctgaacgggtgcagccaggcgtcgatgcgctgacccacgtggctgaacatgcctgcggccagcacggcacccgcggcgaacgcgatcagaccgatgatgatccagcttgtacggccggtggccgtgtacagcatgaccacgaacatggcgaagaacataagcgaggtgcccagatcgtgctgcatgacgagcacgcccatcgaggcgatccacaccacgatgatcgggccgagatccttgatgcgcggcagttgcaggccgagcacttttttacctcccacggccagctggtcgcggtgatcgaacaggtaggcggcgaagaagaacgcaaggaacagcttggcgaactcgcccggctgaaactggcccagtcccggaatcttgatccagatgcgcgcgccgttcacttcctggccgacaaatggcagcatcggggcgagcagcagcactaggcccaccaccatcgacacgtaggagaagcgccgcagcacgcggtagtccttcaaaaagatgatgagcagcgcggaaagcacgatggcgatgcacagccagatcagctgacgttgggcaatcgcccaaccttcgctctggtcgatgcgggcgatcatggtcacgccggtggcggtcagcagtagcatgcaaggcagaatcgactggctggcgtacggctggaagcgcacaatcagcccccacagcaccagaaacagcactacgaccaatgccagcatgccggcgtattgcatagggaattcgccggcggtgcgctggaacatctggatgaacgccaacgcgctgattgccatggcaatcagcaacaaggaaatctgacgtagacgggtagcgatcattgagaatctcccgtggccgcgttgtcggctgctccgataccggatttatccgaggaatcagatgagcttgacgaaccggactggctggacgaatccttggtgctgtccttggaatcgctctgggaactgtctttggaactgtccagggaattggacgcctcggccttcttggcggcgtcggcttcctgctgcttggccagtttgcgcatttcggtgcggatgatacccacatgcgactgcgcttcgtccaacgaaccgactgtgatgccttggctcagctggtcacgccatgtctgaggcaggtccgcggtggcgatattggtggtctgcacttcgtgcgaaagctcaagtccaaagagattggtcggcacgccacgataaatggccacggtgccgttgctatctcccacgtagtagtgcgtctggctccacgtgtacacgccccagccagcgccggccaaggccagcacggcaagaatgcaggtaataatcaccgcaagcttattgcggcgcttcttggtgcgcgtggccttcttctgctcgatctgctcatcgcgaatggctttggccacatccgggtcgttggggtcggcggacaggcgcccatccggcttttgcaccaccggaatctcaccggtatcgggattggctcgttcaccggtctcctcgcggacggtggacggctgcaccacgcgtgtggacgacggttcggccgtggtttgcgcggcctccgtctcgtgcgcgctggcgggctgaatcaatgctgcggcgcgctgggcgggggaatcatcctcacgcagcgcgggcgcggtagccaccggctcgttgacgatgtcggcgatcggctcaagattacggctggcggcaccgccgaccaacggcgtttggtgcggcagatcgaacgcatcggcatccaacgccaacgtggcatccgcaataacggccgtgacattatcggtgctgcctgcccgcagtgccatctgcaccagacgctgcgcgcattcgccctgatcggacagcgtggtcatcgtctcttcgatggtggaatcttccagcacaccgcacaggccgtccgagcacagcagccaacggtcggcggggtgggctcggcgaatcgaaatatccgggcgcgggtcaatgtcaaagtcgccaagcacgcgcatcacgacgttgcgctgcgggtggttcttggcttcggacggggtgatacgaccggtgttgatgaggtgttgcacgtagctgtggtcgcacgtgatgcggctcaggtgtccgtcgcgcagcaggtaggcgcgcgaatcgccgatatgggcgatgacccagtagccggccaccaatgccactgcggtaacggtggtgcccatgccggcaagcttgcgttcgcgcttggccttgccgacgatggcgtcatgcgcggccataacggaggtttccatcatgcgggagatcgtctcgacgttgccgccggtgtcgtcctgctcgatgtgggccagtgaccggatggcgatggaggatgccgtatcgccgccggcgtgaccgcccatgccgtcgcacatggcgatgagatgctcgccggcgaaggaggaatcctgattgttcgcgcgcacagtgcccacatcggacaccgtggtggaatacaggaacagcggttgtgaagcggcggattttggcatgcggctacctcagttcgaaggtggtggcgccgatgcgcacaggaatacgagcgggcaggatggtggggcggttgatgcgctgctggttgaccacggtgccattggtggagttcaggtcttcaatggcccactgcccggagcgcgtgtcacggtagacgcgggcatggtgggaagacacgaattcgtcatcgagcaccacggtgttcgaggcggcgcggccaagcgcgatgtcggcttcggccagcggcacggagctgccggcaagcggaccatcgatgatgaccaacagggtaggctgcgccgaggcgacggacgacgcggaagcgctgggccggcgatgcgggcgcggcgcagctgcctgtggcgtttcggccttggccttatgcacttcacgctcacgacggcgacgcgcgcgcgaaggtcgcggactgaacgtctcgatgtccttgcgcagcgaacgcacggccagccagatgaatatccacagcaggatcaggaatccatacttgagcagggcgaatgtcagttcggtcataagtggacgactttcgggcgtgtgctcgactactcctgggcttgggcggaggcccagtacaggatgcgggtacggccgatggtgatggtgttgccatcgagcagcgtggcggcgggcacttggtggccctccacgtacgtgccgttggtcgaacccaggtcgcgggcgatcacgccgttatccgtgatgtcgatttccaggtgcttgcgggagatgcccggatcgtcgatgacgatatcgcagccggaaccgcggccgattaccgtcttgtctttggtgagcaggtactggttgccgttcacctcgagcaccgggctgtcctcggtctgcgcatcggtggtgaccggcacggcattgccctgcacggattcggaggtgaggttgaagttgcccttggacaggtcaaggtcttcctcgaagatcacgatcaccgggcccacgaaggcgtaatgctggctcttcgcgtactcggtgaggttatcggccagttcgttggccagggtctcgctaccccatgcctcgatacggtcgaagtcaggagtactgagcttgaaacggtattcattcggggccaccgtgcggtcacggcccacgggcatggcctcggcgtcaatctcgcgctccaaggcgctggaaagatcgacaggctgcaggtctttggagccaaacttggcgaatactccgttgactgcaccctccacgcttttttcaaaacggtcgagaacgctcatagtcctccctttctaatcctcacccatcctacgcggtgatgggaatatgaggcaaaaaaccggtctttcacatgacgatgggtgcaaaatatccaaaaatatccaaaaattcagggcggaaatgggtgcggcgcaccacctgcgccgtttttccgcatgccgtgtgggcgcgggccccgggcgtgccgcggacgtcacggcccacggcgcgcccggggccggtcaggccagggcgtcgcgcaggaagtcgcgctggagggtgagcaggttttcggctacggtctcgtcgttggtcatatgggtgatgcccgtcaacggcaggaaggtgtgcgggcgacccgccgccatcagggcttgcgagaggcgcaggctatgggcgatggtgacgttgtcgtcggcgaaaccgtggatcagcataagcgggcgctcgagtttcggtgcgtcctgcacgatgccgttgcggtagtagacatccgggtcgaggcccagatagcgctcggtgtaatgcgtgtcgtacagcgtccagtcggtgggcggggcaccggcgcacgcggccttgaacacgttcggcgcgtccagcacggccagtgcggacaggaagccgccgtacgaccagccgatcatacacaccttgtcgaggtccggtgcgggaacgccgggcctgcgcccatcggcgttgagcctggagacggcctcgggaagggcgttgacggcttcgatctgatcggccagcgtcacgcccttcatgttctcgaagattgcgcgatcccaggccgggccgcggcctgtggtgccacggccgtccgccgtgaccaccaggaagccctggtcggcccaccactggccctcccagtagaaggactgggaggcgacgacctgctggaagccgggcccgccgtacggcttcatcagcaccggcagtttgtcggcatgggcgtacgggctggacgggctcggcgcgatgatcgccgtgtacaaccggtgctcgcccagccgcgtgaacgtgacgttcggcgtgaacccgggttccgcggcggtgctggtgatgtcggcggcggtgatgtcggtggtgttggcggcatcgctggtgttggcggcgatgacggcatcggtgacgccgccgacggcgcgtcgcgtgacgatgtgccgcatccgggcgcgggcggaacgcatatcgcgcccagacaccaccatgccgcgtgcgccgcgtgaggccgtccactgaccgggctcggtcgtgatcggcgcgaccgagccgtcatatcccatgctcactacatcgaagctgcgggcgtcatggccgccgaacagagactcggcatccgaagcggcacccgagccggcccaggcgcgcggcacctcggtcgcgatttcgggcgcacgctgcaccacggccagcacatcctcgtcggtcacggcgagcaccgtgcgcacgttccagccagccggcgtgaacggtcggccgtccaccgtcagacggttggtatccgtggccatatcgttgagcgagcacaccagacgatcatccggcgtgtaggcgggcgtgccgtgaaccaagtcgatccactgctcgttcgcgtgctcctcaagcacacgcgtggcgcccagcgcggccccatccgccgcgaccgccacctcgagcacctggtcgcgggtctggcggcggttctgcaccagcaccagcggatcgtggccgcgacgccagctcacggcggccacatactcgtacgcctcgcgatcccaatccacatcggcgttgccggtgatgcccgcgtaccggtcgttctcatcgaacgccagcgtgatcacggtcaggtacacgtcggcgttgcgggtcagcgcgcgcgggtagcggcggccggcggccggcttctcggggtcggccggatcgctgatgtaccaggtcggctcgtcggcggtgtcgaaggactcgaacagcacatgctgcgaatccggggcccaccagaaaccgtcgtaacggtccatctcctcgccggccacgaactcggccagaccgattttccacgtgttttcggccggattgccgtcctcatcctccacgctcacgccgtagaccgcggtgatgcggtcacccagctcgccgccgatatcgaccagcatcaggtagctgcccgtggtgtacagcacatgctcgccatccggggcgatgcgcgggttcagcaccggcgtgtacatctccgggtcctcatcgagccattcgccggccagttcgcgggtgtgcggctcgggtgcgccggtctcgtcattccaatcgatgtcggtcaggaacaggcggccgttgatggtgaacacgatgcgattgccgtcatcgtctgcggagtagccgacgatgccggtgccgccttcgcgcgcacgctcgcggcgggccttctcctcggccggcacgtcctcgctgtcggcggttgcgccaagcagttcgcgcggatcggccagcttggtctcatggtgttcgccggactcgtcgaaccagcttagccacagtgcggtcaccagatcctcggggccgtcggagcgcaggaacagggcccgcgagccgtcgcccacggtctgtgcggagcgcggtgcgccgcagccgaaccgcagcgtgcgcgccctgaggcgtgggaaatgcttgattgcgtcattgacatcattggtttcgctcatactcacaacctacgcgcctgtgcggtcagcggcgtgaggcttgtcctaagatgggaaccatgcaggtgacgatgatcgacgagaacaagtacgccgaaacgatggccgacgtggtgctgcccgcgctcgagcaatgccgcgaggagggctggttcgatccgtccgccgccgaacgttcggccggggtcgagccgctgtccggcattatggacaccggcggccgttcgggacagctgcactacctgtgctatgacgccgccaggttcgacgcgatccgcgaacaaggcgccaccgccgtcttccgcggggccatcgtcatcagccacggcttcaccgagttcgccgagaagtacgacgaactggtctggtacttcctgctcgccggctattcggtgtgcgtgctcgaacatcgcggccacggcaagtccgcgcgcgacgtggacgatcattgcatggtgtggattgatgactggcagcgctacgtggccgatctggccggcttcgccgaaaccatcggccagcagtacgcagccggcatgccgctgaacctgttctgccattcgatgggcggcggcattggcgcggccgtgttggagcgataccccaccctgttcgacaaagcggtgctctccgccccgatggtcgcccccgccaccggcatgccgctgggcgtggcccgtgtgctggtcggcgcgctgtgcggactcggcttcggcaagaagcgtgtgttcgggcagtcggacttcacgccggagttctcgatggaaggcaacgagggcgcttccgaggcgcgtgaacgctggtacttcaagctgcgttgcgagaaccgcgaataccagacctactgcgcggcgttcgaatgggtgcgccaggcgttgaagctcaaccgggccgtgctgaacccgtccgcctgcgccgaagtggagacgccggtgctgctcttccagtccggacgcgacatctgggtactcaataagccgcagaatcacttcgtccaactggtcaaggacggcggcggcgaggcgaacatcgtgcgcttccccgaatcgcgccacgaaatcttttccatgcccaacagcacctacaagccctacctcgaaaagatcctcggcttctacgacgaccccatgattgcctgcgccgcgtactgatgtagctcttcacccattgttcaccgtgcggtcaccttgtggcccggcccgctttagatggcgggagagccatggaattatgggcataatgtcttctctccgccgccgcggttgcggccgcggtatgtgccggcgtgctcgcgttgaccggttgcacggcgttcaataattccgatgacggcacagcggacggcaacggcacgtccgccaccacgcagaccttccagccgtccggcggcaaaccgactgccaccctgagcattgcctccggctccgaaaacaaggaagtcgccgtcgccatccagaaagcggccgaccaatccaacgtagccgtgacgatgcactacatgggttcgctggagattatgaacgcgctcaaggccggcggccaggatcacgacgccgtctggcctgcctcctcgatgtggatttcgatgggagacaccaagcacatcgtcaaagacgcggccagcacctccaccacgccgatcgtgttcggcatcgccaaatccaaggccgtcaaactcggctgggctgacgacaccggcgccaccaagcccgtctccaccgcggacatcctcgccgcggtcagcgacggcaaactcacgttctccatgacctccgccacggtgatcgacagcgcgctcaacgtctaccagaccgcgctcaggaaacccagctggaccatttgggtggtcgattactccggttcgatgtctggagagggcaagaacggcgtggtcaaaggcctgaacgcggcgc

SEQ ID NO: 1064 - DNA, 2949 bp, Unknown
  R13_10m  MAG No. k141_4300
atcggcatgttggcgatagcctgaccggatgcctgcaatgcgcagaacacggcgacaaacagcactgatgtcctggtgttgatggtgccgagaagaccaagagagatggtcatgagcgcaaggccgccgatacccacgcctcgcgggccgaatttgtcgaatgcggcaccggcgaccggactcaggatgatgccgatcgccgcggcgggcagcatgaccatgccggtgacggtggcggattggccgagcacattctggatgaagataggcaacgtcacgttggttgcggcgactgcggcgttgatcagagtgaccagaatcgcggagttgcggaagttgcgggtggcaagggtgtcaacgcgcaacaatggctcatcgagcttgacttgcttgtatacgaatgcgacgaaggccacaagaccaacgacgattgagataatgacgaccggactgctccatcccatcgtggaagcggacgagaagccataaagcaggccaccgaacgcgatggtcgaaaggatcacggacaggatgttgagctttgggttcttcaactcgctgacgttcttgagcatcatcgtgcctccgacaaggatgaccagtgccacgactgcgatgccaatgaacatcgggcgccatccgaaactgtcaatcaccagaccaccgacaaccgggccgatagccgggccggcggccatgacgataccggccatgcccatggcggtgccgcgcttatccggcggatagacgagcatcggcactacggcgaccaatggcaacagcacgccggagccggcggattgcagtatgcgtccgacgagcaacagcatgaaattcggcgcgacggcacacagcagtgtgccgaccatgaaagtggcaagagctccggcgaagagctttcgggtggagaatttatcaatcagatagcctgaaatcggcaccatgatgcccgagaccagcatgtagacgctggtcacccactgcacggtgccggtggtgatattgaaatcacgcatcagtgccggcaaggccggtgacatgacggtctggttgagcagcgcgatgaacgagccgacgacgatcacacccacaacgatgaatcgggtgtgcggatcaataggctttacggaactggtggcggacccgagttccgcgtttttctgtgaggtcacagcatttccttctgttggtaacgtcatgtgtggcgatccggccccatgcttgtgtcaagacgcgaggacaccgatgagtccggacgtaaaggaaaagccgccatccgttccgcattcatatacggcaaacgattcgcggctttgcgtaagttgatggctatggtgagcgattcatgcgacgtcgactgcggatgggccatcggtacatcccggcataaggcgtgtccccgctacaccagcatcgagaatagggccattcgtggattggcaaacagaacattgccgacgaacgacccacggcaggcgcgtgcgatgaacatcgcgtagcgatacaggttcatggcatctccttgatggggtcttcgtacggcagacatcgagaagcctatcatcattcaaatcgacggtgaaacccacgcatgcctgacaatacacaaaatcttcacaaaaggattgggcttaccgcatacgctccgcctgaataacggtccggggatgaatcaggggcgagccaagggttgcatctcgtgtttccgtcatgatttctggcgaagactcataatagaacacacattatgctgctgcagcagccagtccttgcagaacaatgtcatgacaaaggcctgagaagacgacttctcaggccttatccgtaccgctcccccagtcgcttgtagcgacagctcccctcgaagaggggagccagagaaacacttacttggagacgttgaacttgaactcggcgtcttaccggtcttcttcgtcccgccttgccgcggatattcaatcgcatcgcaggggtgacttcctcgatcatttgacagaccgaccgacggtctgtatgtttgacggggacatgaacgaaaggcaggccatccgcatggcgcacgatatgcattccggagacaccgaacgacgaatcctcgattccgcccgcaggctcttcgctgaaaagggctacgagaagacgtccatccaggacatcctgaacgacctgggactgtccaagggcgggctctaccaccacttcaaatcgaaggaggcgattctcgaccggctgaacgccgacgagtgggccgtcaccgcgcgtcttctcgacaaactcatcgagcgcaaggacatgagtgcgcttgagaagctgcgcgcgctcatcgtttccgccgtggacgcccccgatcatctggacctagtccgttcccagctggcgctgctcaaggatcctgcgttctttacggcgaacattcgcttctggtcgacgagactgccggagtccttccgctcgctcatcgatatgggcgtgcaggacggctccattcccacggcataccccgaggaggcggcgcaactgctctcgctcctcggcaactactggctcatgccctgcttctaccccgccgatcatgccggcatggaacaccgcatccgctgcctcgccacgatactcgacgccatcggcgtgccagtgttcgacgagacgctcatcctgcggacgaccgaagggctcacggccctgacgccggaagaggatacagcgtccgcataggagacgcgcccgggtgcgccgcttcttgcacatcctgacgtcacagatgtcgaagcgcttccgcgccttttccctgggcgtattgttaccacaataacagaccgacggtcggtttgtataaatggccgtggccaatcacaagaaaggaatccacgatgacgaacgcatacgaatgcacgacccaaccacaaagaagccaagccgctgatcctcttcgcacacgcgacttccgcc

SEQ ID NO: 1065 - DNA, 22497 bp, Unknown
  R13_10m  MAG No. k141_4336
gcgtagccaaatgcgtagccacaacgggccacccagaggcatccacagttacctgtgcgaaatgaagaccgttgaaattaagccgtttctaagattcccgaatagttagccgataatgtacgttatgtcagattagttatccttgacgaggattcagtcgcctgtatcaactagtccacgcataccagaccgacagccaaaaggccgacagccaaaggagcaccggagcgaccaccgcaattgcaagaatcgccgtgcctttcagccaatccttgtcatttcgtttccagtggaatgctcgccaaatgaaccatatcagcatgggaatctcatacagcgacagcaatggcaaaccgatgaaaaccaggtcgaagcccgcggcgcaggctccatcgcatcccatcatgaagaagtcctcgccgttgtgtttcagtgcgtttggaaataacggtttacggcgtcttcgagctgctcaggttgctcaataatttcgtaggcaccgtgttcctccatctcaccggccggagcgtagccccagcggcagccgatggcgtccaaattacaggcgtgggcgccgtcaatgtcggtgtagcggtcgccgatcatcacggctctgtcccccgctgcagcatcaaaaccgattttgtcgaagcagtaccgaatcacctgatctttgtccagacgggaattgtctttggaagcaccatagatgccgtccaacagttcggtcaggtggaaatggtcgcagataggcatgcactggtattcgggcttgcagctggccagtgccaggtagtaaccgtcggcatgcagtttgagcagctgttcacggatgcctgggaatacgacgttcaccagtcgtccgggcaccttgttgccgggctcgttcggatcgtcgaacacggcacggtctccgtagtagctgcggtagatgtccacggcccgatccagatcttccgcaggcacatgattgcgacgcagagattcaataatcgccggtccgatgaagcgtcgcagttcggcggcgtccggaaccggtcgaccgatctcttcgaaggtcctgatgacggagccgataatgccgccgtcggacttggtaagcgtgccgtcgagatccaacaagaccactttcatcggatgctgtgccattgagattccactcccccttgttcatgtcggctgctttgaatggtcgtcaaacaatgcgacttgttccaacaatgattatgcccagtcgggatgactgggcatcaagttcacgtgttgttcagtaggagatcactcgtagtcgggaatccaaccgtcacggtgcatttgcaggcgcttttcgagcagggtggccagttcctcttcgctacggcgttccagcagcatgtcccagtgggtgcgggtgggtttgctgatttcgtcgccctcacggtcggcgtcgccctcacggtgggccacggaaccacaacggcactcccactcgtccgggatttcggcaccctcggcaaacggcaggatggtgcggtggcccttcgggcatacatacgccacatcgtttcgcgcggcgaaatcgacgttgtcgtcggactccagcgatttcgctccgatgctcatgcccctgaggctacgttctgccatatcggcatcctccttgaaagatctttaaccctactaatttacgcaacagttcggacttggccgctattccaagcttccgacgtcggctgacaaactcccgtcaaacagccccgtcagtccacgccggagtaggccaccacgccacgattgacccggtcggccgcttcgtgggcgaggcctgccagccgctctcccccgtcgaacggcagcggctgggcgacagcaatctgctgcagcacgtcagccagtcgtttggcagtgcgcacgaagtcgccgccggtcatgtcggtgccgtacaggcacgatcccagcgaaccgccatccgcccattcatacatgatgtcgagaatgccgaaatccggccgctgcatctcgtccagaccgtgatcctcgcacaggatatcgatgtcttcacaaatgcccttgagcttggacgaagcgatggcgatgggcccggagatgccgcccgggtagtgcctcggttcgccgtctcccccgcgtctggcctcgtataccagtgaagagagcacagcggccagtccgttggcgtcgagcttgtcgaacgtgccggcgagcagcgcctcgcacagttccaggtcatgttcactgtagatgcggcgcagcagcagacctttttcagtcaacgtcatgtcaatgtggccggccgcattgacatgacgttcgaggtaaccaagcccggtgagaatatcgcagatgcaatcgaactggcgtgccacggacccggtgcgggagtcgtagcgatcggtgacgcgctgcagttctcgagtctcgcgggcccagcggtggccccatttgaggtgttgctggaggtccgggcaattacggcatggatgctcgtgttccgccttgcgcaaatcgcgaatgcgctggtcgaggttctggaaagcgcgtgaacgctcctgatcggtcaggaacacttcgtgcttcagtttgcggcggccttccttttcgatgtcgctcagctccatacgcagggtcatgaactgtttgaagtcgccgtgttcgcatgcgaacgcctgttcgtatccggccagcgcgttcttcagtgtgttaatctgcgattccagctgccaggccgattcgttggcctcccactgggcaaacgactggtccagggtgacgcgcgcggtctcgtagtcgctggagttgagcaggttcacggccatgttgaacgtgggtcggaagctcgagtgcagcgggtagacacgcttggatgacagcgaggcggccgtggcgggcacaaaaccgtgatggtcgaccacgatggcgtggccgatggtgtcgatgccgcgccgaccggcacgaccggtgagctgcgtgaattcgccgggcgtcaggcccacatgaccggtaccgtcgaacttttcgagtttctctaccaccacgcagcgggccggcatattgatgcccaatgccagtgtttccgtggcgaacaccattttgaccagaccttcttcgaacaatcgttcgactatctgacggaacagggcaatcatgccggcatgatgcgaagcgaagccttcttccaatgcaaagcggaacttggagaactgcagggctttcaggtcttcctgagtgagttgcccctccaccatctcatccacgatgcggcgaatcctggtcacttcctcatcggtggtgagctccagtccagcgttgatacactgttccacggcctggtcacagccgttgcgcgagaagatgaagtagatgccgggcaacattcccaggaagttaagctcgtccaccacggcccagcggcgcggggtgtggcgttccgctttcggggcacggtctttggcgcctttgccgccgcggcctctgccgaagcccttgcgcttatcggggcgttcctcgccgcgccggcgtgcggccttgcggtccaactggtcgagccggttgatgagttcggcgttgagtttggtggtctgctcgccgttgccgtcgcggcgatagaggtccagcacctcgggctcggtgtgttcgtccgcctgcacgatgacgtgctgttccaaaggcacggggcggtgttcgctgatcaccagttttgtgtcgcctcgcaccgaggcaatccagttggagaaatcctccacgttggacacggtggcggataggccgacgatcttgaccgtcttgggcaggtggatgatgacttcctcccacacgggcccgcggaatcggtcggccagatagtgcacttcgtcgagaatcacgtagcgcagtgcgttcagcgtggtggaacgctcgtagagcatgttgcgcagcacttcggtggtcatgaccacgatgtccgcctcggaattgatcgaggtgtcgccggtgagcaggcctaccttgtccgggccgtacacgtcgaccagatcatggtatttctgattgctcaacgccttgatcggtgtggtgtagaaggctttgacgttgcgttcctgggcgaggtaaatggcaaaatccgccactacggttttgccggcaccggttggggccgcgaccagtacgttgctgccggcttcgagcgcgtcattggcttcggtctggaagtcgtccagttcgaaaggcagggattcggcgaatcgcgctgctgcggacgcccgatggcgttggaccttttggaatgatgcgtaccgctgcgaagggctcagcgtctgggaatcggcattgcccttatggtgttggtgacgtgccattgctgctttccgttagttgttgaatcgcttccagcgggcccatgcctgggtgtggcgttcgcgcttggcggccttgccgcgaatcacgttcgcatgggcctcggcataacgattctgtgccacgctgagcggctgagtgaacagaggcggctcgctggtgtcggcagaggtgccgggctcccccatcgcggccacgcgttcaccgagttggccgccgatgtcggacatgtctttcaaggcacggagtccatgaagggctgcatagatgagtccggcaacaatcatggccagcatgaacagggccagaatcagccatatccaccaaggcatgaaaggctccttacttgttctcgctgatgctcagttcgcgttcggcgcgtgccacgatcatggtgcgcaacgtttccggggcgaccgccgtgatatgacgcgcgtgggcgatgcagaaggccacgaaccaggaatcggaggaaacggtcagatgcaccttttcaccggcaccgcattgttcgacggtagcgcccggcaatgtcttgatgaatgccagatcgcgctgatcggtgatgaacaccgcgtcggtaccgttgtcgaaactccacttgcgcagttcgctcaccggcatgttcgggatgttgatctgcttggtgggcttgaccagttccgccttttcgatacgggccaatcgcagtacctgccagatgcgcggcttgccgttggccttgtcgagggtcttgtctttggagacgtaggcctttttgtccttgggtgcggcggaaccaacgtccgtgtagacggcggcataatacacgccttcgtcaatgaagatcttggcgggggccaccagcttgcggcgggtacgacctgtaccgtcggtgtactccatgtccaacagcgaatcggtgttgatcgcacgcttgacgatggagaagcttcggggctccagctcatagccggtcaggctcagccacggggtctgaccgggactgacatgacggcgcaaacgctcatacagggattcggcctgcccacgctgcttgtccggcagcaacggcgaatgcgccaggtagctgaccgaggcggtgagcatgctgaggtattgcggcgaaatgccggcaagacgttcaaggcccagcgaattggtggcggaaacaataccctcggcatccagcagcggccagtcaatatcgaagaactggctgccggccatctcaccatcgtcggaaacggtggtcagggtgttgatgtccttatggatgatgttgacgaatttcttgagttcatcatcgttctttggcttgccgataaagcgttcgcccagctcgctcatcgagaattcctcacccagatgagcggagaggaacagcatcagacgcaggcgacgatcaacctcactgcccgtttggaaagcggagccgttcttcttgttctgagccttgatagactcgggatcacccggctctcgcacatcgcgactaatcgacggggaaaccaccgaagcgctcacaggactggcggattcgtcggccagagtgaaccggctggcggcgtgcaaacggcgatgataagcgtccacagcctcttgcgggctgacaatcgtggcccccggatgctcaagcacaaacatggccaaatcgtcggaatcggtgtatgccacgttcaggtgttcgccatccacgtcaacggtggcggcgaaacgacgcgaatcaataaccttgaccagtgaatccggaatgggctgcgtccccaagccaggcgcaatcgaatccaagccaagcccgggaatcggggtctgcggcacacgcggcgtagtgcgcgacacatgctgggtgagctgggactgatccggctcggaagaaatcgacatcgaacgagccagatagttggcggcggcaagcaccggcatatcttccggctcgaacatcaggcggatgcgcggttcgtcgcccaactgcagacgataggacgcgaagtcctggccttccgacttggacgagtactcaggctgccgtgattcgatggcaatgcccatcgcagcgagcttggcgcgatcacgctggaactgcttggcgaacgcggccttggcggcctgatctgccagctctccatacgagtcggcgtaagccttgacgcgctgcgcaatttggcgggatgtgagccattgcgggaacgcggatgacaacacagccagtacgtccagctcgtgcttgccccatttgtcggaaaaacgccgacgtccgcttgtgccctctgccattagtcctcacgtatagttattgtttcgttataagtgcgtatgagtttccccacactcactctatcttagaggctttttccacagttgagcgccatttcacaaaaataatatcttttttatcgttcgaccgtgttgtaaatcacacccaatcgtccggttcgatgccttgcgggccaacgtattcgccgttcggcacgtagctcggctcacccttatcttcaagtttggcgtcggcgaacatcatgacgtcacgtccgaatgtccagtcgccctgaatggaaaccgagttggctgcggccaaagatggcacggcgtaggggaaccgttcgtcgaaatcgcggatgttcttgtagtatcgcggatcaagttcgacgttcgggaagatgtaattgccgtcttccatctcatacgtgtccgtcaggtggaagcgatcggaacgcataatgaacaaatcattggtggttttcaccggaaggaagcgcatacgatccacttggacgcagatagaaccgttgaacagaccgattgcggcacccatggcggtttccagctgaatcacctgttcggagttcgggtccgtgggattcacggtctttttgttacgaatcaccggcaacggcaacacaccatcgcattcggcgagcttgtctttcaaagcgtcgatgcgaatccagatcgagttggtgttgaagtaaggatgcttggcgatgtcttgggccgcttccttatcatccggatggacctggctcatttcacgcagtatcaggcgaccagtggccttgtctcgcacgatatggcctcccttgcgatcggccttggtgcggatagccacttcggccatgaacggggcacctgtgttttcgaagtgctgggccaacgtacgcgaggggcgtgcaccgagattgtcggaattggagatgaacaggtacttgaagccgcgctcctccaatacgtcaagcaggccggactcccagatggtggagaacaggtcgccgtggccgggcgggcaccattccagctccgggttcatggggtagctcaccggttcgccggtggcggccacgagtttgggttcctgatgctggatgatttccatcggcacgtcatgctggctgaacttgcgatgatgcttgagcgccttcatcgtgtccgccgaagtgcggaaagaattcatgaacgtcagcggcagttcgacgtccaggcgggtgcgagcggtaagcacctgaccgatgatgatgtcgatgaagcgcatctgcttggccttgtgcctacgcaccggcaacagcgacttggccttgtccaatcccatggaggtgcccagaccgccattgagcttgaggaatgcggtcttggcgaaggcgtccacggccttgtcgtggttgatggtctcatagacgtcgtggaagctgggcacgtggccaagcggctcgatgtcgtcctcacgaatccagctggaggcttcttcatggcgccatacgtcatacaaatggcggaactggttgatggcggtttcgctcatgccgtgctcgcgcatcttggcggccgaaagctcgaaagtctcatccacttcgggggtgtttacggtttcttcggggatatccgaggtgacggcgtcggtgtcgtcagcggcggcgatatccagttgggccttatcgtttatttcggtcaattcgggtccctttcatcaaatcaataggaaccagtctagcccctgtttggggcaaacacatacgacgggaggcggaggcggtgaattgtcggtgataattccaataacacgccaagatgaagtccgtgtttaatccattacgaatggcttacaaaggtaagtccgtcgtcatgttgtctcatgttgtctgaaaacggaaaagccccggaaggcaaccactcagaagtggcgtaattccggggctaatcggtcgggccggcgggatttgaacccgcgaccccttgacccccagtcaagtgcgctaccaaactgcgctacggcccgatggtgcaaaagcaccgagtagataatttaccagatatatgaaatctggcaaattacgcgcgtgtcacttccgcttcttcttctcgcggatgttcacggagatctgaatcggcgtgccttcgaagccgaattcctcgcgcagggagcgttcgatgtagcggcggtagccgtgctcgaggaagccggtggcgaagatcacgaaacgcggcgggcgcgtggacgcctgcgtggcgaagaggattcgcggctgcttgccaccacgcaacgggtgcgggtgggcggcctggatcttgccgaggaaggcgttgagcttgcctgtaggaatacgctgatcccaggattccaaggccttatccatggctcgcgtcagacggttggtgtgccagccggtcttggcggacaggttcacacgctcggcccacatcacacggtcgaattcggtgttccacaggcgttcgagacgctgcttgtcgaactcgtccatcgcatcccacttgttgaatacgagcacgattgcacggcccgcatccacggcggtggacatgaccttcaaatcctgatcggataccggctgcgaggcatcaaacagaatcagcgccaattcacagcgctcgatggcggcctgcgtgcgcagagaggaataatattccgcgccggtgagcttgtgctggcgtcgcttgatgccggcggtgtcgatgaacagccagtcctcgccatcgatgttgacgatttcgtcgacggggtcgcgcgtggtgccggccaaatcgttgacgacggcacgttcttcgcgcgccagctgattgagcagagacgacttgcccacgttcgggcggcccaccagagccacgcggcgcaggccggaaggcgtgaggtagccggaagtcttctcggcctgcttgagcttgtcgagcgcgacgtccagcaggtcgcccactcccctgccgtgcatggcggaaatcgagtatggttcgccgaggccgagtttccagaattcggcggcaaggtattcgctggcctggtcgtcgatcttgttgacggccagcacgacaggcttgccggcggcacgcagcatcttgacgatgcgctcatcggtggtggtcatgcccacttgcccatcgaccacgaataccacggcatcggccaaggtcacggcaatctgtgcctgtgaggcgatggcggattcaatgccttccacgtcggcttcccagcctcctgtgtccaccagcttgaagtcggtgccggcccattccgcgtcatagctcacacggtctcgtgtaacgcccggcgtgtcttccacaacggcggcacggcggccgaggatacggttgaccagggatgatttgcccacgttcggacggcctacaacagccagcacgcccaccggcttgggaccggccttgcgcgcgccttccgtgaaaccacggccggaaatcagatcctcatcgccttcgtccagctcatagccttcgagattggcggcatactgctcgtattcttggttctcgatggcgtcctcgaccacaccgatgagcagatcgagcgtgtgggcgaagtccagatcggaattgtcgatggtggtaacgccatcggcggcggtcaggaagctggtgaccttggaatcggccttgtcgcgcgcggccacatcctcagcgcccacgcccttgacagcctggccggtgcgacgggcctgacggacctcctcacgggcggtcagcagcacgcgcacctcggcgtccggggacaccacggtggtgatatcgcggccctcggccacgatgcccaaccccccggagaaggagtcggccgacgcctcgcgggcgatgtaggcgcgctgggcggcgatgagcacgttgcgcaccgggatgacgttcgacaccttggagacatggctggagacttcggaggaacgaatggcctcggagatgtcctcgtcgtcggcgaatacgcaggggttgtccgggtccacggagatatcgaaatggtcgccggtgaagaactcgcccaccgcttcggtgatgacacgctcatccacggtttcggcgtccagatcgatgccctgcttcaggcaccaccaagcgcaggcacgatacatcgcgcccgtgtcaaggtaggcgtatccgaaatacttggccagcgccttggacgtggacgacttgcccacgccggcggggccgtcgatggcaacgcgaatcacaggccaacctccttggacagcgaacggacttccgtctgggacagcacgcggtaggaaccgggcttcaaatcaccgagtttgatcgggccgatctgggtgcgcaccaagcgcttgaccgggaagccgattgagccgaagatacggcgcacgatgcggttcttgccggagtgcagcacgaccttgaccatcgtgtggtcgcgtgaggagtcgatgatcgcgcagtggtcgagcttgatccagccgtcgtcgagctgtacgccggtggtcacgagtcgacggcatacggtgccggagatcttgccttccagtgtggcgacgtaggtcttttcgacctcgtacttggggtgcatgacgtgctgcgagagttcgccgtcgttcgtcatgaggataagaccctcggaatcgtagtcgagacggcccatgtggaagatgcgctcgtacttgtcgcccacgatgtcgcgcaacgtgtagcggcccttcgggtcgtccatggcggagagcaccttgcggggcttgttcagtgccagagtgacgtggttcggattgacgcgtacgcgcgaaccgtctacgcgcacctgctgcttatgggggtcgacgcgagttccgagctcggtgaccagttcaccgtcgacctcgacacggccttcggtaatcatgtcctcgcacttgcggcgggaaccgaatcccgcttgggcaagcagcttctggagtcgaatggaattggaatcgtcttgcgctttcgcagcgcgggaatatgcgtttggcatcgttctcccaacgtggccggacagactctgtcatcgcagagactgtcgatttgtatacatacttcagagttggcggactggaatcccagccaattccaacctatatatcataccgcaacgtaggactgctgctagactggcaaccgtttgtgcgggttcgcccgtcttccaacagatgaaaaggaatgaacaatcatggaagaaaccaagcaacagccgctggccctgcgcgtgtgcgccgaattggccggcagcttcctgctgtgctttgccatttacgccttctccacatggggttcggccgtgtatggcatcaatatcgtgttcttcgcgttggctaccggcttggcatatgccgcagtcaccgccatcttctcccgcgtgtccggtggccagctgaatccggccatcaccgtagcctccgtgctggtttccaagacgaaaatcctggatggcatcctctatgtgatcgctcaggtcatcggtgccatcgccgccggcttcgccgtggtcaagctgctgcccacatccgagcaggtagctgccaaagtgtggctgactccggccgttaacggtttcgagaacggctccgtgtcttactcgctgctgacccagtatggcattacgttctcgattacgctggcgattgtcgtcgaggtcgttgcctctctgattgtcgttgccaccgccatgtcttctctgggtgatcacggcgagtcctcggaccgtcatgtcattgccatgggtcttgcctatggtctggccgccgccatcagctacccggttaccggtgccggtctcaatcccgcccgttccaccggtatcgcactggccgcgatgaatgagggtcttacgcaaaatccgctgcaacagctgtgggtgttctggattagcccggtcttggccgccgctgtggtggcgttggtcatgatcatcgcgcagatgatgaccactcccaaagtgccggctgccgccgatcttccacagacggatgccgatgcgaacgcggacacgctcgacgatggcgaattcttcgatcaggccgcctcgtctgatggcgattcagcggaaaaagatgttgccgaagagtccaaagaagctgaagtaggtaatcagcaggccgattcccaaggcgatgccgatgaaggagtcgaacgccactgagcgcactttccatgggcttttgtcctgaagaatcaggcgaacaagcccggtgatgatggccgtcacggcaagtatgaccgtggcggccatcgtatatccgaaagcaaccagcagtgtgatgacggcgacgacgccgagtacgcaccattcaaaccatggcttgccctcatgcgcttcggatacatagggatggttgtgcatgttgcgattccttctgtcgaacggttacgtgaccacaatagcaggcgaatagcaaaggtgggattccgcttggacccgttgacgggtcaggcggaatcccacctttgtgcgttttggctgagctgctcccctcagagagtcccgatcagtggaagaagtggcgggtgccggtgaggtacatggtcacgccggccttcttggccgcttcgatgacctcctcatcgcggatggatccgccgggctgcacgatggccttgacgcccgcgtcgataagcacctgggcaccatcggcgaacgggaagaacgcatcggatgccgcgaccgcaccggtggcgcgatcggcaccatcggccagcgtgttggcgcgctcgacggccaaatggcaggagtccacgcggttgacttggcccatgccgatgccgaccgtggcctggtcgtgggccagcaggatggcgttggacttcacgcagcggattgcacgccatgcgaacacgaggtccttcagcgtgtcggcgtcggcggcatcgccggccacgagcttccaggcgtccggatcgtcgccgacggcgttgatcagatcggtgtcctgcacaagcaggccgccatcgatctggcggatggcctcgtggcccttcggcggctcggccaccttgaggatgcgcaggttcttcttcttggtctgcagcagttcgagcgcggccggctcatagtcgggggcgacgatgacttcggtgaaaatcgggcgcacgctttcggccatctcaagagtgaccttggagttgcaggcgatcacaccgccgtaggcgctcatcgggtcgcaggcgtgagccttcttgtgggcctcggccgcggtcgcgccgatggccagaccgcacggattgttgtgcttgactacggccacggcaatggcgggagccatatcccatacggtgcgccaggcggcgtccgcgtccacgtagttgttgtagctcatcggcttgccgccgagctgctcggcgtgggcgaaaccggtctggttgagcgggtcaatgtagagggcggcctgctggtgggagttctcgccgtagcgaagggtgtgggcgcggtcccaggtacgggtgaatcgtgccgggaacttggcggaatcgacttcggcgccctgatcgtccttgtccacctcgacggcgtccagagaggccggcttcggccagtgcttggcggtccattcgttgatggtggcgtcataggcggcggtgtgggcgaatgccttggcggcaagccacttgcgctcgtcgagggagaagccggtgccgtcggccacacgctcggcgaccaaggcgtaatcggccggatcggtgacgatggccacggtggcgtggttcttggccgcgccacgcaccatggaggggccgccgatgtcgatcttctcgatggtgtcggcctcgttggcgccggagcgaacggtgtcggcgaacgggtacaggttgacgaccaccagatcgaacggcttgatgccgaagccgtcaagctgcttggcatgttcggggttggtcatatcagccagaatgccggcgtgaatgtacggatgcagcgtcttgacgcggccgtcgaggcattcggggaatccggtgacatcggacacctcggttaccttgacgcccagctcggcgagcttcctggcggtcgaaccggtggaaacgacttcggtgccggccttcacgaacgcttccgcgagtacttcgatgccttccttatgaaagaccgagaccagtgcccgacggatcggtcggttcgtgtttgtcatcctgttcctccttggattcttgtggttgtgacgccagggaccgcgcctgacggacgatgacggtcttcggggtcgcggcggtggtgcgggaatcattgatcctcccaaccaaccagcctatcgaaaaaacgagcactgtgccaatcagcgcgagcagccatgccgcggtaaatcccaatgcggtcgaatgaccgacgactctggtggaagccatgacgtcgacgccaatgtgagcgagacgatgatcgccaagcgatccattggacagagcgaacagcaatgtggatgccagtgagatcagcatcgcgctcaggcagaatgacccggcggagtagatcagcgaaaccagtactgggccgcgggtggacgcattccgtatattcaacggtctgcaggcgaatccttgcggtaggaatacagccagcaggcccacgagcgcagcgatggcgagaggcgcgttcaaggcaacggtacgccatagttcgctgctgaccggttcgggcagaataccgaatgccggtattgcaggaagctctttggattggccgagccataacgtgaaactggccaaatcaccgatggcgaatccgccgccgaagagccaggaaacagcccagagcatgacgttgggtagccagatcagcatggcgacggtggtgagaattcgtgaaccggtttccatcccggacaattcgaacaacgatacgacagcggcatggttgcgtaccgaccatacgatgacggtaatcaatccaattgccaggtatatgcccagtatcgcgacggccaagacgacgccgattttcaggcagtggcgtatgtccgccggcacctgcttgcgagtccagtccctgaatgctcgcatcttggctgattccggtacggctgcgcataggaaaccgatcgagaatacgatggctgctttcagcaacaccagccactggtcatcgacaagacctaggtgtacggattgccggaatgcctcgttcaacccgagccaaacaatcaatccggcaacatacgcatgcggcccgtatgctttgattcgcatggtgagtgcattgatcagccatatcagcagtatggtcaacatcaatggcgtgatggtgagggtgaacgaatcggttctagagcccgatccctcactcagaagcacaacggcctgtgtcagcgaggttgtgccgacggtgagattgtcgccaccctcttccatggagacaaccaataacatcagcgctgtatagcaacctaatgcaacggcatagatggccatggacgcgagggcgactatggctccccgcacccattggcgaatcacggctttcatcacgattggttggaaccgatcagtcgatgttggccttggcgagtatgtcgcgcatgatttcagcggcctggcccggggtcttgcccacggggatacccgccgcttcgagcgcgttcttcttgtcctgggcggtgcccttgcctccggagacgatggcgccggcgtggcccatctgcttgccttcgggggcggtgaaaccggcgatgtaggcgacaaccggcttggtcatgtgctccttggcccatgcggcggcgtcctgttcggcgaagccgccgatctcgccgatcatcatgacagccttggtgtcggggtcggcttcgaatgcctgcagggcttccagcagcgtcgtgccgacgatcggatcgccgccggcgccgagacatgcggtgaagccgatatcggacagttcgcccatgagctggtaggtgagggtgccggatttggagaccagtccgagcgggccgcggccgacgatgccgtcggggatgatgcccaagttgacgccagggttgccgagcgtgatgaaaccggggcagttcggtccgatgatgcgcacgcccttcttgagcgccagctcgacgaagtatgcggaatcggccaccggaatgccttcagtgatgaccacgatgagttcgatgccggcttcgacggcttcgaccacggcggacttggcgaacttcggcggcacgaacaccacgctggccttggcgccggtggcttcacgtgcttcgccgcaggtggcgaacacggggatgtccacgtcggcaccgttcttggcaccggggaaggtgacggatgtgccggccttgcgcgggttcacgccgccgacgatattggtgccggccttgagcatgcgagccgtgtgggtcatgccctgatggccggtcatgccctggacgataacgggagcgccgtcttcgatgaacagcatcagcgaacctccttggactgggtcgcctcaccggcgagctgcgcggccttggctgccgcgccttccatggtttcggacacatggatattcggattgttggcggaagcgaggatatgcagaccctcggcggcggcgttgccatcgaaacgcacgacgatcggcttggaaccgccgagcttggcgaccgcttcgaggatgccgttggcgacttccacgcaggaggtgatgccgccatagacattgatgaacacggattcgacctgagggtcggacagtacgatctccaggctttcggccatgacggctgcggaggcgccgccgccgatgtccaggaagttggcgggcttgatgttggtgccctgttcctcgccagcgccggagacggcatccagggaactcatgacgagtcctgcgccgttgccgatcacaccgacctcgccgtgcaggtgcacgtagtgcaggccgtgttcgcgggcgcgctgttcgaaggggtcgggaacgatgagatccacgaaacgcgcccagccatcatggcggaaggaggcgttgtcatccaaggagatcttggcgtccaaggcgctcagctgcttggtggattcgtcatccgggtcgccgatcttggcgagcggattgatttccacgagcgtggcatcgttgtctttgaagcagcgccacatcttgagcagaatctgtgcggcctgatcgacgtccgcgtggtagaagccgatgctctgtgccatttcggtggcagcggccaggtcgaagtcgccgagcgcatcgatgtgcaggcgcttgacggcctccggatgttccttggcgatttcctcgacttcggtgccgccgttggcggtggccagcacgtcgaagtcgcgcgaggtgcggtccacggagatggacacgtaatattcgtgcaggatgttcttggcttcggccacaagcacgccggaaaccttgtgcccgtggatggtcatcggcaggatggactcggattcaagaatcgcctcgtcgcggttatgggcgatcttgacgccgccggcctgaccacgatgaccgatcttgacctgcgccttgattacgcagggatagccgattttgtccgccgcttcggcgacttcatgggagttctgggcaaagatggcgtccggggtgggaatgtcctgttcctcgagcagctgacgcgcctggtattcgtaaagatccatcgatccttccctgactatgtaattggtccggcatataactgtacacagtacatgccggaccttgaaaactaactgtacgttgggtgagacggaatctcaggccggcatcgcgatcagcgagctgctgggcttgccgccgagcttatccagaccgtcgagaccatcgagccgcatcacaaaactgaagcccaccacagtgccgcccgccttttcgataaggtcggcgccggctttggcggtgccgcctgtggcgatgagatcatcgacaatgagcactcgctcccccgcctgtacggcgtcggtttcgatttcgacgctggccgtgccgtattcgaggtcataggattcaccgatggtttcgggcggcaatttaccggccttgcgcacggcgatgaaacccttgcccagatgggcggccatggccgggccgaacaggaacccgcgcgattcgagaccggcaatggagtcgaattcgctcggggacaccggcagagccgtttcaagcgccttgagcagaatcttcaagcccttggggtcggcgagcactggcatgaaatcacggaagataatgccttccttgggaaaccccggtatggaacgcaccaaggacaccagatattcggcgtcctgttgccctaccttgctcaatgcgtcgatggtgatgtccgactgtgccatagtgctcgccccttttatgcctttgcgatgcgatactcggatggtgctaccgaatcgaacagcttacttcgtcttggtttcgttgtcgtcaccggtctcgtcagcggtgtcttcctcggacactacggacgcctcgatcggaacctgaccagcctcatcgttagccggagcctcggtgtcttcgtcgggcagcgggttgccgttctcgtcgacctcatcatcggacacataggccgggcgggtgtactcacgggcgatggcgttgaagccgaaacgcagcttggagccttcggagtcgatgacgatctcctcatactgctcgtcgacttcgacgaccttgccgatcacctggccgatggtgatgacctcggtgccgggctgcaggttgcgacggaagtcctgcttctcctgctgttgctgcttggccttcttggactgccaccacatcatgccgccgaacacgacgacgatcacgatgagcataatgtactgttgttccacgaaacaactccttcaaacgagcgacattgacgaaacgccgccaagtgtgcaaacaggagaaagtctagaagagcttgctgacatcatctttgggcgtaattcccaaatgctgccatgccttctcggtagccacgcggcctttgggcgtgcgaatcataaaaccttcgcgcacaagatacggctcgcacacggtttccacggtttccgattcctcgcccaccatggccgccagattgttcaggcccacgggtccaccgttgaagttgcgcacgatggcattgagcacggcgatgtccagccggtcgaggccttcggagtcgatctggtacagggccagcgcctccttgacgtcgtccggccgcaccacgatcaggtcgtggacgatggcccagtcgcgtacacggcgtagcaatcggttggcgatacgcggcgtgccgcgcgaacgcaacgcaagctcatgagcggaacccgcatcaaggtttacgcccagtacgttggccgaacgttcgatgagcttttccaactcctcatgcggatagaagtcgagatgtgcggtgaagccaaagcgtgcgcgcaacgggcttggcagcataccttcgcgcgtggtggcaccgatgacggtgaatcgcggcagggtcagcgggatggagcttgcgcccgggcctttgccgaccatcacatcgacgcggaagtcctccatcgcgatatacagcagctcttcggcggcgcgcggcagacgatggatctcgtcgatgaacagcacttcgccgacgtcgagggagctcagaatcgaagcaagatcaccggcatgttgaaccgcagggccggaagtcacgcgaatcggcacttcaagctcattggcaacgatcatggccaacgtggttttgcccaagccaggagggccggcaagcagaatatggtccggtggcacatcgcgtttgcgggccgcgtccaggaacagttgcagctgggccttgagccgtggctgtccgataaagccttcgagaacatgggggcgcagctcctcgtcgctgaccggctcgttgccgatcggctgggaggagaccatgcgcaacgactcttcgttggcaccggtgtttgaggtaccgtaatccgttgtctcgctcatcagcggcccctatccatcagcgccaaagccagacgtagcacacgcggcacatcgtcggtggcaagcggcgtgggaatatcgttttcggcgcaagcctcggcaacggcctgctgggcgtcctgctgacgccagccaagtgaaatcagtccttcgacaacctgttccgtaccggtatccaccggagacttggatattgccgcctgagcggaagcaccctcgatctgactcaaatcaatagagcccttaagctcgaggatgattttctgtgcacccttcttgcccagccccggagccttggccagcgcggtggcgtcgttgtcggcgatggcgtgggccagctgactcggcgtcagtgtggagagtaacgattgggccactttaggtccaatgccggagaccttgatgagttgcagaaaggttttcttggcgtcccgatccaggaatccatgcagggtaatggcatcctgagagaggttcatataggtgaagacgcgggtgtcttgcccggcgtgcagacggctcaggtcggtggcggacatgcgcacttcgtagcccactcccccaacatcaatcaatgcggtatcggtttcgaccgattcaacccgcccggtcagcatgccgatcatacaggtactccttcagggctccaggattcaagactcgaacaactgttcgaaagtatactacatgcctcggtcgtggttgatgcggcggcgcgtggatttctgtgcggcctcagcccactggcgttgcgcggcggtcagatgttgttcgcgttcgccgccctgcaatgcgcctgccgggcgcagcgcatggcaaatggccaaagccaaggcatcggcggcatcggcgggagtcggcattttggtgaggttcaaaatacgtgtcaccatacgctccacctgaatcttctgcgcctgcccgttaccggtgatagccagcttggcttcggtaggcgtatgcaacgccacgggaatattgcgttgcgcggcggcgagcatggcgaggccggcggcctgtgcggtaccgagtacggtgttgcggttggattgtgcgaacactcgttcgatggatacggcatcgggtgcgaagcgatccattttctcggacaggccgttgtagatggccagtagacgcagatcctgggtgatatccggtgaggaccgcaccacgtccacgtgaataaacgaaagccggcggtgctcgccggcttcgatcacgccgaccccgcaacgtgtgagcccggggtcgacgccaaggataatcacgaggattactcctcgtcgagctgggccatcacctcgtcggaagcggtccagttggagtagatgttctgcacatcgtcgaggtcatcgaggttgtcgatgagcttggacaccttgcgggcatcgtcgaggctcaactccacctcgttcttcggctgcatgacctggtcggcggaatcgtagtcgaagccggcgtcctgcagagccttgcgcacggtgaacaggtcggacggaccggtcacaacggtgaacacctcaccgtcatcggtaacgtcctcggcaccggcttcggcggcggtttcgaacagcttgtcgaagtccacgccctcggacggcaccacgatctggcccttgcgctcgaagttgaaggacacggagccggaggtggccagggagccgttgcccttggtcagggtggaacggacttcggcggccgcacggttgcggttgtcggtaaggcattcgatgatgaggccaacgccggcaggagcatagccctcgtagacgatgtcttcgtagttggcggcgccgtcttcagcaccggcaccacgcttgacggcacgagcgatgttgtcggccggcatggaggccttcttggccttgtagatggcatcgtacagggacgggttgccgtccgggtcgccaccgccgaggcgggcggcgatttcgatgttcttgatgagcttggcgaagagcttgccgcgcttggcgtcgatggcggccttcttgtgcttggtggtcgcccacttggaatgacctgacataatgctcctagca

SEQ ID NO: 1066 - DNA, 22644 bp, Unknown
  R13_10m  MAG No. k141_4346
catcaaggaagccacactgcaggagaaggacgaacagatttacgagccgttcggaacggcccgtattcagtactcgacccctgcagacggccgtgagagcatgaaacgccagctggatcttgcaagggcgctcgccggtgaaacattccagatgggtgatgccaacgttcatgtcgacgcatggtgcagcgagcccgacgacctgttggtctacaggatgtcatcggatgcgccgattgatgtgaacgtcagtgtctccggcactttcctcaagcaatcacgcgcctcgttggaaacggtatccgacggccatcgggccacactcgtcgtcatgggccggatgcctggactcaacatcgggctcctccctcgtccttccgaacatccttgggaagatgagcaggacggaaccggaatggcgtacgccggtgcgttctcccttaccgtcacaggtggcgacatcaacgtggacgacaacagtctgcaatgttcgcacatcaccggattatcgctccgcttccgcagtatgagcggattcaagggaagcgaccagcagccggaacgaagcatgacggttatcgccgaccatctggagaaaaccatcgacgagtggtcgaccgacctgcagaccatgctcgaccgccatatcgcggactaccgcagatatttcgacagggtggccatccatctcggttcagcccatgatgacgatacggaactaccgttctcggcgatccttcgctcggatgagaacaaagaaccgcatcgtctggagatgctggcggaggcgatgttcgatttcggccgatatctgcttatctcctcatccaggccacacacccaacctgcgaatctgcaggggatttggaaccataaggatttcccgaactggtacagcgcctacacgacgaacatcaacgtcgagatgaattattggatgaccggcccctgcgcgctcaaggagctcatcgagccgctcgtctccatgaatgaggagctgctggcaccggggcacgatgccgctgacaagattctcggctgccgaggatcggctgtcttccataatgtcgatctctggcgtagggcccttcctgcaaacggcgatccgatgtggtcgttctggccgttcggccaggcatggatgtgccggaacctgttcgatgaatatctgttcaaccaggatgcatcgtacctgtcccgcatctggccaatcatgcgggacaacgcgcgattctgcatggatttcctatcggagacaaagcatgggctggccccgtcccctgcaacatcaccggagaactgtttcctggtgaatggagaaccggtatccgttgcgcaaagcagtgagaatgccacggccatcgtgcgtaatctgcttgatgatttgattcaggcttctcacgatttggaaaaccttgacgaagaggacagcgctctggtccgtgaagcggaatccgtccgttcccaactggctgaaacgcgattgggagctgatggaagagtcctcgaatggaacgacgaattcatcgaatccgatccacagcaccgccatctgtcccacctttacgaactgcatcctggtgcaggcatcacgtctaagactccgcgtctggaggaagccgcgagaaaatccctcgaagtgcgtggcgatgatggttccggttggagcatcgtatggcgcatgatcatgtgggctcgtctgcgtgatgcggaacacgccaaacgaatcataggcatgttcctacggccggtggatgcgaacgctgaaaccaatctgctgggcggaggagtgtacgacagcggattatgcgcccacccgccgttccagatcgacgggaaccttggattcccggcggccttgtcggagatgcttgtccaaagccacgatggctggattcgcgttcttccggccctgccggaggattggcatgagggaagcttccatgcgctccgcgcaagaggtggaatccaagtggatgcgacatggacggatcagacagtggaatatacgttgcgctgttcgaagcctacggagattacgctgaacgttctggggactgatatgggacgtgtcgcattgtctccggataagccattcaagggaaccatccggcgttaacgtattgcgttatatccgttactaaatgttgcggaccgtctttcctaatagaggaggacggtccgcaatctttttttgatgggaaaggagattccgccattttccacgattggtatgcgcagatgaacctgtacagtgaaagctatgcgtgtaatttctggacgattcaagggtgtggcgcttgctacgccgaaaacgggtacccggcctaccacggatcgcaccaaagaggcgattttctcgcacctcgactcatggggagtgctggatgacgcccgtgtactggacctgttcgccggtactggtgcgttgggcatcgaagcgctgagccgtggcgcgcgagaactcgtggccgtggaaagttcccggcctgcggcggcgctgattaccaagaccttgtcgcagttacagaagaatcgttcgtgggatgcctcgctcaaggcccgtgtgttcaccaaaaaggccgagcaagtggctggcggctttggtgaatcctttgacgtgatattcattgatccgccctacgcctatgagaccgctgaatgcaatcagttgttggccaatctggcggtgggcagcgccaccaacgagaacaccgtgattatgctcgaacgctcggtacgctccgacacccccaccgcccccgaaggctggcaaatcactgaaagccgcaactacggcgaaaccgccgtcttctacatcgagcccgcggatgacgactcggatatagagcgttccgacgattccgccgcgtagtgaatctcccaccgtgtggtgaattaatcggcgagccggcgcggatgggtggcggagacctcccagcccaaggccatcagggtcttgcggtcggccttatccagcgccttgcaatccagtgccgcgataaggtctggccggatctcggcggtgcgggccagcgcttcgtcgcggcgaaaacggtccaccctgccgtggtcgccggacaacagcacgtccggcaccgcaataccacgccacacggccggcttggtgtactggcgatgttcaagcagtgcgtcctcgccagtgtaggattcctcgacaatcgaatctgggttgcccatgaatccgggcatcaggcgggtgatggcctcaagcatcaccgacaccgccacttcgccaccgttcagcacatagtcgccgatcgaatattcgcgtacgtcgacgccctgggagcggtagtagtccgggatgcgcgcatcgtagccctcataccggccgcagccgaacagcagatggtcggcatggctgagctcggtggcgtcgcgttgggtaaacaacggggccgatgggttcgggaagatgagcaccggtgtgccggatagggcggaggattcagacggccgcgagaatcccagcagttcgtccaggcattcgctccacacctcgggcttcatcaccatgccggccccgccgccgactggcgtatcatccaccgaatgatgcacatcgtgggtccagtcgcgcaggttgtgcgctttgatctccaacaatcccttggcctgggctttgcccatcaggctgaggttcatcacctcaaagtattcggggaacacgctcacgatatcgatcttcatgttatccagcctaacggtagccccgcccgcattacacggccaccactacactattgcggtgatgaatacgacgatgaacctccccacccgcaaaaagcccgaagtgttgtccccggccggcaacctgaggggcctgaaaaccgcggtcgattatggtgccgacgccgtctactgcggcggcaaagccttcggcatgcgatcggcccccaaaaacctaagccttgaggactttgaggaaggctcgcgctacgcccatgaacgcggcgcccgcgtgtacgtgacctgcaacgtgctgccgcgcaacaacgagatcgaagccatgcgcgagtacgtcggccagctcaaggacaccggcgtggacgcgctgatcgtctctgacatcggcgtgatgatgatggcccgccaagtggctccgaacctggaattgcatgtctccacgcaggccggcgtcaccaattaccaagctgcgaacgccttctatgagcttggcgctcgccgtgtggtgttggcccgcgagatggacttgcaggccgtgcgtgatattcgcgccaacattcccggtgacctcgacatcgaatgcttcgtgcatggcgcgatgtgcatggcgttctccggccgatgcctgttctccaactatctgaccgggcgtgatggcaatcatggcgaatgcgcgcagccatgccgctggaagtattcgatcgtggaagagaagcgccccggccagtacttcccgatcgagcagaccgagaacggcgcctatctgttcaattcgcaggacatgaatatgctggggcacttggatgatttgattgactccggtgccaccagcctcaaaatcgaaggccgcgcgaaaagcgcctactatatcgccgccatgaccaacgcctacaaaaccgcggttaatgaatacatgattcaacgcggttttgaagacgctgatggcaatgttctgaagcctttccgtgaccgtgtgattcgcccgggcgaccccgattttggccaaggaaccgaagatcaagtgatgagcaatgccgatgccgcgttcgccggtgtggccgatgagggatatgaccgtggctctgatactgcggttgccgattcggtcaccggctcggttgccgcagaacgtgaccgcgtgacggttgctgatgccgccgactcaactgcctctggtacgtcggccggcaccgccgtcgaacccgacggcatgagctcccacgcccgctccacgcgccgcaagtccaacaccgcggtcgaacagatcgagaccgattggaagcatgcggccgttcgcccggccccgcacgtcgaactgcccgaatggctgctcgaggaaaccgacaaggtggcccaccgcgactactccaccggcttctattacccggagcacaaggtcacacagaacaccgaccgctccgcctacttccgctcatggctggtagtgggcgaagtgctgagctggagcgcggacgaaggcggacgtgtcacgctgatgagccgtaacaagatcgagcccggtcaacaggttgaattcctgctgcctagcgagagaccattggtctttaccgtgccggaaaccggcctgcgcgatgccgatggcgcgccagtacccgccatcaataatccggcgcacgtgttctcgatgccctgcccgcaccaggtgcccatcaacgccgccatccgctcgcgcaccaaaaagcccaccctcaaagccgaataacctaccactccgcccccgctgactgggggtggtcatgggaatcatgaacaccgcccgcacccaagaaagaatgccttatgcctgaatacagcgaagaaatcctcgattccaacagcatcagctctaccgataaagccggtcgccctattccggtgaccatccccatcgcactggcccccggcatcaaggtggtgtacaccacgcgactgggcggcctgagcgccggcgattacggcaacctgaacctcggcggcaagtccggcgacgaacctgaggccgtgctgtcgaaccgcatcgcactcgccgaagcggtgcaagcccgcctatcgctggtctcccaagtacattccggcgtggctgtggacgtggacgactcgttcgtcatcaacacccccttcggcttcgacgtgtccggcacacatggtgagactgacactccgcacgtcatcgaggcggacggccaggtcaccgcacaatccggcatcgccctaggcatgttcgcggccgactgcctgccggtgctgctgggcgacccggtcaccggcatcatcggtgcggcccactgcggccgtcgtggtctggagcgtggtgtgatcggcgccacggtagacctgatgaagagcaagggtgccgacccggcgaacatcgtcgccacactcggcccgcgcatctgcggcgactgctatgaagtgggcgacgagatcgccgatcagttcatcaagcgcttcccgctgaccaagacgaagacccgcttcggtggtgccggcattgacatcgccgaggcggcaatgatcgacctcgctttcgccggcgtacaccaggtggtcgattcgatgccgcgcgtgcacgccgccacccagtaccttgaggaagacccggaactcgccgaactgtgccgtacggacggcgaaggcccggccgagctcgcggagcgcatcgacaacatcagccacagcatgtgcacgctcgaaaacccactgtggtactcgcaccgccgcgccgcgctcgccaacaaaacacacgaaggccgcctccttgccctcatcgtgcgtgactaaacggagaatgcgggcacattccgtggagaagatgtgatgcagttcacggacggccagccctcaccctacggtggtgcctatgactgagagagatttcgatacccccgtcgagacgcctaccgtccagccggcccccgctcagggcgccaaaccggcacaaaccgtgccggtggtggccgtggtgctggccgccggcttcggtacgcgcttcgaccccgacaatcccaagcagcttgtctccgtgggcggcaagcccatcgtgtgctggagcattgatgcctttgaacattgcgatcgcgtcagcgacatcgtggtggtggtcaatcccaaggtgcgcggcgaagtggaaacgttggttggcgagatgggctacaccaaggtccgcgtcatcattgacggcggtgacgaacgtgtggacagtaccgccgccgcgctcgacatgctggctactgctggcattccggacgatgccaagattctgatccatgacgccgtccgtccgttcgtggaacagtccgccatcgacggttcgattgatgcgctcgaccagttcacggccgcgaccgtggcctacacctcaaccgacaccgtgctgttgaccgaggatctgggcgatttgaaagtggtcaagtcggtgccggaccgcccgaacaccttccgcgcgcagaccccgcaatccttccgcttcgcgacgattcgtcacgcttacgatctggctgccgccgacccggacttccatcccaccgacgacacgcgcgttgtggtcgattatctgcctgatgaacccgtcgccattgtctccggtgcggaaaccaacctgaagatcaccacgctggaggatattcccacagctgagcgtatcgccgaggagattctcggtcgtgatcccaaggaagaggcccgcgcccgcatgcacgccctgctggcccaagcggccggccagatgcatcgctagactggcattatgcgtgaactcaatgttgtgatctccggcttcgaccactatgacggcgtggaggtcaatcccgccgtcgaagtgcccaaggccatcgccgagcaggggttgggcgtctcctctgctccggacgatccgttggagcaggtcgccgtcaccgtccatgccgtcagcatcccggtgagcttcgccaaagcctggcccacgctgaaagagacgattgaggccaccaagcccaatatcgtcatcgccaccgggctcaagcacgcagcccgaggcgtgatgcttgaacgatgcgccaccaacctgatggacgcgatcaagccggacgcggacaacgtgaccccacgccgcgaacccatcgaccccaatggcccggccgcctattggacccgcctgccgttgcgctcgatcctgaatgatttcacggacgattcgattccggccaccctgagctcggacgcaggcacgttcgtatgtaattcgctgttctacaacttgctgaactggaccgccacccaggagcgggtgctgggcggattcgtcagcttcccgccggtcgtgccggcggattccagccagcatggtctgccactcgaccagcagatcgccgctggccgtgatgtggtgcgcgaagccgtgcgctactatctcaagccctccagctccggcatcctcatcgcctagcacgctgcgcgccacgccggaatagaacatggttcgcacgcattgtaacgattgcgcgtcactcaacgcccagcgctagtgcgatgcgctacagtgcttcaaggatgtgccaagagctttatgcgtgtgcgaaaggaataaacagcgatggtggatcgtttcccggtggtgctgcgaggatatgacaaggagaaggttgatgctgccttcgacgctactcaggagagtgtgaagcgtgcgcagcagacgttggccagcatgcgtgagcagattgcggcggatgacgaccgtattctgcaactgcaggcccagcttcaggaagagaagaacaagaagccggaaggcaacagcttcgcttccttgggagcgaacgcccagcagatgctcgcctccgccgaacagacgagtaccgaactgctagaacgcgccaagcaggacgcgtcctccatccgtaccacggctcaggcgcaggccgaaacactgatcaacaacgccaagctggatgcccagcatattgttgacgacgccaatgccaaggccgcctcgattctgacgaacgccaacaatcaggccgaatcagtgaccacctccgccaacgaggacgccgcacaactgcgctccgaaaccgccaagaccatcaccgaacagcgtcagaccgtcgagcttgagctcagcaacgcgcgcgaagagcacaccaagaagatggcttccgaacgctccacccaagagcgcgaaatcgccgatatgaaggcggaagctacccagcaggttgccgcaatgcgcaaaagcgccaatgaggagatcaccaagcttaagtccgattccaacgatcagattgaggcggcgctcgccgaggccaacaagaagctcgccgacgtgcgcgagcaagtgtccaagatgatgaccgaagcccagcgcaaggccagcgaaatcattgatgcggccaagaccaagggtcaggaaatcactgatgaggccgaggtcaagcgcaccagcacgatgagccaggtcaacgccgaagtcgagcagatccgtcacgacatcgccgctcagcaggatgaggccacgaagaaggtcaacgaactcctgcagcacctcgaagagcgtcgtgtggcggccaagcgggaagccgatgagttggtcggccaggccaagaacactcgcgaccaagccgattcatatgccgcgtccaagcgcgaggaggcggacatccaggccgccgcaatcgtgcataaggcgggcgaggaagccgatgcgcagatcgaggagcgtcgtgccgccgcccaaagcgagcttgacggtctgtccaagcgcatcgccgatctgcaggaacgcgagtccgtcatcacccagcgtgtttcggaactgcgttctatgttctcgcaggcgttctccggattcgctttcggtggtaatgcggcggcctctggtcagagtcaggaagccgctgccgtggcgtcattgccggtggtcgcgcccgtcccggaagtcaagcctgtacacaacgaggccgatgatcagccgggtgagttgagcggaaacgagtcggctgccgacgatcacaatgagacagatgcggcaccggctgattcggctgattcagctgcgcagaatgagcagtccgaatcgtctgagccgtccgagcaccagacacagggcgaaccggaggccccgactcaggagaatccagccgtatctgagcagaacggcgaatgacaggccttcgattagactactagcggtaagaattacggcacctgcgctttcgagccaggtgccgtattcgtttggatctgcgccacaagcgcaccatcacagaaggagtatgacatgagtgaattgacgcctctgaccggcgaagcattgaataccctgcgcggcgatttcgcacagagcggcaccaaccgtctggccatgaacgcggtgaccgccgccggcatcgacaaggtggctcgcaattatgaccgcgctcgtctgatgcagcgccgtttctccaccatcgttgacaatggcgaagccacccatcaggatcgctccggccgctgctggctgttcagctccctgaacgtggcccgtttcgtggccaagaagaacatgaacttgaaggagttcgagttctcccagaactacgcgatgtactacgacaagctggagcgcgtcaactacttccttaaggatgtggccgctctggtggctgccggagagccttccgactcccgcctgatgcagcacctgctcgccgacgtgatgggcgatggcggccagtggaccatggccatgaacgtgtacaagaagtacggcgctgtgcccaaggacctgttcccggagaccgaatcctccaagaacaccggtgaaatgaacacccagctgcgccacatgctgcacaccgccgtggcgcacatgtacgccgctgacggcgatgcctccaaggtcgaggcgattattgccgacgccactgctgccggccaccgtattctgaccatccacctgggcgagccgccggtctccttcgactgggaatggaccgacaaggatggcgaattccaccgcgacggcgagattacgccggttgagttctggaagaagtacgtgggtccggctggtcttgaggactacgtgtgcctggtggatgatccgcgcaccgagcacgccaagggcaagaagatcggcatcgagcacctcggcaatgtggctggcggcgacgccaccgagtacctcaacgtgccaaaccagttcatgaaggactgtgtcaagcagattctcgttgagcagggcatcccggtatggttcggtgccgactgccacccgttcatggaccgtgagaacggcgcttgggccaccgacctgttcgagtacggccgcgtgtacgacgtggacttcgatttggacaaggaagcccgcgtgcgcttcggtgactccgccatgaaccacgccatggctttcgccggcgttgacgtggccgacgacggcaccacccgccgctggcgagtggagaactcttggggcaccaagatcgccgacaagggctacttcaccatgtccgacgactggttcaccgaatacgtctacgaggtagccgtcccgaaggccctgttgccggaggaataccagaaggccctcgaagagccagccaccatgctccccgcatgggacccgatgggcgccttggcctgacttcgccagcctcccggaatcggcctgacggccgatgctgtgttttttcgcagcctgccggctgctagggtctctccctctgtcagcgcgaagccgctgacggggggagaggccgcggtcgcaggccgcacaacaacacagcatcgccgcaggcgagtccacgcaggcgagttcacccaaagtccataaccgccggcccaacaagcagtccccgtaacagactgctatagttgggcttttgcgtctatagcgccataccgacggtacgtatacaaggaaaggagtcgagcaatggcagcactacgtggtccggatagttccgaggatgaacgtcgtttgggggagcaggccgtctttcccgagaccgtcgatgtcaacattcgtcagcttgaccccattcccgcgccgcgtgccttcctcagggagcagccgctcaccgatgagatgagcgagctcgtgctccactcgcggcaggaaatccgcgatgtgctcaacggccgcgacgaccgactgctcgtcatcgtgggcccctgctcaatccacgacccgaaggccgcgcacgagtacgcagaaaagctggctgccgtcaagcgcgagctggaagaccgactcgtgatcgtgatgcgcgtgtacttcgagaagccacgcaccaccatcggctggaaaggcctcatcaacgaccccgatctggacggtcgcttcaatattcgtaagggcatgtggctggcccgcaaggtgctcaccgacgtgctgagcctcggcctgcccgccgccaccgaatggcttgaccccatcaccccgcagtacatctgcgacgcgatcagctggggtgccatcggcgcgcgtaacaccgaatcccaagtccaccgcgaactggccagcggcctgtccatgccggtgggcttcaagaactccaccgacggctccatcaaggccgccgccgattcctgcttcgcggccggcttcgagcatcacttcctgtccattaacttggacggtcgcgtgatttccgccgaaaccaaaggcaacccggattgccatctggttctgcgcggttccagccacggcccgaactacgatgccgaatccgtgcgtcaagctctggaagacctcaaggtttccaaagcgtccggcccgagccagcatggcctcgtcatcgatgccgcccacggcaactgcggcaaagacgaaaaccgcgaagccgaagtcatcgaagagatcgctgagcgtctggcgcacggcgaacaaggcatcaccggcgtaatgatggaaagcttcttggtcggcggtcaccaaaagccggccccgctcgaccagttggtctacggtcagtccgtcaccgactcttgcgtgccgtgggaacgcaccaacgagctgctgcacaccctagccgacgccgtcaccgctcgcagctcggctaaatagctttgtctttgtaaaaatgctcactgagacccactcagtgagcattttttgccaataacggtggtcatgtcagtttgttcccgtgacaccttatccttgggaaagatactgacccaaggagagatgttatgcagcagcaggaggaagcagcacattcgctgcatccgttgcaagtcggtccgcagccgttgaacaccccggaagagcttcgcgccattcgtcaggcgatgggggaggggaagaacccgctcgttgccactgatgtgccgcgctgggaagatcaggtgggtgtcagtcgcatcatcaaccgccgcgtattggagctggagccgctgcccacgcccgcgcaagtgctcgctgaactcccgctgaccgatcaggctcaggaaatcgtcgcctactcgcgtgatgagattcgcgcgtgcctgtacggccaagacgacaggttgttggtcatcgtcggcccctgttcggttcatgacccgaaggccgcgctggactacgcgcaccgattggccaagctgaaggacgagctcggtgagcagctgctcatcgtcatgcgcgtgtacttcgagaagccgcgcaccactatcggctggaagggcctgatcaacgacccggatattgatggcagccacaatattcgcaaaggcctgttgcttgcccgcaaaaccttgcttggtgtgctgaaggaaggattggcggccgccacggaatttctggagcccaccagcccgcagttcatctcggacgcggtgagttggggcgccattggtgcgcgcaacacggaaagccagatccaccgccaattggccagcgggctttccatgccggtcggcttcaagaacgccactgacggctcggtgaaggcagcggtcaacggttgcttcgccgctgctcagcagcacacgttcttcggcattgaccatctggggcgtgcctgcgcggtcgagacccttggcaacccggactgccatgtggtgttgcgcggctcgattcacggcccgaactacgatgccgaatccgtggccaaagccatggaagacgtacgcgccgaaatgcccgccgaatccgcagcctcgcgtggtctgattgttgattgctcgcacggtaactccggcaaggacgagcatcgtcaggccgaagtcgtgcgcaatattgccagcagaattgcagctggcgaacagggtattaccggcatcatgatggaaagctttattgaagggggcaatcagaaggccgcgccgcttgatcagctggtctatggcaagtcgattaccgacaagtgcatcagctgggaagaaaccgaggccttgctgcgcgagcttgcggaagccgtggccacgcggcgttggcactgagttgcgtcatcggctctctcggggggagcaatgcaacgaaacgtctctacccctcagcccgccattcggcggccacctcccctgacatgggagtcgaaagcgttgtgaaaggaacttacatatgggtatgaaaactgtagctattattggcgcattggatgaggaagtggcgctgatcgccaaatcgctcacgcatgtgacgcacaccgccaagggcagccttgacatcgtgtccggcacggtcgactccttcggttctgacgtcatcaaggttgccgcaacggtaggcggcatgggactggtcaatgcggccgccaccacgcagctgctgattgacgagttcgccccggacgtcgtgattttcagcggcatcgccggcaacctcaacacccacctgcacatcaacgacgtggtgctcggcggcaccctgcgctacctcgacactgacatgcggctcgtaggccagtggaagcccggcactgcggacgctccggtggaggaattccactctgatgaccgtctgctggaagttgccgacgaggcgcttgccaatgcgggcattacccacatcaccggcatcatcgcctctggcaactacttcgtggacacgccccaaaaggtcgaggaggtcatccgactcaccggggctgacgccgtggagatggaaggcgccgccgtggcacaggtcgccgcccgcaatgacgtgccggcactggtgattcgtgccctttccgacaacgccgacaccgattacgaggtattcaaggagttcgacatctccgagtacgccgataccgccgcccgtctggctgtcgacatcgtcaagcgcctgtagtcggcgggctggcccatctcaccatccacgttttgggtatgatgaccacaatatgagcgttttcaaactattgcttataacctgagccatactcggtgttcggcacagcgatgtgcggggttcatcgctggggccacaagccgtaccagttcttctcccgcatgccggtcgctgtgctcaattcgttaagcgacgacaacaccgtcgcgaagcattgaatacacaatgcgcacgctgcactggggtttatctgcagcatgaggagagaaaaaatgactgcaagcgcaaccgcggctgtgaccaaaccggtgaagaaggattcggttcctgagatcatcgccgcttccatggtcggtacggccatcgaattctacgataactactgctattccattgccgctgctagctacttcggcatgatcttcttcacggacgtcgccaagtccaaccagaccctcgccacgctgatggccttcgtgaccttcgccgtttcgttcctcgcccgtccgttcggctccatgctgttcggccacttcggtgacaagctcggccgtaagaagacgctggttatcgccctgatgaccatgggtatcgccaccttcctggtcggctgcctgcccggttatgagcagattggcgcatggtccgtcgtgattctgtgcatctgccgtgcctgccagggcgtgggcctcgccggcgaatggtccggtgccgcgctggtcgccactgaaaacgctccggccgacaagcgcgccctgtacggttccttcccgaaccttggcgccccgattggcttcttctgcgcttacggcctgaacctgctactcgaatccaacctgagcaaggaacagatgattgccttcggctggcgtatcccgttcctgtgctccgccgtgctggtgatcattggcctgtacgtgcgtgcccgcatgtctgagaccccagtgttccagaaggccactgaagagaagcgcacctccaagcacccgctgcgcgacctgctgccgtactggaaggaagtcgtgctcggcaccgtagccatgggtatcacctataccctgttctacgtacttggcacttggtcgctggcctacggcgtcaagggcttgggcttccagcagggcgagtacctgctcatgcagatgtgctccgtggtgttcttcgccatcttcatcgtggtctcctgcgtgtacgccgacaaggtgggccgcaagaaggtcatgattgccgtgaccgccgccgccttggtgttcagcttcttcgtgccgatgctgctcgtgcactccgccgcccatatcatgatcttcctgtgcgtcggcttcatgatcatgggtggtttgttcggcccctgcggcgcctacctgcctgagctgttcccggtgcacgtgcgttactccggcgccggcctgagctacaacctcgccgccatcttcggtggcgcattcgctccgaccatcgcccaggccctggtcgcctccaagttcggcgttgccggtgtgggctggtacatggccatcatggccgccctcgctctgctcgctctgttcctgattaaggaaagcaaggacaaggactacgagctgtaaatagagctccccatattatgctcccgctggcgggagctgtccacgaaagcggactgagggtggccaatgggatttcggttctttgaccaccctcagtctcactgcgttcgacagctcccgccagcgggagcattttgttatgtcgtcccaccaaaaatgaacaatagacgaacttacgtagtttgggcatctcactacgccttgcacgttttactctggaaatcatggatatctggcagatcgtcgtgattgtggtgctcgccgcgctgatactggcgtgggttgccgtcatcgcctacaacaaaggccgcgtttcaggtcggctcgccgccgaacaggacctgtccggcgacgaggatacgcgttctctattcggtgatgatgcgcccgtgcgccccaccgagcgtcgcctgattgaagtcctgcccgaagccctgattgttaccgaccgcaacggcttggtccaatattcaagccccggctcagtgccattcggcctggtctccggcgaccgactcaactcgcgcgaagtcgaggacatcctcactcaggccgccgccgacggtggcgtgcgtgagcgtgaggttcagctgccggccaatcgcaattcctatccgtcctctaatggacgaggactggaggccggccagtcacgcccgtccaacatgctgtatttgcgtgtgcgcattggcgatatcggcgatgacctgtacgccatcttcatcaacgacatgtccgagcagcgccgtttcgaggccgttcgccgtgactttgtgaccaacgtttcgcacgaactcaagactccggccggtgccatctcgctactggccgaaaccgtgaccgacgccgccgatgatccggacgccgtacggtatttttccggccgtatctccaaggaatccgcgcgcctgaccgaactggtacatcatcttatcgacttgcagaaagcccaaagcccgcaaagtgtgattgatgcgcggcgcatttccgcgctggatgtggcacgcgctgccatcgccgccaatcagacccaagccgactcccgccatgtggatattcgactgagtgtcaacggacagtcagtgcccacgaaggtcgaggagctggccgatggcgaaggttccttggaagaatcaggcagccctgccacgagcggtccgatgatcaaggccgacaaagaggccatgcaaaccgccgtcaagaacctcgtagagaacgccatccattactcgcccgaacacaccactgtggcggtcggcgtgggggagcgcgatggcaaagtcaccattcgcgtggtcgatcagggcatcggcatccccgccaaatcactggaccgcattttcgagcggttctaccgggtcgacccggcccgttcgcgcgagaccggcggttcgggactcggcttggccatcaccaagcactgcgtgcaggagaacggcggtcggatttcggtctggtcgcgtacgggggaggggtcgacgttcaccatcgagctgccggccgccccggatgaggatgacgacgaggcccggccggacgagtcgacacaagcgtagggccttggttggtgcccgatatggtgccattccattgccgcacaatcacacagtgggcgaggtgcgcacaccgtgcgtagcacaattacgcaattacgtactttcaggaaacagcaggctaacggagaacaaatggttacgatagtatcggaaaactttgcgcctatgcgcacgggaacatacccaagaaaggctactatggcacgcattcttatcgtcgaagacgaggaatcctatcgcgagccgttggtataccagctcacacgcgaggggtacgacgtgtccgccgccgccactggcgaggaaggtctggaactgttcaccaagggcggcatcgatttggtgctgcttgacttgatgctgccgggcattgacggcactgcactgtgccgtcgcattcgtgagcagagccgtgtgccgattattatgctcaccgccaagagcgccgaaatcgataaggtcgttggccttgagattggtgcggacgattatgtgaccaagccgtactctttccgtgagctgctggcccgcatccgtgccgtgatgcgtcgcaatcaggccacggcccaggcttccggcactgtggatgacgacattccgctggtgtgcggcgatatcgccatgcaggtaggccagcatcaggtcaccgtacgcggcgaaaccgtgttcttcccgctcaaggaattcgaactgctcgaatacctgatgcagaacaagggccgtgtgatgacgcgtcaccagctgatcgaccgcatctggggttcggattatgtgggcgacaccaagacgctcgacgtgcatgtcaagcgcgtgcgctccaagatcgaggaagatccggcgcaccccaagtatctgactaccgtgcgcggtctcggatacaagatcgatactcccgcggagtaaatggaaggcggccttcgggccgccttttttgttgtggattgtgggctcgccgcaggcgagtccactccaaaaactacgtagcctcaacgtagcccacaaacatccaagtgttcatcttctgtttactgatttcggttttgggcccttgaaaccaccaatacgcttgtagttgtcatgaattgaccgggcagcgctgagccgcccgcgaatagttgatagagggattaagtaataatcatgcagaagaacatcctcattcgctccattgccgctctgtccggcattgtgatgctcgcttccgtggccgcctgcggcgataacaccgccaccacgaccgacaacagctcctcctccgattccacttccaagtccaccccggtctccggcaacttctcgggcgccggcgcctcctctcagcaggccgccgttgaagcctggatcgccggcttccagggcaccaaccctgaagccaagatcgcctacaacccgtccggttccggcgctggcgtgcagaccttcctgaccggtgccaccgcttgggccggctccgataaggcccttgccgatgacgaagttgagcagtccaagtccgtgtgcactgaaggcaccgccttcgatgtcccggtctacatctccccgatcgccgtggtcttcaacctcaagggcgtttccgatgccggcaagcacatcaacatggacgctgccaccatcgccaagatcttcgacggcaagatcaccaagtggaacgatccggccatcgccgatcagaacaaggacctgaagctgcccgacaccgccatcaccgtcgtgcaccgctccgataagtccggcaccacccagaacttcgtctcctacttcaaggacgtcacccctgacaactggacctacgacctctccgagaactggccgaacgaggttggccaaggcgccaagggcacttccggcgtgatctccaccgtcaagcaggccgacggcaccatcggctacgctgacttctcccaggtcggcgacctgggcaccgtggccgtcaaggtcggcgacaagtacaacgagatttccgccgaggccggctccaaggtcatcgaggactccaagcaggacgacaccgttaagggcgacaaccgcatcgtcatcaagatcaaccacgccaccgaggccgagggtgcctacccgatcgtcttggtctcctacgacatcgtctgcccggcctacaaggacaccaagcaggctgagttcgccaaggcttggctgacctacgtgacctccgacgagggccagaaggccgctcaggatgccgccggcaccgctccgctgccctcctccctgaagtctaagatcaccaagtccatcgaggccatcaagaccaagtgatgacgtcggcccgcaagggtcgtgtggactggacctgacaactgaacgatagactgtagtagtaagagcagtcgccgccaactttaagccgcagtcgtaaaccatacggctgcggcttaaagcgggtcaggacccgaacggtttggcaaagtcacagacgaaaaccgcaccacttgaatacttgataaccaccctatataaggagaatccgtgagttcgcaagacaaaacggctgtgcagccagttggaggcaagaccgccgacaaggtgtttcgcggtgtggcatacgcctgcggcatcctgatcctggttgtacttgccgctgtgttcctgttcctgtttttccgcgcctggccactcatcggtggcgatcaggccgccaacagcgacaccgtgtccagcttcaccggcggcaaggccagcagcttctggggctacgtgctcccgctgttgttcggtactgtgctcgtgtctttgctggcactgctgattgccttcttcgtgtccatcggcattgcgctgttcatttcgcactatgcacctaagaagctcgccaccgcgctgagctatgtggtcgatctgctggctgccatcccgtccgttatctacggtttgtggggcggcctgattctggtgccggccatctacccgttctggaactgggttgccaaccacttgggcttcattccactgttcgagggcccggccgccaacccgtcgcgcaccgtcgccaccgtggctgtggtgctcgccgttatgattttgccgattatcacctccatgtcccgcgatatcttcatgcagaccccgcgcctgcacgaagaggccgcgctggcgctcggcgccaccaagtgggagatgattcgtctggccgtgctgcctttcggcaagtccggtattgtgtccgcctccatgctggctctcggccgcgcgcttggtgagacgatggccgtgttgatgatcctgtccccgggcctcaactactccatcaagctgctgcaggcctcgcagaaccagaccatcgccgcgaatattgccgcacagtaccctgaagccaacgatctgggcgtctccacgctgattggaaccggtctgattctgttcctgatcacgttcgtggtcaacttcatcgcccgtaagcttaccgagaaagcgactgcgtgatgactgctgctgagaacactgaaaagactccgatggacggcacgcccgaaatcgacttcgatcgtttccgcccgacccgttccgccatccagcgccgtaatatcatggaccgcttcatgtgggccctgatcgcggtggcgtttgtgatcgcctgcatcccgctgatctccctgctgtggaccactatcgtcaacggcatcaagcgcctgaacctgaacttcctgagctacaacatgaccggtgtggtcggtggtagccagaccccgtccggtggttacggcggtgtgctgcacgccatcatcggtactctcgaaatcaccgctggcgctatggttatctccattccgatcggtttgatgtgcgccgtgtacctggtcgaatactcgaaccgcggcaagctcgccaccacgatctccctgctcgtcgacgtgatgagcggcatcccgtccatcgtggccggcctgttcgccttctcgatgttcacgattctgctgggccccggtaccatcaacggtttcgaaggctccgtggctctctccctgctgatgctgcccaccgtggtcaagtccagcgaggaaatgctgaagatcgtgccgaacgatttgcgtgaggcttccttggctctgggcgttaccaagcagcgcacgattaccaagatcgtgctgcgcaccgctctgccgggcatcgtctccggtgccattctggccatcgcccgcgtgattggtgagaccgcaccgttgctgatgaccgccggctacatctccagcaccaacgtgaacctgttctccggccagatgaccaccctgccggtgttcgtctaccaggagtactcgaagctcagcgcgaactgcccgcccaacgccgacgccacctgcgtgaccacgattccgatggaacgtgcgtgggctgcggctctcgtgctgatcgtcatcgtgctgctgctgaacctcattggccgaatcgtggcgaaggtcttcgccgtcaagaccgagcgctaagccagtcgctaagcctaagccttaagaacacaaggaaatataaggaaacatcatgggacaacgtattgacgtcaaccacgagaacatctattacggcgactttctggccgtggaagatgtgaacatcaacatcgagc

SEQ ID NO: 1067 - DNA, 87260 bp, Unknown
  R13_10m  MAG No. k141_4347
cgttccctcgggtcgttggattcggccaggtcggccgcgcacacgccgagaggcatcgatccttcgccggcggggagattgtcggtgacgtggagtcgcacccggacgggtgtcacgccttgcttcagccgacattgacggacgatgtcatccagagcgctggcggtgacgtagccttccaccacgtctgtggcggccagctggaatgagtccgccaatgtgccggtggcggcggagggacggatgagggtttcgaccttggcgaggttggagtccctgcaccagtattcgaccatcattgcgcgccgtcgggtgagacgagtcagattctcggcatccatctgcctcaggtagcctttgagccggtaccgttgctgccggcccagccatggcgcatcgagtccgctgagcatgtatagcgccccgaacgccatgtctggtgaataagggcgcccgtccgccccttgccactgtgattggcggcgtacggaatcctccgtgaccagcgagccgcctcccgcggaaagagattcaagccggccggcagcgcgaagcgcgctgacccgtcgttcgctcactccgagtcggcgggcggcttcccgccgtgtgagcagcgtccgattcgttctgatagccatattcctattgtatacagaactattccggattgggaatagttctgtatacaccgggcaacagggcacctcaatccgtattcgtccatatgtggtcattgcgctgctttgatgaagtcttcggcgagttggttgacgatctggttgcggtgtcgggcgacgatgcgctggtagtgcttgatggcgaccttctcgctgacgtggccgagttcgtccatgacctcccgcaaggtgccgcccttgagcatgagcaaggtcgcgtgactcgccctcagggattggaaggtcaggtcggggcggccggctttctccctggctttgcggaactgggcttccagggtggtctggctcatcaccgaggctcgtctggggcggaagaccatggcttccgggtccgtccattcgcagtgcctgagcagatggtcgtgaatcaggggaacgagcccgtcggggatgggcacggtgcgccggctggagtcggtcttggtcctggcgatgcgtgtcgaaccacgatccgcatagcccctgttgacggaatggcgcacggtcaggcgtttggtcttcaggtcgatgtccttgatctgtaggccgcacagctcgccgcaacggaggcctccgacgagcgtggcgagtatcaccgccagtctcgtgtagtcgggcatgctctccgcgatcagcttgagttccagcggcgtgaccggtggaacgtcctccctggcggatcgtggtgctggcggtatgggcaggatgaacgggttgtcgcggatcaacggtggggagccgtccatgcccatcttcgtggcgctggcgaacgccgccttcagacgcatgcatgagcgacggaacgcccattgcccctcggggtgcggtgcgtcataccagcgtttgatgtccgtcggcgtgatctcggtcaggagcttgcccttgaagcccggcatgaagtgcgcgatgtcgagatacaggttccggcgcgtgccgccggctatcctctcgccgttcggcagccggtatccttccgcccaccgggtcacgtaatcctcgaacgagataaggctcgcgcgcttcctgcggcggcgttctgacggatggacccattcctggatgttcttgcggtccagttccaccagatgccgttcctcttcgagccactggtgcgcctcgtgctccatgtccggcttgaactgccgctggaccttcttgcccgggcgtttcgggtccgggtagcgcacctgccaggcgacgagattgcccgcggtatcgtagcgcggcgtcacggtgccgaacctgctccgccgctccgacgacggccccgtactgtccttcttcgtccttgcggacatgatgatgctccttgctgaatccaggatcgatggcacgcataacggcctcgaaaaaatgccaccaaaaatgccaccaagtggccgaatgggctctcggcgagccattgcacctaaaaatgcacctacggcaccttaggcattgcaatcattggggtttaggatgattcgatcactcgtcacaggtagtttcggccatcagccgcatgaagatgacgctaaggagcaacaccgctcgcgtgtctactggaaggaggcgggaatcgttgctatacctaaaattcagattgataataagtaaatatacatttgaaggatttgccgtttgctcttgaggcaattgcctttcgtatccccctctctgggggtacttctttgaagacctcggtcatagcgaccgaggtcttttcgtattcgcgggaccaggcctgaaagcattcggcccgcttccctgaaggaaacgggccgaatgcttggactcgggtttcaacccggaaggcttcagtccagcgacttcaccacaacgacctcggtgggcacgttgcccgcggtggccttggagtaggggcacagctcctgcgtacgctcgacgagcttggcggcagcctcatcgtcaagatcgggcagaactacctcaatcttgcccttcaggccgaaggactcgccttcaggaccgagcgagatgctggcgcgcacctgactcttggccagcttggtggccgccacgcgctgctccttggcggcaagcgccaacgctccttggaagcaggcgccccagccgatggcgaacagctgctcggggttcgtgccctgacccttgccgcccatggcgaccggcgtgtccaggtcgaactccagttccggctcatggctcacggcgtggccgttgcggccgcccgtaacctgcgccgtagcggtgtagacgatttgcgatggttcgttaccttgatatgtgctcatgctttcatctcagcacgtgttcacgcccgccacaaggactgtcccaccgtagacgatgtgacatcatccacactgtgacttcgcgcacagagtcccgacaccgtcctcacctcgtttatcggcaccatgcgtgtataaccacatatggcattatcggcgaatatcggccggcagaccagttgcacaaggagaacatcatccacatggcagacaccgccaacaccaacgcctggttgccggcgctcaaagcggcgtttccgctgaccataccgatttgcctgggattcctgtttctcggcgcctcatacggcattctcatgggcaccaagggcttctcgtttgtatggccgatgtgcatgagcgcgttcatcttcgccggttcgatggaattcgtcacggtgaatctgctgctctccgcgttcaacccactcgccggctttctgctggccctgatggtcaacgcccgtcacctgttttatggactatccatgctcggcaaattcaaggggctcggctggaagcgtccgtacctgattttcggcatgtgcgacgagacctttgccatcaactccaccgcgaaaatccccgccggtatcgaccgaagctggttctacttctgggtcacgctgtgcaaccagctgtattgggtgaccggcgccacactgggcgggctgattggcgcgcatctgccgttcaataccgacggtcttgatttcgtactgaccgcgctgtttctggtgatcttcctcgatcagtggctcgccggcaagcatcgcgagcgactgtccgccgtcatcggtgtgctgacgtcgctggcctgcctgctgatattcggggccaatgatttcattgattccctcaatgatcgccatgctgatactgttcgtcgcgttgcgcccgcatctggatgtgttgcggccggccgccgacgccccggaagccacggcagaccgtgccatgagccacgcagcggaccagcagaaggaaggacagacgcgatgacgatgaccatctggcaaggcgcgctcaccatcgtgacggtggtgctggggacgatgtgcacccgttttctgccgttcctggtatttcccgaatccaagcagccgccgcgcgtcatcgaatatttcagccgagtcctgccctatgcgatgaccggtctgctggtggtatacgcactgcgcaacaccccgattctgaccggttcacacggccttccggaactcatcgcctgcaccgtcatcgtgctgctgcacgtctggaaacgcagtatgctgctttcaatcgccggcggcacgatcgtatacatgctactggtgcagctggtgttctgaggttgggctcggcttctccttcgttgatctcttcctccggtcgccttcggcgaccacctccctctgtgagggaggtgctgaacgcagcgaagcggaggtagagacccgcggtcgtaagactgcgaaacacacagcatcggccacaggccgattcctacagctgcttcgccacccaatcgacgatgtacggagcgacttcctcaatctggtcgatggcgacctcgaactcgtgcttgccgccgtaccacgggtccaccaaatcaatctgatcttcgcggccgggcttcggcttgggcagattcgggtcgaagctgcggtacatgtgcacttcggcgcgcttgccggacggcagcatgcgcagcagggcgcgcatgtgggaggcggtcatcggcaggaacaggtcggtacggtcgatttcctcacgtgagatgcggtgtgcgaagtggtcacgcggaatctcatcaccatagccacgttcgcgtagcacacgcacggcacgcgggtcgatcgggtggctccactcctcgtcggacacaccactggattccacgttcacctggtcaccaagaccgcgctcattaaagaagtgacgcagaatgatctcgcccataggcgaacggcagatattgccggtgcagacggtcattacggtgtagggctgggtattgctcatagctttgaataaatcctcaatcggacttcaacgggccgcacacggcccgaatgtgtttttggggtcgaatgaatatgaatccggctcatgccgctataaagggcataagccggattcgcatgctcacttggttttagccaagatacggaaacgataggaatcgatgccggactcctccttggcgggcgtatgccactcgcccacttcggcttcccgccacatcccggcctcgaccagcgacgccatatcgggcgcgtagctgtcggcatccacggtggcggccagatcagtcacataggctttgtccgcgaacggcaaagcctcggcgaacagctgggcaccgccgaggatccaaatctccgaacgatccagaccgtcgtccggaatcgcctcctgacgggccatatcgagcgcgtcgtcaagactggtgaccacagtggcccccggcgcacggtacatcggatcgtgggaaacgacgatgttgtcgcggttgggcagcggccggtacttgacccccagcgattcccaagtcttacgacccataatcaccggatgggagacggtcagctccttgaaatgcttcatatcctcggcacagtgccaaggcatgccgccattgaggccgatggcaccggcgcgaccttccttgtcgcgggcttcggcccagataagattcaccgagaaggtcttgggataatcgtcaccccagtcttcttcagtggcagacagcccggcagatccgggctcgggttcgtgatagccgctacggctactgtcatgctccatttcgcttactcctcctggattgcggaactgggccttagtgtagtggacagcgaagactcggggtccgtcaccttcacagtcttcgctgtccacgaaatggtaatcagcatcagaccgcaacaggtgccttaatagtggggtgatgctggtagccgacgaccttgaagtcctcatactggtagtcgaacagggaatcggccttacgaatctcgatggtcgggtacgggtagggcttgcggcccagctgctcaaggaactggtcgacgtggttgtcgtagacgtggcagtcgccgccggtccagacgaattcgcccggcttgagcccggtctgctgcgccatcatcatggtgagcagcgagtaggaagcgatgttgaacggcacgccgaggaacatgtcgcaggaacgctggtacagctggcagcttagcttgccgtcggccacgtagaactggaagagcgcgtggcagggcggcaacgccatcttctccacctcggccggattccacgcggagacgatcatgcggcgcgaatccggatgatgcttgatgaggtcgagcacattggagatctggtcgatggtgcgattcgggtcctcgggggtcggtgcgggccaggaacgccactgcacgccatagaccgggcctaggtcgccgttctcgtccgcccactcatcccaaatatgcacgttgtgctccagcagccagttgatgttggaggaacccttcaaaaaccacagcagctcgtaggccaggcccttgaagaacacggtcttggtggtcagcagcgggaagtacttcgacaggtcgaagcgcatctgctggccgaacagggaaatcgtgccggtgccggtgcgatcggacttcagcgtgccttcggtcaggatcttgcgcaccaggtcctcatagggcatcggaatgtccgtttcgggacgtgcggggatacgggagcgaatatctgcgagttgttcttcggtcaaagccatgtgcaccagtgtagcttaggggcataatagagaagtccgatgatgcgggagagcggccaggtgccgcgctcccccgctggcatggcgatgggccagatcgccggcggctgaaaataaaggagcagctatgggtaagcgactgtgggttgaacgcaacaaggacggttcgtgggatgcgttcagcgacgatggcgcgcacattaagttcggcaaggatcgtggccagttcacgccgggcgatctgatgaaggtcgcgctggccggttgcgccgcgctgtccagccagttcgccatcgaacatacgctgggtgagggcaagggtgccaagatcgtggtggatggcacgtacgaccccgagaacgacgcctacaccggtttcgaggagcaggtggtgattgatgcttctgacgccagcctgtccgaggaggatgccaacaagctcaaggaacgcgtcacccgccatatcgacaagggctgcacggtcaagcacacctacgtacaggagaccccggtgcgcatgaacgtcaccgtcaagcactgacgtactaataaaccgacgtactaataaattgagctccctctgatgagggagctcattgtatacccggactttactgcctgtcgggatcgatggtcttttcgatctgctgggcgacttcaggctcggctgcggacaccggaatctcctcgacgccggcaatctcctccagcgacttggtaggcacttcggcgggcgagctcggcacggtgtcgagacgcgattccgcagcctcaacatacttgcgtggcaccacgtacaccgggccggccgcatgctgcagcagtccctggctggtggagcccagcagcagaccggtgaagccgccgcgaccacgggagccgacaacaacaacatcgtgatcgtagctggccttggtcagtgcgctgacggccgggccggaaacgatctgcttgttgattttcagatcaggatgcgattcctgcaacggcttgatacgcacctcaagatcgtccttgtaggactccatgatggcatcctcgccatccacgcccttcaggttcggcacagcggaaatcacgtccagttccgcaccccagcacgtggcgaagtcggcggcaatgtccagcgccttcagaccccacttggattcgtcggagcctacggccaccttggtaatcgtgttgttcaggtgcatcaggttgccgtcatcatcggtgtacggcaccactacaatcgggcagtaggcgtatgccggcagcgacgaggacgtggtgcccagcagacgctcggccagaccgcccttgccacggttaccaatgacgatcagattgtagttacgcgacaattcgacgaacaccgatgccgggtctccggtaacaatcagtgtggcggcttcgacgccctgctcgtctgcgatggccttggccttggccagaatctcctgagcatcggaatgcgcggcgttatcgtcccccatcgccgtgtaagttgcatcgaacgaaacggcggcatagctcggcagggaatatgcgcagacaatctgcagcgtcagccccgcgtgctttgcataattcgcggcccaccatgttgccttgtaactggcatgcgacccgtcaacgccgacgagaatggccttgtcgttaatcatgacgacctccttgaagttattgtggcacgaataccgcgtacctccaacaataccccgcgacactcggtttggccggtatcctccgctcaaaaagaaatccgcgtatacgaaaaaaggcacatcccaaaggacgtgccttaatacgaattcgcttaccgcataattcttgttacatcacgcggcgaatggaatatccagctccaccgaacacggaaacgttgcttattgccgttccctgcaccgggttcatagcattcatcacctgtccgttaccgatgtaaatggccgcatgagtaccattcgcaagaatgtcacccggcttggcatccgccaagcttgcgaccggagtacccacagtggcttgagcaccagaggttcgcggcagggaaatgccaaactgggagaagacgtactgtacaaaaccggagcaatcccatcctgccggagtgttgccgccggcaacatacggatagccttggaacttcagtgagaagctggcaagctcagcgccagtgccagtcattttacccaagtcaacctgtggaatcgacgcacgctgttcagagcggctggctgcagcagcagcagcggactgggctgccgcagcttcatcagcggctttctgagccgccgccgcagcagcagcctccttctcggcctgagactcggtctgtggcacatcaagagtctcgatgccaccccatttagagttctcgtcaaccgaagtggaggtggattcggcgaacagattcttcttcaccgaactcgccttcgggaaagaacgtgaggacaccacagcactcgtctgcgcggaatcggcagaggcaaacggggctacgcatgcaaacatggcacccgtggcgataaccgccactgatgtggaaataatattcttaacgttcgtcatcagcgccttaccttagcacacatgggtcgatttcataacaggaatgtcttttcgaagatgatgtcgcgggtgtatcactcggcaggagaacgcaacgggcctcggataccgattggcatccgaggcctgcaatatatcaatcaataagactgcatcacgggatacgtaccacgatggtgagtttttcggtcatggcgctagcgagagccacgctgtagccgttccagccaccatggaccgcctgaccgttgccgacatacagcgccacatgatcgtagtgcgcgccgccattccatccaccggtgttggcataaatcagaatatcgcccggctgcagggacccgtctgtaactacgtggccaccgggaacattgacgtactcttcaggccaaccgtggaagttaataccacgggccgccaacgcttgactgaccaatgcggtgcagtccatgctctgtccgatcaaagaatacgcacggtcgatagaggcaccggcaccagcggaaaccgaaccactggcatcggaataagtaacagaagagcgagactcattacggctcgcggcgttggcctgcttctgggtcgcctgagcctcggcctccgtctgcttcttggcctcctcttcggcagccttcttggccgctgcggcatccttttccgcctgagattccgtctgcggcacatcgaggttctcaatgccgccccaatcagcattgtcctcaacgctcgtggcagtggcttcagtcgtcagatctttgcgcacctgggtgtacgaggggaaggacttggtggaagtcacagtaacaccctcagctgcagtcgctgtaggaacaaacataaacgagcaagcacaggagacaatcgcggcaacaatggaagaagctacagttttggtcttcatagaaccatcaccttacacggtgcgcattaactcgtacaggatggaagaaataaaacaccccggagctattgggatatatcggcgtgtcggcacaggtcagttcggactaatacgcggtcgcaacacttgaaatgtcatttcgcgcgaacgattgccgatagggcgacgtcacatccgaacagtaatcaccgaatgtaagccaatgaaatgaatcagtagtggacgtactggaacttaccggcttcggcggcgctgaacgtacgggtcgaaatcacacccaatcccttggcattggattcggagatctcaatggagccgtcggcattgatcttttccagaacggcaacatggccgtatgtgccatcggcattggcctggccaggagcgaacaccacagcatcaccgacatggcgaggagtgttgtccacccaatagcccagagcggaagctgacgccgcccactcgccaccattgccgaagttgccgctggaaggcagtcccagttcggcacgacgctggtacgcgtaccacgtgcactgaccccacggatagttgttggagttggtgccaacggcatggttcgggttgaagccagccggcacagcatcgccatcggcatccatgagagccgacaccacaggattgttcgcattattgcgattcatcagcttggcgtccaaggtgctgtctgaattgctcagcccccaaccgccttcattggtggactgtgcggtaacggaggacgaactcagatcagtacgtgcttcggaacgagaagccgcagtcacatcgctgatgcgcttaatctgcgtggtcgtcgtggccggatcagccacgaacgagttcgtggcgtctttattgttggaaaatgcgagagcacctgcggccgtgccgaccagagcggccagtgaggccgaggcaagaatatggctacggcgttcagcggcacgagcggcctcacgaatggaacgacgagtctggggagcgatttcattgatcttctcggcaatggccggatcaagccccaaaacaacggcgtcgctgccagcggattgcaccgcgcgcacggcacgaacggaatgagaacccttgccggaggcaaacaatgccttcgctaagctgaacttctggcgcgagaccgtggtcgctttatgcgaagcatgcttcatactacgttaactccttggatgggttcggcggggtcctttcaacgaccccgtatgaccggcacaattgagtactgtacaacgaacagaggtcaatcctcaatgcgatcccccaccatccgggcatgtcaaacgatttacgtaaccgtgcggcagggtgaaaaactgccttgtttccgcccgttcacgaacctcactatccggttatcggaagaatcactaactcatgtcattccgacacaccgtagccatgatgtgctgcgtacattctgcactgcattccgcattgccgctactaccgcccggcaccccggaattccgcagtagccccgcagcaatcccgcacaccgagcattatccgcgatattccccaacactggtctacccttgaaaccatgactatcacactgagtattcccgagtcgctgaagcccgaagatggtcgcttcggctccggtcccagcaaaatccgccccgaacagatcgccgcgctcgatgccggcgccaccaccctgcttggcacatcacatcgccaggcaccagtcaagcaactggtcgcttcgattcgtgaaggtctgcgcgagttcttccacctgcctgaagggtatgaggtggcgcttggcaacggtggcgccagcgcgttctgggagattgcctgcgcttcgctgatcccccgtcgcgccgcattcggcacgtatggctcgttcagtgccaagttcgccgcgtccgccgcgaacgcacccttccttgaagacccggtgctgttccccggcgagccgggcacttaccgtctgcctgagctcaccaagggcgtggacacatattgctgggctcacaacgagacctccactggcgtggccgccccgattcgccgcgtgcccggcagtcgtgaagccggtgccctgaccgtcatcgacggcaccagcgcagccggcgctttgcccgtggacatcagccagaccgacgtctactacttctcaccgcagaaggccttcggtgccgatggcggtctgtgggtcgccatcctctcccccgaagccatcgatcgtgcggcatgcgtcgaatcaagcgctcatctggaaggcgcacatcgctgggtgccgccgttcctctcgctgaccacggcactgaacaactcccgcaaggatcagaccctgaatacgcccgccgtggccaccctgatcatgatggaaaaccagattcgctggctcaacagcaacggcggcctcgcctgggccaccacgcgttgcgccaagtccgcatccatcctgtactcgtgggccgagcgctccgaatacgccgctccgttcgtcgtcgatgcggacgcccgctcgaacgccgtggtcaccattgatctggacgagcgcgtccaggcctcccagatactgtccatcctgcgagagaacggcatcgtggacgccgccggctaccgcaagctgggccgcaaccagctgcgcgttggcgtgttcccctcggtggaaccggctgatgtcatggccttcaccaagtgcgtcgactatgtggtcgagcacctgtgatggcggtctatgcctcgcatggccgaccatatatgccatgcacattgatcggtctcaactgataccgattgaataaatcgtagggagaggtgtttgacgcccctccctactcttactacagtgcatgagtatgaagttcgcgcctctcattgaccctgccgtccgcaaacccgcgcccaagcccgtacgggtggacctgcgtaaggtgtttgccatcggtaccggtctatggattgtggcgttgattgtcgtgctgattctgctggccgtgggctacagcgtaatgccgttggtgattatgtgcgtggccggtgtcattattggcttgctactgctgatttgggaatacttcgaccgctgggactaccgccgcctcggacagtaataaagttcactgcgccaacggcaacgtcaggctgaacgtactgccttgcccgggcgcgctccatacggtcacatcgccatgatgggtcagcgccacatgtttgacgatggccaagccaaggcccacgccatccgccgtgcgattgctctgttccgcaccccggtagaaccgctcgaagatgcgcgcctggtccttcttcgcgatgcccgcgccctggtcgatcacgcgaatcaccgcacggtcgccatccttgtctttggatgcggacacactgaccacaccattttccttggaatagccgatggcgttttcgatgagcttggtcacggcgctgtcgatctgatccgcctcaccattgatgactagatcatcgtcgcccttgatgttcagctgcacgccagccgcggccgcctgcggctccagtcgcgccaccgtggcctcgagctgttccataacgttcagtcggttggcggaagacggcgtaatcggctcctgtgcgcgtatgagcagcagcaaatcggacaccatatggttgagcttgctgcagctggaacgcacctggcgagcatcggcagccacctgctgttcgtccagattgccggactccagcgaatcggcgagtttggccagagcttcagtggggcccaacaattgctcggatacattggtaataaacgagtcacgcacttgagcgaaacgaatcacgtcactgacatcggtaatcaacacgatgacgaactgctcgttgatacgccctacagtcaccttcagccagttagggcggtggacggactgcgtggcgacgtgatcgcccttgttctggtctgcgacgtaccgctccggagtatcggtggtcaagtcgaactggcgcttgccaccggacttgcgcgcctcgtgaatggcatccagcacctgctgctgggcgatggcgtcatctgacaccacacccaggcggtaggcggcgggattgcagcggaccacctcgtcgtgctcgtcgaccaccacggacgcacccggcagcatggacagcagcgtggcggtgtcgtcggacagatcgtcattgtcgtcatcatcggccagcggcgattccacggacactcgatgtgtcgcaaatcccacgatgagcgtgatgattcctaccacaaataaaacagccgcgacaataagagcaatcgcggcgacgagcggcatctgtgtcatgcccccattctttcacaccacacgccgggattgcggtttgccggcgcgccggtaacatgaatttcaggtgaacaacccaatgaacagtagaacaacttgaggttgccattacctacgttgaagtggggaacaagtactggaataatacactggtacaggttgcaataagcaagcatgaaaggctagagaaatgcgcgttattttcaacgaggagctgaagcaggttgctgacgacctcgaccgtatggcgcagaacgtgcgcaaggcgatcaaaggcgctggggaagccctgctgaatcaggacgttgaagccgcacagactgtgattgacggcgacatcgagattgatgccctggagtcctctgtgatcgaccagtgcgtcaagctgctcgccaagcagaacccggtggccaccgatctgcgtgtggtcgtttccaccatgcgtctggcttccacgttcgagcgtatgggcgatcttgcccgccacgtggccgaggccgctcgccgcacctacccggccgccgcgattcccgaatccgctcagccggtgttcgccgagatgatcgacttcctggacaacaccgctgaccagctggtggccatgctctccgatcgcgatgccaagaccgccgaggccatcatcctggccgacgacaagctggacaacctgcaccaccagaccttcgatctggcgctgtccgatgacatcacccgtcagcagaccgtggatatcgtgctgctgggccgcttcctggagcgtctcggcgatcatgccgtgtccgccgcccgccgtgtggtgtacatcgtctccggcttcgaccccaccaaggagccgacccgcgacgagggcaccgacatcgactgattggggcttgtcctcacattgggcgaataactgaacacttgtcctcctatggtttgaggaggatgcccgaaagcggcgatccggctacggctggacgccgttttttgttgcttctgggcggtacaccggcgtatccatggggcggcaaaacacccatagggcggtaacttgcccatggggcggtttgaaagatatgtgaaaccgcggaattaagccattctggcataccgccccatgagagttttaccgccccatgagggttttaccgccccatggggtaatcaccgccccatggggatttggcaggcatagcaaaggggagccacacattatgtgcgactccccttacagcttgtaccgtgttagcggcttaggctcacttctggccttgagcggcgacagcggcggcaccggcagcagcagcctccgggtccaggtactcgccacgcggcttgatcggcttgaagttctcgtccagctcataaagcagcgggatggcggtcgggatgttgaccttggcgatctcttcctcagacaggttgtccagcatcttgacgatggcgcggagggagttgccgtgggcagcaatcagcacggtctttccggccttgagctccggctcgatagcagactcgaagtacggcttcacacgctcaacaacgttggccaggcactcggcttccggaaccggatcgccggcgtagcgcgggtcgttgttctgggcgtactggtcgttcgggtcgatctcgggcggcggggtggcgtaagaacggcgccacagcatgaacttttcatcgccgtactcttcgcggatctcggtcttgttcttgccctgcagagcgccgtagtgacgctcgttgagacgccagtcacgctgaaccgggatccacagacgatctgcggcatccagagcgatgttggcggtgttgatggcgcgacgcagcagggaggtgaacacgatgtccggaaggacgttcttctccttgagcagctcgccgccacgcttggcttcggcttcaccctgctcggtcagcggtacgtcgacccagccggtgaactggttggttttattccatgcgctctgtccatgacggagcagtactagtttataagtcatacggttcagtctacagccgcgtgcgcccaaacacgagtattcgtcttattatttcgctctcatagcgccacggcaaccgccagcaccaccgcaaacagcaaggtctggaagctggcggcgggcagagccgggcggaattgacgtttattcacgctggagaccatgcgcacaggtattccggtgcccgagagcaacagcaccgcaccccacggccaccataatgtaccgcacatcagcagggcgatgatccatgcgatgacgcagcacacaatcagcaacgtacgcgcgccggactcccccagccgtacggccagcgtgtgtttgccatgctcacgatcctcgtcgatgtcacggatattgttcaccatcatgatcaggcaggagaacaggccagccgccacagcacccaatagtccgccgacgtccaccgtgccgcacagcgcgtattcggtgcccaataccgcagccaagccgaagaacaggaacacgccgacttctcccagcccgacgtatccatacggatgcttgccaccggtgtagaaccagccggccagcaaggaggccgcgcccacggccagcaaccaccatgcttgggcgagcacgaccgccacaacaccgcatatgcaggcgatggcagcgcaaatcatcgccgcgaacagtacatgcttggccggtaccagtccggatgcggtcagtcgctggggtttgcctgatttcgattcgtccgtgtcacgcccggcgtcagtgccgcggatgccgtcggaatagtcgttcgcatagttgacggcgatttgcaggaacagcgcgactagcaggcacaggatggtcaccggccagaatcggtccatcagcagggtctgctgttcacgggccgtggcgcaggaggccggttctggatatattgcgatgcaggtgcccgaccgctcgatatgcacgtacgccatcaccgccccaaccatcaccgacgcgatggaagtggccaaggtcttgggacgcgcgccccgaacccacaagccgatagacataagcaatccctttcatatataactctggctcccctctctgaggggagccagagtatgcctaatcagccaacgagcggcttgaccagcgggaaggtgatggtctcgcgaatcgtggcaccggtcaaggcgataagcagtcgatcaatgcccatacccataccgccggccggaggcatgcccacgccgagagcctcgaggaagtcctcatcgatgtcgcaggcctcttcgtcgccggcgagtgcgtccttggcctgggccacgaaacgctcacgctgcacgatcgggtcgttgagctcggagtagccggtagccagctcgaagccgcgcacgtagagatcccacttctccaccacgccgggcttggtgcggtggcccttgaccagcggggaggtttcgaccgggaagtcacgcacgaaggtgggctcgtaaagcttgtcctcgtagaagtgctcccacaggtgttcgacgagcttgccgtggttctccacgtcgtcacgctccacgccgagcttgtcggcgatggcgcccaaatgctcaacggaggtgccgggatgctcagggccgccgttcggcacgatttcctcgcccaatgcctcggacagcgaatcgtacatgctgatggtcttccattcgccgccgaagtcgtattcggtgccgtcgagcagggtgaccttgtgcgagccgtagacgtccatggcggtcttctgcacgagctccttgaccagctggccgatggaatcataggtgccataggcctggtaggcctcgaccatggtgaattcgggggcgtgcgtggcgtcgacgccctcattgcggaagtcgcggttgatttcgaacacgcgatcgatgccgccgaccaggcagcgcttgaggaacagttccggggcgatgcgaaggtacaggtcaaggtcgaaggcgttcatgtgcgtggtgaacgggcgggcggccgcgccaccgtgcagggtctgcagcatcggggtttcgacctcgaggaagtcgtggtcgtcaaaggtgcggcgcagggaggccacggccttggagcggttgcgcaccatgttgcggatgttctcgtccgcgatcatgccgatgtacggcttgcgggtgcgggtgtcttcgttcaggtccttgtgcagggccggcagcggctgcagggccttggaggcgatagcccactcagtggcgaatacggacagctcgccggtcttggaggcgatgacgcggcccttgaggtacaggtgatcgccaaggtcgacgagctgcttgaactgcttgagcgagtcggcgccaatctccttcttggagatcatgccctgaatcttggtaccgtcaccggcggacagctgcacgaagcacaggccgcccgcgttgcgcaggaacagcacgcggccagcaatgccgaccatgtcttcggtctcttcgccagcctcgagcttgccgtcatacttggcgcggaccgcctcgatggtgtcggtgacgtccaagtgcaccgggtagggggcgatgccggcctcaagcatcatcgcgcgcttggccacgcgcatctgaacctgctcggggtgagccagcgggccgaactccttgttggaggggtccacggcttcgtccagcgtggcaccggacttgatcttctcgcggatggtggcgtcctgctcgagcagcatttccgcacgttcgacggtgctcatctgcgggacggccggggtttcattctcagtgttttcggtattttcgacaacttcagccatgattcatcagtgtacgcaaggccggcgattatgagcccggcagaccgtacggccatctgaacacccgctcacatgacgcaaaaccggctctgcacaaggcttgagagacctgtacacacggcgaatccaccatcacgcaacactcgcgacatgccgatttgcattgtccaccaccacaatgtaatatctacgtctgttgccaaacgggctgtagcgcagcttggtagcgcgcttcgttcgggacgaagaggccgcgggttcaaatcccgccagcccgacaattggaccggattgttgagaaatcagcaatccggtttttcgtttcctaacccaacaatcagaccaagcgatcggacagcggtaaacaacccgccgcgcacagcgacaaaccgcgtcgcggcaaggcccgtatttgttggcggaccaccgtaatatatcgctcgaatcaatcgattgccgcactgtttttgtaagtaatactgaagtaattagaggaaccatgaagaagagtctgcttgcactggcttcgggcgcgttcattctcggtgccgccgagttcgtgatgatgggtattctgccgcaggccgcggccgccaccggcgtgggcatccccaccgcaggccattacatttccgcgtatgcgatcggcgtgtgcttcggcacactgattctggtgttcggccgcaaggtgccgccgaagaacctcatcatattgtttatggtgattgcgcttatcggtaatctggcctccgcgttctcggtcaatgccgccacgctgattgtcgcgcgcttcattgccggcctgccgcacggcgcatttttcggcaccgccacactcatcgccaaaaccttggccgacaagggcaaagaagcacaagccgtatcggtaatggtcaccggccaaaccgtagccaatatgctcggcgtaccggcgggcaccttgatggctgagttcctatcctggcgcctcgcattcggtattctggctgcatgggcggcaatgaccatcgtgctggttctggcatggatccccttcgttgcgccgattaaggacgccggcatcgccggtcagttcaaattccttactcgtcgtggaccgtgggtgattctggccgccgtattcaccggcaacgcaggcgtgttctgctggtggagctacgtctccccttggctgcagaagaccggtggctggtcgtctaacctggtaccgctattgatgatgcttgccggcttcggcatggtgataggcggtcttatcggcggtcgcatcacagataaatggcgccacgccggcactgccgcgctgggtcagacgatttcctgcatcggcttgctgatggttttgctactgccgggaaaccagggcactactgctttgctgaccttctggatcgccttcggactgttcttcatctccgctccgcaacagctgttgatgaccgaagccggccaaggcggcggcgagctcatcgccggcgcagccgtgcaggtggccttcaacttcggcaatgccatcggctcgattgtcggcggcgcgatgctcaccactttctcgatgaactatcgctataccggtctgggcggtatgccgctggctctgcttgccgtagggctgctggccttctactcgtggcgctgcgaaaccgataccgacgccattcaccgcatgcgcgaaatcaaggtggactgagaccaagctcacagcaaactccctgacgcgtttgtttacagtattaatagactgaaatcagacacgattcagggaggtctggcggtatggacgaggaagcactgctcaaacaattcgccgcacaattcgcgcatggtccagacgatgccgacgacaccgatgcggcggccgcagcgcaaggtgccgattctactgcgaaccaggccacggacgatgccgatcaatcgcccgcaacctttgatacccaacaattcctgaacggactggacgcgattttcgatcgccacgcggcagccaccgaagccggtccgtacttggaacaggcgatggtggacgcggaaaacgccggcgacgaggccggactgctcaccgtactcaacgaaacgatgggcttctatcgctcgcagggccggcacaaggagaatcagtggattgtgcagcgggcgctggaactggccgctcgtatgggcttgaccaccggcacatccgaggcgtgggccaccacgctaatcaattgcgctaccgcgatgcgcgcggcccaacaatacgatcaggccgaggatttgtatcatcaggcgcagagtgtctgccggcattcgctggcacccaccgaccgtaggctcgcagcactgcacaacaatctatcgatgctctacagcgagacgaatcggcccgacaaggcggaactggagttgcgtgaagcgctgcgcattatcgaagcctcgagcgtgaacccggacgcggatatcgacgtggccagctcgcacacgaatctggcgttgaccctgctgaccgaacacaagttggagggcgcgcattggcatgcagccaaggcactggaaatctatcgcaccggccatctggaacattccgcgcattatgcctccgcactggcgggcttcgcgcaggtgtgctttgccgagagacggcatgcggatgcagttactggataccggcatgcgctggccgtgatcgagaaatgttacggcaaggacaccgattactggcgtatcaccgccgacaatctgcggcaggccgaggaagaggcggcgaaggccggggtgacggttgacaatgcgggtgttgccggcgatgcaggcgcgctgccccagtccggatcacggctgccggacagcccggcacagggcaagaccggtgcgggcgtcgaggcacaggtcggctccgcgtcatcggccgtggacgcggatacgccgggcgcattggcgcaggcgttacccgagaccggtgcgaacgcggcgttttccccatccaccgtttcggtgtcgaccggttctgcgggcgcggccgaggccgtttccgcatgcccggtgtccggactgaagctggcccgcgcgttctggacgcagatgggcaagccgatgattgcggcgaagtatccgcagtatgccgggcgtatcgccgccggtctggtgggtcatggctcggaatgctacggattcgatgatgcgtattcgcaggaccacgatttcggcccgcgcttctgcctgtggcttacggatgaggattacgcggccatcggcgagcaacttgagaccgattacgaggcgctgccgcgcaagttcagcgtggatgcgcaaggccgcgtgacgttcgaggcacatgccagatccgatgcttccggggcattctcctccgcaggtgcaggctccaccgtcatacccgatgcgacaaacgcacccacccccggcaccgctacggacgatgccgccactgccgagtcaggcgcggcgtcctctgatgtggcggaagcgatgacgactccgattgatgcaccgctctcccccgtcacgccgcgcgcacagggcgcgaatcgccgtgacggcgtgttccgcatcggtgacttctttgagtcgatcaccgggtatcgcactgcgcccgcgcagaccgcgccgcacgagtggctgatgcttcaggaatcgaccttggccgccgccaccaatggcgaggtgttcgccgatcccaccggtctgttttccaagacgcgccaagggttcaaaaacatgccagacgatgtgcggctcgcgctgatctccaagcgactcggcatgatcgcccaggccggtcaatataatctgccgcgttcgttgaagcgcggcgacggcgcggccgcatggctgtccatccacgagttcgtgcaggccaccgcctcgttggtgttcctggttaacgtgccgatggtggtgggctatatgccgtattacaagtggcagttcgcagcattgcgcaagctgtctggctcgatgttcgcgctgttgccgaacgtgggcgaacagttggaaaccgtgatgcgattgagttcggcagcctgctatggaggggccggattcggcgaaggcggcaagggcgcggctacagcaatcaagaaaatcaacgatatcgtggagcagattgcggcggatatcgtcaaggaactcaaacgcgaacacctgaccacgtccggcgagaccttcctcgaatggcagcgcccgtatgtcgaggaccacatcgcctctgatgatccggtgcttaaaagtttgtagattcaagctccctctgtcacggcttcgccgtgccatctccctcatcagaggattagtgaaaggaacgtcgatgaccaacgaactgactgatgatgaactgcgcgaggctattgtgcgccatgaatgggatcagttccagcgcaccaacaatgagggtggacgcgcggcatgccaaggcaactggccggtgttccaccagatgcggctggcccagttcctcacatgggagcggccattactcaccagctatgccgctgatcttgacgcggctgaccacgtgggccgcaacctcgtgaccgaaaaatacggccgcatgatggcctccaccgcgccggaagatttcacgaagaacatagagccgtatattccgcgtccctctgaagagcgcgtggcccgtcaggaacaggtcatcgcccagcaggtcgcctgggccaaggatttccgcgagcgctaccccaagctcggcgaggcgatgcgcgtactcaccaccaccgaagacacaccatctgccacctcattcgaaacctatctgcgcggcgagcttggtacgtattccgaccagaccttcgaacgttacgaagcgatgattggcgagcgcgccgcagccagcccgcaacgcaatatcactgaggaaaccttgttgcacacggtccagctcggcggtttcgacaccttggaggaggccgaagcctcccaagcgtaatactcagccattcactgtgtaccggacaccccgactgatgtacgccggccggccacacccagtccaacgcaatctgccgatcgccccacacccagaccaccaacgcagcttgcccgccaggccccattgaccggcgcacatcggcagaattacagcgagaataggccccagaatgccagtgtcatcagtgtggtgagagtgccgagcgctaccatcacgcatatgacgcgccgtacaccgacgatatcggcgcggcgataccagacacgttccagttcccacgcgaacagcacgaccaacagcacggtcagcacctgcaatgccctccacccaagggaaaacaactgcggttgaggcataaccaatacagccgatacgcctacggcgctcatatagccatacaacagcacggtaatcaccattaccgctgtgccgataccggcagataagccggcaatgccgtgcaacgtacgctgttgggcggctcccagcccactcggcgtcgcatgcatggcccgcacagtcgccacactacgtcgcccggccagcaacgtctgtagccaagaaaacacagtcaagccaatacctaatatcgccgccatcacgatcagcacgggccctgccaccatcagaccggccagcacgccgagcgagccgacgataccggatctggtacgttgcggcgcggcgaagctctggtgaggtgtcgcaccggcgacttggggcgttgcccatccatcggctttggttccggcagtcacaccgttcacccaattttccagcgcttgcgtatagccttcggccaatggcaggttcggggtgaataagccctcaccagcccgcatctgatggttgccggcaaaatagcgtacggtgacgttctcgttgccggacttgttggccgtggcgatgatccgctgcgccccctgttcgatgggcatggccgtatcgtaggtgccgtagttcaccagcaccggcatggtgagggatttcagataccggtcggcatcaaagtcggcataggccagatcgaatggcgcgtagtccagcgacatcaatttggccatgtctttgaccacgggcttgggcgcgccggcctcatgcgtataggcgctgacagccatggccatttgctcacgtccattgaacaccggtgcggatgtaagtatggcaaaggcaatgtcttgccgtttcgaggttagaatcgtggcgatccaggtgccttcggattcggcgtagatgccggttttggcggggtccacgccgcttatgccacgcagcacgtcgagcgaacgcccgtattcgcgagcaaaacgcgggtagtcgcgatgcagcacggtgtagttgtcgttgcgcttggccggcaccaaggtcacgatgccggcagaggccatggcgttggcgatatcgccgaaatcctcggcaccgctggtaccggacccgtgaatgaacagacaagccgggcgtggcccgggagcgtcgaccggttcacgtagtacggcgggtagcgtgacgccgtcgccggtcttgatggatagtcgggtttcacgcgtactatatcgcccctcgtggggaatgttcgcatgggcaggggtgatggtggtgtcggcagaagcgatagcgatgtgcttggtgtagggccgtgtgttccattgcggcatcatcgcccagccaagtgtggcgaataccagcgtcatcgccatcgcggtggcgatgacgctcgctacccgccgcgccgaaatccgtttcatagttactatgcctccccccatcagcatagaacggtcggctcccgtcataatgtgcttctactgggaccgtaatgcaatggttgtaacgctattttctcttcttgacggcaccgactatggcccatacaacggccactattaccagaataagtcccactacggcgcagataatagccgtcagcaattgcggattcggcgagaacagcgaaatcatccgatccggagatatgcacccgaaaaccagcgcgatcacgccgataatcacgcctaatagtccgaataccacagtaagcgcgctgatgctctgtttctggatgttcttggcactcttgacatccttagcattctggacgttcttggcgctccccccaggctggcatggtttgccggcggtctgagactgctcataggaaggttgcgctgaagatgctgcgtacatcggtacatcatcggcagatggaatcggcccaccatccccctccacggcatcggcaactgtttccagggcaatccgatctgtggatggttcgatgggcgatggagaggcagttgtcgcctgcgtatccacatccgagaccgacgcatccgcatgattgtcggtgacgggcagcacagccgtttcgtcatcatcagctgcggatggcagcaccgtggtatcggttcggtcatcgacggtcaccatggttgttgtcgcggtggtcgcgtcggtttcggaaggtatggccgtggtcggtgtcgcatcctcgatggaggcgaattccttggtttcatcagtcatgattccatctcctggttgtaacggcttgatcattccgattgttcggttgtgttcttgcttgtgctgttgccatcgtatatatcggcaagcggctggaacgtggagcctttccaatcggaggcgtacaccacgttgacacgtgcttccaccgcatagggaatattgatttttaattctgggccgttgtccggcatggcggatcccttatccaaccattcgtaatcaggcccattcatgggattggtggcactttcagcttcgaagaaaccaaagcttagacccatgtagttgttgtataccatctcgtatttgccgccaacgccactcgaagtgaagtaggagtcggcggtgccgaaggcgtaagtgcaggaatccggcagaacgatatgcacttgcgcctgtgttgcggctatggtgatggtaccgaccgggcaattactgatggaagttttgccatccagcatcttcaccgtgtgcggcccatgtgtcttgccccaatcggaccaatcaatgatcgcctgatcggtgttgtagttttcaccgctgaacgccacaccttgctgcaatgtttcgaacgtggcatcgctggcatcggcaacgaagatgccatccttttgcacatcgttcatgccatcgctgtttctcgcactgacagattggctcagtgaaacaacagtattgatgccgctggcaccaagatcacggtagtgcacgccatacgtgcctgaaacgatggtcatgcagagcgcgcatccaccggcaaccagtccgagaggaatcagaccaccggtacgccgccctctgaatccgagaatgatgaccaccagccccatcactatgcatactgcggcaatccagatggtgctcagacgcataatgccgataatgcccatgtcgtttacccaaatcagtcccatcagaccggcaaaggagaggaaggtaaggcccagtatgctcaagaccacgattgggcccgccggcttgcggcgcttggactcggtgggggcataagccgtcgcattcatacggtcgggggcaaacggcccgttgggtactgtgccgggcatcgcgctgggcactgtgcccggcatcacgctgggcatcgactgatagacaggctgtgaaacaggttgtgaaacactaggcgcggttcgtgaaacagattgtgaaacaggttgcggagctgaatacaaaggagatagagggaccggttgcgcggctggatatgagacaggctgtggagctggatacgacacaggctgtgaaaccggtcgcggcgcagatgccccgaatccgtacccttcctgctggcgaatgccgcttttggccaacaaccatagcgctaaggcggcgagcgcaatacaaacccaccccgcacctggaatcacgattgccacggctaggaacaggaagcatccaagacaattccagtcccattggccggcaatgaggtcctcggccaagatgtgcccatcgcgtacatccggcatcagaaaccagccgagtgcgtacagagctgcgccaaaaccgaagaacaatgtacatacaatcaccaacgcacgtactaatgtggggctccagccaagccgtaaagcgatgccgctgcatacgccaccgatccaccggtcgtcgccgcgaaccagtccactggatcgcacccaagtgaagaagcgtcgcgatgtcttgtttttttgcggaccaggctgcggctgtggctgatacggattcgcgtttggattgctcatgattccattacaccgcccgaccactgccacaacgctcggggaacaccctgattgttccctgaacaccgggtaaaaccccggccgcaacgccctgagcgcggcacaataggagtatgacgtcatctcccgaaccattgctgcccgcgcgcatgccgctgatgcgcccccggcagggccgctggctcaccggcgtgtgcaagggcatcgccctgcacttgggcatcggcgtgacatgggttcggattgcgttcatcgctctgaccttcctctacggcgcaggcatcatcgcttatgtattcctgtgggtgttcatgcccgccggagacccggtgacggctgcagctcgcacagtgcccgttgatcaggcgccgcttgcgcgaggcaatcagccacttgccgctcatgacgacgaatcggctgccgcaccggaatcattgtccgaggccatccaacgtgctccgaaaccggccgtcgtggcattggccggtttcgcgttgatggccaccggactgctgctcaccagcaccggtgcggatgtccagattgtgcttccgctgctggtagggttgggcggcatcgcactggcatggatgaatcttagtccgcgaggcacgcagctgttgtctatgttgggcggcatcgcactgattttcatgggatgggcattgtatgtgcataatgtcagcattcccgggtggggcagctctcctcgacgcattgttgccagcggattcgtgatgatcgtcggtatcgtggtggcggtgatgccgtgggcgaacgcgatgctgcaacgactcacccacgagcaggcattgaaggaacgcgaagaggagcgcgcggacatgaccgcccatctgcatgatggcgtgctgcaaacgttggcgctgattcagctgcactccgaggaaccgactaccgtattcgccctggcgcgtagccaagagcgcgagctgcgcgaatggctgtatcaggaacgttccacatcggatcgttcggtgggagccggattgaagcagatcgccgccgaggtggaggacgagcacggcaaaccgattgaggtggtcaccgtgggcgacgcgcggccgagtgcccagaccgatgcgctgctggacgccacccgtcaggcgttggtcaatgcggtcacgcatggcggcgagccggtgtctttgtattgcgaggccagcgacacgatggttgaagtgttcgtgcgcgaccatggcgaaggcttcgatatggacgccattccgcccgaccggctgggcatccgcgaatcgattatcggccgcgtcaaacggcgcggcggtacagtggagatagtgtccagggccggctggggcaccgaggtcagaatgcatatgccgatcgcgctgaaagcggcgcagggagaacatcgatgagcgagaatgagacagccaagattcgtgtggccgtggtcgatgaccatgagatgttccgtgcgggcgtaatcgccacgttgcgtgattccttcgatatcgtcggccaagcggcggacgtgcccggttcggtggcgatgatcgcacagaccaagccgcaggtggtgttgctggatgtgcacgtgcccggcggtgaaggtggcggcggtgccgagatcctcgccaaatcgcggccctactcccccactaccgtgtttctggcattgtcggtttcggatgcgccgcaggatgtgggggcggtgattcgcgccggcgcccagggctatgtgaccaagacgattaccggcgctgatttgatttcatccatcaagcaggtgcatgagggctatgccgtgttctcgccaaaactggccggttttgtgctttcggcctttcagggtgtgccggcggcggggtctgatggcggcgctgatggtgcggcacgggctcatgatgaggagctggaccggctgtccgcccgcgagcaggaggtcatgcggctgatcgcacgcggatacacgtataaagaggtggcggccgaactgttcatttcgatcaagacggtcgaaacgcacgtgagctcggtgctgcgaaagcttcagctttcgaatcgcaccgagctcacccgctgggccgccgataggcgcattgtgtgataaacgacagatgagctccctcatcagagggagctcatctgctcatatcactcggcgtcgcggaaaccgttggggttcttggtctgccagttgagggaggaggcggccatgtcgtcgatggtcagctcggccttccagccaagctccttctccgccttggaagcgtcggcgtagcaggcggcgatgtcaccggggcgacgcggcttgatcgtgtacggaatcggatggccggcggccttctcgtaagccttgatgacctcaagcacggagtagccgtggccggtacccaggttgtagacgaacacgccttccttgtcgatgtggtcaatgacggccacgtgacccttggccaggtcgaccacgtggatgtagtcacgcacaccagtgccgtcgggcgtgtcgtagtcgtcgccgtagacctggacttccttgagctcgccgaccgcgaccttggccacgtacggggtgaggttcgccggaatacccttcggatcttcgcccagcaggccggactcgtgtgcgccgaccgggttgaagtagcgcagcagcacgatggtccaggacggatcggccacatgtacgtcgcgcagaatctgctcctggaacagcttggaggtgccgtacgggttggtggtgccgccggtcggcgtctcctcggtaatcggcagttccttcggcgtgccgtacacggtggcggaggaggagaagatgatcttcttgacgttgtgcttcttcatcaccttgagcagcacaagcgtggagtacaggttgttgtcgtagtattcgatcggcttggccacggactcgcccacggccttgagaccggcgaagtgaatgacccaatcgatgttgttttcggtgaagacgcgttccataagcgcctcatcgcgcacgtcaccgtcgtaacgcttgaccggcttgccggtgatctgctcgacgcgctcaagcgccacgggagacgagttgccgtagttatctacggaaataacgtcgtagcccttgtcgagcagttcgatgtcggtgtgggtggcgatgaatccagcaccgcccgtaaccagaacagtagtcatatctcctcctttggaaggacttgccttcggttttccttcagtattgagcttacttcacttgacctgtttcacctagcggcaaaaccaagactttcgaggaatgtttgcgtggtggctttctgcttgaagacggccgtgttgccgaggatgcggtagcagacgctgccgagctcgtcacgtacggcttggtggatggcctcgcggtcgcggtttccggccaatgtttcagcgagttcgccccattcgagactgaattcgctgacttcatcgggcaaatcgcggccttcggcgagcgcctcctcgacgatgccgagctggtcgacgagccgtccgggcaggatgaacaggccttgggcttcgatcagtccaatcggctcctgcttgaccggccagtattcggggtgtgcatggaaaataccttccgggtactcgtcgctgatcgcattgttgcggaagatgagactcatctcatagccacgttcggtgatgatcgcgctgggcgagagggcggattggcggttgccgtccgcgtcatggctggcgatgccgttcgccgcgtcgtcataaccgacccatgcctcgcggatgatgtcggatacgtcgatgatgctctggcggtttttcgacaccacacgcacggcggtaccgggccagtcgaggatttcgaccacggcgtccggatagtcggcgagcgtgaaggcggcccaagtggcggccttgtgcatcggcagcagttcgccgccgccctggtagtggtcgtgggcgagcaccgagccgccgatgcgaggcagcgcggcgttgcatccgaggaagtatccggggaagcggtccacgaagtcgagcagatggccgaaggtgtcgcggtccacatgcatcggcgtgtggtcggtgttcacgcagatgccgtgctggtcgaagtagccgtagggcgagaactgccagaaccatgactcaccgccgagcgtgaccggcagggtgcgcagcgtgcgcttgtcacgtccggcgaagccctcgttctcatggcagatcgtgcacttcgggtagccgccggacacggcgttgccggccgccgccttcttcatgttcttgaattcgggtttggcgaggttgatggtcaccgtcagcccgtgcgagtcgaagcgcgggttccggtcgagctgggcacgcttgacataattgttggccacacagtagtcgtagaaccattgcatggcggccatgccgccgtccctgtgctcgatgagcaggaaccggtcgtcgagatcggcggggttggcggagaggatgcccatgatggtgtcggcgtaggccgggccttcctccggatcgaagaggccggcggttgtggcggcggcgcggaaggcggcgagtagggggtcgggggtcttttcgtcagagggggcctggcttcggctgccgacaatgtcttggactgcgtctgacactgacgccgccgacgttgtggttttgggtccggggtaggaatccaggtggaagagggcgaagatttggttgcgggtccagtctgcgttgcgtggatcgaggtcgagatgatccaaggcgtaatcgactagggcgtcgatgctggcgtatacctcggtcagctgatcgctcattgctcggcccccatcatgctggttcgggtatggttcgactgacggctcacttggcagcctccatgatgtcggctacgatggcgtgggtttcactggccttctgctccatctcctgcacgagtttgatctgggtgcgggtgcgcaccagattgtgctcggggtacttggtggcaaagtagatatcgccttccaagtagtcggcgagaaagcgcatgccgcattccatggtgagcaggttgccgctgaacggcagcagttcggcctcgcgcgcggtgatgctgccacgtagttcgcccacgaatccttccgtgtaggcacggaacagctcggtgctgaaatgcaccttgctgaggtccttttcgtcttccagagcagtggacgcaccaaagcgtatggaatcgccgaagtcgaacagcatggagccgggcatgatggtgtcgagatcgatgatcgcacgcgccttgccggtggtggcgtccatgaggatgttgttgagcttggtgtcgttgtgggtcacgcgcaacggaatcgaaccgtccctgagcccatccatcacgacggcatactggtcggcgtggctcagatagaagtcgatttccggctggcatgcggcggcgcggccgagcttgtccgcggcgagggcggccttgaagtcctcgaaacgatgcggggtgtcgtggaagcgggcgatggtttcggtcagctggctggcgtcgaattcggacaggaagttctggaagtcgccgaatgcgctgccggcctcgcggaacacgtccgggttcggcacgaggttgtacgacacggtgtgttcgatgaacttgtagacgcgccatgcgccgccatcgatctcggcccaggtggctccggaggtggtgggcacaatgtccagcgtctctttgccctgagccttgagagcggaggtgaccagttcgacattgcgcatcagattcaccgtatcggggaagatgctggtgttcatctgttggaggatgtagcgggggccgtccgtggtcaccagataggtggtgttgatatggccgtctccgtaaggttcgatgccggtcacggcaccttccagcgcaaaatgcgaggcgatgccgaataaaacttcattgctttcggtcatgatgggtccgttctccaaaacgcgggaatcaggcttcacgccatgcgatgccgctgtcgggcaggtcgaagtcctcggtggtgccatcggccagagtcaccgtggtccgctgcggctgatcggtgttgttgattacgcagtacaacccttgctcggggaagtgcgccacctcgcactccgggttggacgagctccaagccgcatacttgtcttcgttgtgggaggcgtagaacagcacgcgttccagcagtcgggcgttggccgccgaatagggcagaccggagatgtacacaccgcggccttcgccataatcattggtcgcgagctgcacctgcccgccgtccgcgcgcagcagggtcacgttttcattgaccggatacgtgttgagcacgggttcgccgaagtcgatgccgcccaacggcttgatggactggccaccgccgcaaccgctcagcgggatgcggtagccggcctgttcccaagcctcgcgggccgccgggtcgaccggcacatcggcggtgatgaagtggtccggcaccaccggtgggaagtacttgtccacggagagggtctgatagcgctcctcgtccacgccaatcacgtcggccagctggaagaaccggcccgcttggaagcgcggtgccgagctcggctcgcccacgcccacgaacgcgccgccaccacgcacccaggcgcgcacggtttccacgagcttcgggttggtccacacgtcgccgccggtgaatgcggtgtcgaccgggccgccgttgatgattacgtcgatatcactatcgatgccatgcgcgagtacgtcgtcgaagctgatgaaccgcacgttcacgcgcatgccggacagggattccagaatgccgtagtaggagtaggtctgcttgttgggcagggcgtgtgccacggtgaacgccatccaggaacgcatcttgccccaggaattcagaatcgccacgttgagctcgccttcggcggccaccccaccggtgcggtcgtggatgtcgcggaattcgtcggcgatatgggtcaccgtgtccacgaacttcgggaatttggcggccaaggagaggtagccaccgtagcccatacggccgatcggcgaacgcaggatcgcgcggcgggccttacgccagttgtcgaggccttcgatgctcgggtcgttaccctcgtagaacgtgtcggggaagaagtacggcaggaagcgtccttccgtgtatttgacgcccggaatgtccgcgatcatgcgggtggtggtgccgtctccgatggagccgacgaccgcatccaaacccagcttttcgaacccgtccttatacggttcggtaccgatccactggtcgccaaggaacatcatggcttccttgcctgccgcgtgcgacatgtcggcaagccgcttgacgttctcgcgcacgaatccggagaggaagtcaatccagtcgcgttgcgccttgcggggcacgcgccacgcggagttgtaggcaccgccatccacgaaatcctccggacgcagacggtaaccgtactccttctcgaaatcgtccaatgcgcgcgggctcacggtgcaggcgcaaccgaaccagtcgaccaccttttcgcgacgcttggcatcgaacaggagcgtgaactggtagaagaacgtggtgaaacgcaccacatccacctgcgggctgtccttcagccactgctcgaacgtatcgaacacgaacttgcgggtggccggatggtagatgtcgaacggaatctcgtgttccttgtctccccaatcattggtcaggtggttgtacatctcgaccgggtcccagatgatgtaggccaggaaactcaccgtgtattcgtgcatcggcacggcagcggtcacgtgcacggtgtcctcgcccgggtcgagcgtccagccggacgggtccacgacctcgcccgtggtgcggtccacgacttcccagtacttatgagggtcggcgtcacggttaggcttgagctgttcctcgaagaaaccgtccatcagcggcacatccaccgcgttggactcggccaggatacgggcggtcagcaggtagacctgcggggtctcgtccatgtgcagggtgatccactcgttgtgggcgcgggtcgggaagtaggcgctgtagattttcttgccaagagcgagcactgcctcgtccagatgcgtgccgtcggagttgcggatggcgtccgcaccccacaattcggcgagttccttggtcttttcggcaaaattctcttcactgggcagcgtgaagcggccggtgctggtcatgagtgctcctttgtggggttggtcatcaaaaaactacaaagcgacgaattcgtcgcatacaaaatgaccggcgtcatcgcgggccctgggaccctgactgcgtagatccttgacgcttacggtgacgccggacgattggaatcgtgtcactgaatatgggagggacgttgcccggcaccggaaggagtgacacgacatgccgggcagcggattggttagcccttgacggcaccggcggcgaggccggactgccagtagcgctggaggccgaggaacagcacgatcacgggcagcacgccgagcaacgcacccatcatcagggcgccgcgatcggtgaacgtggccagcgagaccatgccgtacagaccgagggtcacgggcttcaaggtgtcggaagacaccatcatcaacggcagcaggaagttgttccacgtggccacgaacaggaacaggaaaatcgtcaccatggccggggccaggagcctcagcacgatggtgaagaagatcctcgcctcgctcgcgccgtcgatgcgggcggcttcaagcagttcgtccggcaccgaactctgtgcgtacgtgcggcccaggaagaagccgaacggcgaaacgcagcacgggatgatgatcgagagcatagtgttggtcaggtgcaacgtgtggaagatcgagtacatcgggatggtcagcagggcggacggcatgagcatgcaggccataatgatgccgatggccgcgttcttgccgcggaagttgaattttgcggtggcgtagccagccatcacagacacgatggtgccgatcaatgccgagacgcccgagtagatcagggagttcagcacccagcgccagaagttgccacgagtccagccaagcagtttggaatagttagtggcgatggcattgggcagctggtcaagcggcacagcaaaccacatgccgttgctaccggtcatctgggccggcgtcttggtggacgcgatgatggcccagtaaatcgggaacaggaagtagatcaacaccagtaccagcagcaccacggtgagggtcttcacggccgcggacggtcgcatggagcgaggcaaatcgtgttgcgcagcctgacgctgcttttcgagcttgcgctcggcctttttgcgggcgcgttcttcaacggttgcggagctcattactcgttcaccttcctttcggccaaggtgtacagcacggcaagcacacctgcgatcagagccatgacaatggcgatggccgaggccggaccgtcaccagacggggtaatggtgccctgagaagtgttcatggccatcatcatcggtgtatacgacttggaaatacccggatcagccgtagacatgatctgcggttcgttgaacagctgaatggtgccgacgatggaaagcagcatggccagcagggccgcgccacgcacgttcggcagcttgatcttcgtggcaatctgccaaccattggcgccgtcgatacgggcggcctcatagaggtcatgcgggatggcctgcagtgcggcaaggaaaatcagcatgttgtagccggtgaaggtccatgtggtgatgttggccatcgagccgagcacgatgttcttgttgaagaagtccacattgacgccgatggcggcaagtcccttgacgatcggcgagatttggccgttgtacaggtagacccagataatcgaggccacgacgccggggatggcgtagggcaggaagtagcccagacggaaaccggtgacatgcttgaccacgaacgagtcgatgacgatggccaacgccagtgcggcgatgatcatgatcggcacctgaatcagggtgtagagcagcaccctgccgacgccggaccagaagttgccggaagtaatagcatactggaagttctggaatcctacgaatttattgaccagctcgccaccgccgtatgcgccaccgccctcggtgacctgacggaagaagctggaatagatggcccagatgatgggcaagatgaacacgaaagtgaacaggacggcgaacggtgccatgaacgcccagccggtgcggttctcgcgcttctgagcgccggaccgcttcggcttggcggcggcacgcctaggtgctttgcccttcgcctgagtagtggatgcagtcataatacaaaacctgtcttcgcaaagaacagtaaaacaaatgacaagggccacagcgcccctgcagcaatacccccaaacaatacggaaggccggagtatgtgccccggcctttcgctatggtgatgcgaggcatcggaggtcttggacggccggctatttcaagccggcccgttgacaagacctagtgaggtcactccttgacggacagaccgaggttcttcagcgtatccaccgaggtcttctgagcggtgtcgaacacatccgaaaccttggcagaaccatcggcagccttggcggcggtctgtttcattgcagcgccgactgcggagaagccaggcatgtaggtgaagtcacccatgttgtcgttcgcggtcttgaactcagccatgacatcctgtccgctgaagtagtcggaccacttctgcggggtcttggcatccgcggtggtggcggccacgacaaggccctgggagacaaggtcatcaacctgggtgttgaaccagtcaaggaactccatggcttcggccgggtgcttggaacccttgagcacggccacaccggaaccaccatcggcgccggtcttggtgccattgccgaaccagtcaccgagctgggtgaccttccactcaccagcaccagtgccaccggcggaatcgatgaacagtggggcttcccaagcggcggccacggtgccgatcagctgaccggactggatggagttatcaaacgatgcatcccaacgcgggttggtgagggcggccttgttgtcgatcagctgctggtagacatcggccacggccttggagcccttagtctgggtgttgacaacccaggagttgccgtcgaccttgtaccacggaccggaagcgccggcctggccggacatcatcatcatggcctcatcaggttggaaggtcatgatgtacttgccttgggcagcggtcttcttggcggtctcaatgagctcgtcagcggtcttcggcacggtgatgccgagcttctcaaattcagcggcgttgtagaagtaagtcagcgggccggtgtcctgcggcagaccgtaggtcttgccgtccacctgcatcagtgcgaacgggccggaagcgaaatcgtccttgtacttggcggcctcatcggtgacatcctgcagaaggcccttggtgaagacctcaggaacctcggagtaaccgacctgagccagatccggcgcattgccagccttgacgtcggtctcgagcttcttgatcatgtcggcggcattgccatcgaacttggtggccttgacctgaatgttcgggtgctccttgttccacttggccacaatgtcgttgaccaaggtcatgccttcggaatcgggcagacgatgcatataggtgatgttgaccacaccgccatcgctgccggacttcgtgtcgccggcagtgtcgctgccgccgcaaccggccaaaccaatacccattgctgctaccgcggcaagagcagccacgatgcgcttgttgtgcgataccatatctctactccttcctagtgaaatcatcacctcagcgtgatgactgattgctaatttaggcctttgctcttttattgtcaacttagctaacaattaccgcgcgtcccgttgaggtgagtggcattaaaccgattcgatgctcgattgtgcgggtttgttcatttcattaactccccttacaaagcaacgtacttttggtccaccggtagacctaatgagatattggatagcggcaacaatccaagacgttagcttgcaatcgtccaccacaaattgcaagcacttgccaacattatcggttttcaggttgccggcgcgatacccgactagggggggcaccgcgccttaatgagacgctacacgagcagtctcagcaactggtagagctgccacaggctacgcacgttgaagtgcgtgccgtcaaccgtggcgttcgcctcgccatcgcccacatggacgatcacggtgcgcccgttcacggtcagactaccgtgcatcgtgatatgattcatcttgcaaccttgttgattaaaggcgcaagccggtaatcaacgcaaaggcccgatgccgcaaacgtcgggccttttcttatcggctcacgccgattggcccgtcatatcaacggggacaccgcatgttacggcattacaaaccaatatatcagcaccccggtggcgatcaagaagacaggttccagaaaaagaaaaagggcctgggcatgttgcccaggcctcggttcgcggacagggcgagattcgaactcgcggagggttgcccctcaacggttttcaagaccgtctctttaggccgctcagacacctgtcctgatgcgcgttcacacgcgcaagtattcattatacagaagggagggatgttgatattcggcagtgcggtcggtcttggattcgcctgctggctattagcgatctctccctcagtcagctacgctgacagctcccccattaaagggagctaaagcacgatgagactcaggcctcccacttagtgggctcgatgacttccttgccgcccatgtaggcgcgcatggcctgcggaatctcgatggagccgtccttctgctggtggttctccatgatggcgaccagccaacgggtggtggccagcgtgccgttgagcgtggagaccggacgggtgccgccatcttccatacgctcgcggatgttcagacggcgagcctggtactcggtgcagttcgaggtggaggtgagctcgcggtagcggccctgggtcgggacccaggcctcgcagtcgaacttgcgggcggcggaggagccgaggtcgccggctgcggtgtcgatgatgcggtagggcacttcgaccttggcgagcatctcctgctccatggccagcaggtgctcgtgctccttgtaggagtcctcctgcttggcgtagacgaacatctccaccttgtcgaactggtggacgcggatgatgccggaagtgtccttgcctgcggcgccggcctcgcggcggtagcaggaggaccaaccgcagtagcgcagcgggccgttgccgaggtcgaggatctcgttctcgtgcatgccggcgagcgccacttcggaagtgccgaccaggtactggtcgtcgggctcgcgcagacggtagatctcgtcggcgtgggagttcaggaagccggtgccgcgcatgacctcggggcgcaccagcgtcggggtgatggccagcgtgaagccgtgctcctcggcctggtccacggccatggtgagcatggcgatctgcatacgggccacctggccacgcaggaagtagaagcgggagccgccgaccttgacgccgcggcgcatgtcgatgccggccacgccggtgccgagggtcaggtggtccttgggctcgaagccttcggccgcgaagtcgcgaatctggccgaccttcttgacgaccacgtagtcgtcctcgccgccttcgggagcttcgggctccacgatgttggagagcttccacatggcggtggtgtattcctcggcggcggaatcggccttggacttgtattcggagaccttctgggacagttccttggtctcggcgatgagcttggccttctcgtccgccggggcggaggcgaccttcttgccgatttccttctgctgggcgcgagcctcttcgaaggccttcagcgcctcacgacgtgcggtgtcggaggagagcacttcgtcgacgagttccacggactcgccgcgcttgcgctgggattccttgacgatatcggtgtgttcacggatgaattgaatatcaagcatgggcaccagactagccgcgtaagcagacaccgacaatggccgaatgcgcgggagtcacgcggaaatcacagggaagcccgggaaagtccgcggacgggtccacccggccaatttcgtcagatgagacgcgattgaaccataatcgcgccccacggggctgttgcgtgcaggaaatgttcacgtacggcgcaccatggccgcaaacgacctccccaccgataacaataggagccatgcctcagcctgccctcaccgtgtttctgatcatcgccgcaatcgccattgtggtggtgctcatcgccgtcatcgtcatcgccctgcgcgcgcagcgccgccgcaagctggctcagacgctggagaagcgccgggacgacgaggtgcagtacgccttcatcgtgaatccgtccaaaccgcaggccgaagcccgccggctgcatatccagaggttctgcgaggccaaggggctcaatcgcatccgcttctacgacacccagcttgacaaggacggcagggtctgcgcgcttgaggcgctggaggacggcgccgacgtggtgatcgcggtcggcggcgacggcacggtgcgcacggtggcgagcgccgtctccggcaccggccatgcgctgggcatcattcccatcggcaccggcaacctgtttgcccgcaatatgggcatccccgtggacgatatcgacgccgcactgaccgtggccacctcccacggctcccgcttggtggatatgggtcgtcttactttgctcgatcatccggaagacgaccacggccacgccttcctcatcatcgccggcatcggcttcgatgcggccatgatcgacgacaccaaccccgagctcaaggcgaacatcagctggctcgcctacttcgtgggcggcgtgaagaacctgttcgcgccgaagttccgcggcacgctgacagtcaccagcgccgacggctcgacccacaccatcaagaatctcgatttccgcacggtgatggccggcaactgcggccagattcccatgttctcgctgatgccggcggcatcctatgacgatggtctgctggacttcgaaatcatcgacaccaccggcggcatcctcggctgggccaacctgttcggcgacgtggtgcaccagacgatcatcggcaagcccgaacagaacccgctgtccacgaactcgaccatcgaacaggtccagggtgtcagtgccgaaatcacattggaaaagccggccaaagcgcaggtggacggtgacatgctgccggaaacccgccacatccgtttctcggtggatcaccgcgcgctgatcgtgcgcgtgcccgacgcctccgcgctggaaaagaccgcgcaggccgctgcttcaaatgccacctcgaatttcgccgaaatgaccggtacactcgagccgattcgctgattcgccaatccgctaatccgttactacgatgcgtggccggtgactcgggcgacatgcatcgccaaataagcgatttcgtcgtcgctgatatccgtgtcgaggcgcagttcgagcagggaggcgatggttcgcgcgcatcgcagcgcagcggggtaggactcacgaatcaccttcatcaccggtgccggctcgtccgtcagttgctggtgctggtggatgcgtacgaacagatagcgcaggtgggtgatgaaccggcccacgttcacggaactgcggtccaacgtgatgccgtagctgtggtcgatgatgtcaagcagttgctggatcacgcccgtcatcgtgtacgtataggacaggtcgccggtggcgaagccggcgttgaccagatgcatggcaagcgcggtggcctcgccgtccggcagcgtgacgtcgagccgtgcattgagcgatgcgagcatcgcacgcccctgcgcgtattcctgcgggtacaggttgctcacctcgccgagcagcgggtaggtgatgtcgatgccgcgccgcacccgctccaccgcattcgccacgtggtccgacagggccatgaccagcgtggtgctgccggtctcgcgctcccccagtccggtctcctgcatggattcgacgaccacgcggatgatttcgggcggaatgtccgccagcatctgcgccagatggtcagggtcgcgcccgtccgatggcacgaaggtgcgcacaactttcgactcgtcgaccgtctgccccggcttggcctggaaccccagtccgcggccggtgagaatcacctcaccgccgtcgccgcctttggcgagcacgacgttgttgttgaacactcgcagtatttccatggcatcctttcgcaacgtcattgttccacatcgatgatcgggctgccggctgatacggttttgcagtcgccgccgttgtcgtcgctgctactgtcgccgatcaacggcgtgaccacggtcagttcagcggcgttgaccaccgtcaccaccaccacaacgctgtgcccggccgccgcgactttgccgaaatccacggtggccagtggctctcccgccgcgatccgctcgcctttgcccacggccactacgaatccctcgccatccatattgacggtgtcaatgccgacatgaaccagcacttcgatgccgtcatcggttttaatgccgaaggcatggccggtccgggccacggttttcagcgtgccactgaccggtgctagcacagccgtctcgccggccgtctccggcacgacgcctacaccctcccccagcgcgcgggaggcgaacaccggatcgccagtcgcttccagattcatcaaccggccggcgaccggcgacaggatggcgttggagtcaggagtccgatcggaggcaggccgcgatggggaatcttccgcagactccgcatccgacgatgtcgcgccaatccctctcaccgcatcctgcgagcgtacgttctcgcccgccgagaccatctgcgcctccgtggcgcgcggcggcgtacggtacccgaacagcaccgtcagcaccatcgccattacaaacgcaacggcgatggacagcgcgtacacccacattctgtcaaacaccgaaatcgtcagcaacgaggagaaggcgaacgccgtggtcgtgacgccccggaccatctgaccggatggcagcacggacgggaacagccagccaagcaccgcgctggtcacgccgccggccgcgcagccggcgagcagccagcggtagacgcggcggtgatgcagatggatgccgtacaggctcagttccgaaacgccacccagcaatcccgcgagcaacgcccccaccgcggtctgccgcatggccgaatccttgccgcgtacggccagcacgagcacgccggcggtggcaccgaagcaggcaaagttccatacacccatcggaccttggacgaaatcgtagccgagcgcctgaatgttcatcagcatcagggcattcaacggccagtgcagaccgagcggcacgagaaacgggtagagcatcgggatgatgagcgcgaataggaacggcacgtgcgcgttaagccatgctgtggccgctcccagcccaccgccgagccatattcccagaggcccgatgaccagtatggtgagcgcaaaaacgacgaccagtgagaggaatggcacgaacaccagctgtacgctgtcgggaatgacgcgcttcaacccgtggtagaccacggcgagcacggcagccatgagcaacggcacgaagacgttgccgccgtagtcgttgagttgaatcggtatgccgaacgccgacacggtgcaggtttcggcgccgaatacggcgttggccgagcattgaatcgccccggagagggcgctggatacggacgtcccggacattccggacattccggacatcacgccagtaaactgcggggtcatcagcgcggccataatcgcgccgccgagccaggggtcgacgtccagtttcttggccgcattgtaggcgatcataatcggcagaacggtgaacacaccctcccaaatcgccttgagtagtatccagccggcggaggtctcgccgtcaggcacgatgccgagtgcaacgatcacgttgacgatggcgatgaccagcgaggcaccgagcagtacacccagaatcgggcggaacgagtcagacaggtagtcgaaaaacgcggcagcccaagcgcgggcggcactgccccactcgcggacggtacgaggcgtgaagtgacgggatgtattggatgggccgcaactttgttcggcgtcggtggcagtatcgcgcgatggtgcggcatcgtcggaaaggtacggcgcggactgcgcgggttgcgtgggctgtgtggattgcgctgactgcgcgggctgcgctggctgagtgggctgcattggctgagtgggctgcattggctgagtgggctgcattgactgagtgggttgcgttgactgcgacgctgactgcatcactgccgatggcaattgcgctgccggcatcaatcgcgccgtccgcagccgaacgatctgctcgtacaccgaggcgaccgctccgccgatgatgacctgataacgattgccggatcgcgggaatgcaccgaggactccggggatggattcaagaccgtgctggttgacatggccggcatcggccagttcgaagtgcagtcgcgtggcgcaatgggtcaggctggtaatgttcgcggggccgccgacggcatcgacgatgcgcgccgcaatcactgcaggcgttgcgttcgatgcgttcgccacggttcctccttgctgccgtatgccactgtgttccattatcggcgctgggtgccccaaaagcacggcaatgccggcaaagcatcgcgaaacggcaactatgcgctacggtgctccgcgatggtgtcccgccataatgttccgcgatgatgcttcgccacacccgttctccgtatttgccgcagcgcccattccgacatcattccaccatgcagaatcctgcaatcgttgtcaaaaatcatcgttttttgccgcctattcggagtgtcgcgactgcggaagtcgtattctatctttcacacacgttgcgtagcagggttgttactcaaaacgaggcaagacctggagcgacgtggaatttgcgtatcgtaatatgcgaattccacgttgttccaggtctttttttgttttcgggcgacttcagacaatcgaagcctgaccttgcacgcggcagaggggccacgcaacaggcgcggtccgtcaacggcgaaaggacaaggcaatgacgacgacaacggcatcacccgtatcgaaacagacggcatccgcggcgcaggaaaccagcgcaaccggtgcggcggccaccgcaatcgaaaccatcgaaaccggcgtggccggagtggcgggcgcggccacaaacgcggcagccaacgcaatcgaggacctcgaagccgccgaatcgcacggcttctccacgcgcttcccgctcaacagcgcattcatcttcaccttcggcgcgctcggcggcatgctgttcggtttcgacaccggcatcatctccggcgcctccccgcttatcgaatcggacttcggcctgagcgtctctcagaccggtttcatcacctcctcggtgctgatcggctcgtgcgcaggcgcgctgtcgatcggcgcactgtctgaccggttcggccgcaagaagctgctcatcgtctccgcgctgctgttcctgctcggctcaggcctgtgcgcctcctccaccggattcgcgatgatggtgtgcgcccgcatcatcctgggtctcgccgtcggcgcggcctccgccctgaccccggcgtacttggccgaactggcgccgaaggagcgtcgcggctcactgtccacgctgttccagctcatggtcaccttcggcattctgctggcctacgcctccaacctcggattcctgaaccacaacctcttcggcatccgcgactggcgctggatgctcggttcggcgctggtgccggccgccttgttgctgctcggcggcctgttgctgcccgaatccccgcgttatctggtgaacaagggcgacacccgcaacgccttcaaagtgcttacgctgattcgcaaggacgtggatcagacccaggtgcagattgagctggacgaaatcaaggccgtggccgcacaggacaccaagggtggtgtgcgcgaactgttccgtatcgctcgtccggcgctggtggccgccatcggtatcatgctgttccagcagctcgtgggcatcaactcggtgatctacttcctgccgcaggtgttcatcaagggcttcggcttccctgaaggcgacgcgatctgggtgtcggtgggcatcggcgtggtgaacttcgtgagcaccatcgtggccacgcttatcatggatcgtttcccgcgcaagggcatgctgatcttcggttccaccgtgatgaccgtttcgctcgcggtgctcgccgtgatgaacttcgtgggcgacgtggccatgctggcagtgccgacgatgattctcatcgctttctatatcctcggctttgcggtctcgtggggcccgatcgcctgggtgcttatcggcgagatcttcccgctgagcgtgcgcggcatcggctcatccttcggctcggcggcgaactggctgggcaacttcatcgtctcccagttcttcctcgtgctgctcgatgcgttcggcaacaatgtgggcggcccgttcgcgattttcggcgtgttctcggccctgtccatcccgttcgtgctgcgcttggtgcccgagaccaagggcaagtcgctggaggaaatcgagaaggaaatgaccaagcgctagacaaccggcacacgattcgcacaaaagttgacaactcttaacataagagtacccaaagtggcgaaaaacgtggcagaatagggaacatggtagcaaacaatgcgggtcagcccgccaccccagcagatctgattaatgtcgatgaggttatcggcaagtactatgacctcgtccccgatcccgaagtccccgagcagcgtgtcatcttcggcacctccggtcaccgcggatcgtccctgaagacctcgttcaacgaggcccacatcatcgccatctcccaggccatcgccgaataccgcaagaaggccggcgtcaccggcccgctgtacctcggctccgacacccacgcgctgtccggcccggccaagaagaccgccatcgaggtgctcgtcgccaacggcgtgcacgtgcgcgtcgactcccgtgacgacttcgtgcccaccccggtggtctcccaggccatcctgacccacaaccgtgcggtcgacggcacccagcgcttcgagggcgagggcctcgccgacggcatcgtcgtcacgccgtcccacaacccgcccaccgacggtggctttaagtacgaccccgtcaccggcggcccggccccggccgagaccaccaacgccatcgccgctcgcgccaacgagctgctcggcgacttcaagtccatcaagcgtgtgccctacgaggaggccatcaagtccgagtacgtcgagggcttcgacttccgcgagcactacgtggacgacctggagaacgtcatcgacttcgacgtgatccgcaactccggcgtgcgtctgggcatcgatccgctcggcggcgcttccgtgaactactggccgctcatcaacgagaagtacggcctgaacatcggcgtggtgcgtcctgaggtcgacccgacctggcgcttcatgaccatcgaccacgacggcaagattcgcatggacccgtcttccccgtacgccatgaagggcctggtcgacgagctcaacgccggcgcttgggacaagtacgatctggtcggcggcaccgacccggacgccgaccgtcacggcatcgtctgcccgaactggggcgtgatgaacccgaaccactacatcgccgtgtgcgtggagtacctgttcggcggcaaccgtccgggctggcctgagggcgcagccgtgggcaagacgctggtctcctcttccctgatcgaccgcgtggccgcatcgatcaacgcgaaggtcatcgaagtgccggtgggcttcaagtggttcgtggacccgctgttcagcggcgaagtcgccttcggcggcgaggagagctccggcatgagcttcctgcgcaaggatggccgcgtgtggaccaccgataaggatggtctgatccccgacctgctggccgccgagatcactgccaagaccggcaagaacccggcccagcttcaccaggagcaggtcgagcgcttcggcgagtcttggtacaagcgcgtcgacaccccgaccacactggagcagaaggccaagttcgcggcactgtccggcgacgacgtgaccgcctccaccctggctggcgaagacatcaccgccaagctgaccgaggcaccgggcaaccacgccaagatcggcggtctgaaggtcaccaccaaggacaactggttcgccgcccgcccctccggcaccgagaacatctacaaggtgtacgccgagtccttcgtctcccccgaggctctggacaaggtgctcgacgaggccaccgtcgtggtcgacaaggccctgagcgagtgaaatcactgcgttagtcgcgttcaccgcaaccaataaggctctgcattggattcatacaatccactgcagagcttttttagcgcatatgcagttcgcgaccactgaaacacgcaggtcaacggttctcctcatgcaccgtgactgcattttctcaacatcactgcagggcaggacggccagatgaccgcgaaacgttcgcctgcctaccatcatcattgtggggtcacagcggccagatgaccgccgaagcgttcggtcggcttgcatcatggtcgagttttaacatcgttgtgggacgccacgacgaatttgcccattccagagctgccatcccacaaaagcgtgggacaacagctaagtcaatcgttttacatttccccccatcccacacactcaaactggaaaccccggaaagacgccattcctgccacacccgtcacagccattacccgaggggccgtgggacgccacgcaaaaatcggcaaaacatgcgtagcgtcccacacccattggcgcaaatccacgcccaatgcaccgacaacacccccaatcgaccactatgacacatttccctccacaatcgaacactagtcattcacgaaatccatcactacgaggcatcgcaatcgaacggcatgcaatatcaagcacacaccacaacaacaggtcgcacaaatattgcctttacatcagtccgtttcggacatcatggtcacagcaggctctgcgccaactcttcaagagacatggctactacatgaaactcgaatacggcaccgcgcgaagcaagcgccctcgccacgttgaaagcgaattcagcacgagcatcctcgttagcgatacttgctgccgtggcgacgaagaccagccatctccgcccgaccagcacaccccttttctcttggtcacggcgccattgagtcttactcgtacgatgatgatcgccatcatattcaacagcgaccttgaactccggccacgctaagtccaacgttatgggagctccagatgcaaaagccgcgtccggcaccacatagttcgcaaccggccgtggaatcccatgcgctaccagagagagtcgttcttctgattctttgggcgaatcagcaccaggtgatatcagaggcaatgctcgaacgcaggacgggcgccctctgaatcgggtaaattgctccacgaacttcaccagatcctgatagattgcagcagcatcacgatccttggccaatactggctgtttgctcgtagcagcgatgacggcatccccgagcacaatcagggactcaaaagaaacatacggggcaagttgagcccatacgtgaaacaggtccagcgcaaacacgtgttggttcatttccacattgtcggctttagccgcatgtttccaaatatgcgtttgcagtggtgcatggcgtgtacgaaaccgcctgctcttaacgctggatacagtgtgcagcttggccgagtcgaggtcgcaatcggcgggaatcggtacggattgcagagcgagggaagtggtcatgccgaaaagcagcttcttgcccgcccgtttcgcttcctcagtgcagcgtgcgaccatgtcgcgtctgcgctgggcgaggctttcgctcatggtcggtgtcgctgcagaatcatgtgcaccactgttcggcgatgacgagtcgcgagaagtcgggtatttcgagtcagtagaaaatgatcccgcaaattcgggcggaacaaaaactgcctccgattcttccggaggctgatcgtatatagagcctggcagagctccatagttggtgatgccgtcggtcatcctgttcatgacaccaccatatgggtagtgggtgcggaaacggaagccgatccgaggtatgtggtcctagcttcacttacgcacattcattgtggataaccatgtggacacctcacttatacacatagtcatccacctcttcaaccccgatttgacacactaactgtatctgatatgattacagtatcataactgtacacatcatagttacagtatcgactcggtaaggaggtcgtttcatgaacggcgaccattcactggcagtgcacgcattggtctaccttgaccatcgcgccacacacctgcccagtcagatcctggccgagaacatatgcaccaatgcggcgcgcgtgcgcaaagtaatgcgaccgctcgcctcagccggactcatcgccactaaagagggtgctgaaggcgggtacgctctggcccggcccgccgccgaaatcactttgcgcgcggtagcggaagccaccggcaccacttttgtgaaagtgaactggacaccgggcgacgtacacgaggactgtctggtgtcatcttcaatgggcgcagtgatgaacgacatctatgccgggctcaaccgcacttgcctcgaacaactcgaacacaccaccatccacgacatcaccgaacagatattcagcgagcgcaaaggccaataatcccgcgcgtttcccctagccagcatcagtcgataacgcttcggcagtcaaagaagaaaacagacgccgcacggcacacaacacatcagcacaacgcactcttatcactcgaatacgtaaggaagtaaccatgtccatcagcacacccaatgccatcagcacacccagcacctcccccactatcaccaccgacgccctgatcattggattcggcaagggcggcaaaaccttggctgccaagctcagtgcagccggccgcaaggtcgtcgtcgccgaggcaagcgccgacatgtacggcggcacctgcatcaatatcggatgcttgccgtccaagtcactgattttgtccgccgaacaggcgcggcgggatggcgcgaacagtactcccgaaacccgcgaagcagcgttcgaggctgctatcaaggagaagcgccgcgtcacttcgatgctgcgcgacaagaactatcacaagctcgccgaccaagacaacatcaccgtaatcaccggccgcgctcacttcaccggccctcatagcgtggaaatcgccaccgctgagggcccggtcgccgtgaccgccagcaagatcttcatcaataccggtgccacgccgcgcattccggatattcccggtatccacactacgcccggcgtctacaccagcactggactgatggatctcgacgatatgccgcagcgactggtgattatcggttcaggattcattggacttgagtttgcctcgatgtttgccgatttcggcacggcggttaccgtgctgcagcacaatgccgagttcctgccgcgcgaggatgcggatgtggcggccgcgattcgcgcacagttggaagcgcagggcgtcaagttcctgttcaacgcggataccaaggccatcgcgcctgctgctgacggcggcgtcaggttgtccgttgcggtgaagggtatgactcgcggcgcatcgcaagcttgcgattccacccccgccggcaccgggaacgctcataccgatatcaccggtgccaccgacgccaccggcgccaccggcgccaccgacactacaacaaccaccagccccactagcaacccgaccgatcacgccacgatgtcacacgttcaaacgaaaccatcagacgatggcgagccgcggttcgccgagccggctgaagcccgattctgcctgaccaccgacgcggtactggtggccaccggacgtacgccgaacgtcgagggactgcatcttgaggcagctggcgtggagctcaccgaacgcggtgccgtgaaagtcgacgagcttctgcgcaccacagcagccgacatttgggctctgggcgatgtgaacggcggcccgcagcacacgtacatttcgctggatgactatcgcgtggtgtggtcgcagctcaatggttccgaccgtccgtacacggtgaaggaccgcaagcatgtgccgtcgagcacattcctcgccacgccttactcgcgcgtgggattgaatgagcgcgaggcgaaggcggccggattggattatgtggtcaagcgattgccggtggccgctgtgccgaaggcccaggtaatgcggcgaccggatggtctgatgaaggcgattgtggaacgcaatactggccgcattctgggtgcgatgctgctttccgtcgagtcgcacgaggtgatcaatatcgtcaagttggcgatggatcttgacgcgccggccagcacgttgcgcgatatggtgttcacgcatccgacgattgccgaggcactgaacgacttgttcgcgtagtttgttcgcatagcacgcccgcgcagcatgacccgcgtagcgcagcccgcaacagactcccctaatgcgcgcgaaggtcctcatcgacgtaaaccgatgaggaccttcgcgctgtcgtcatgatccgtatgtgacagcaatcacgtccgaaccagccgttacttcaagccgagcttacggtccagaatgtcggaggcatccaatcccaagcggcgtcggatgaaccagccaagaccgagcggcaggccgggagccaaggccatgccgcctggaccgagtgccatggttttggagttgcctgcgataagcatggtgcccttggatgcggccgtggaggtcgaaccatcgctgtccgcctctggtttgaggatttcgatgttgccgtcactggttttgtacagtcccttattctcattccagataccggatgcgccattgttgccggcctcacccgcagagaggaaatgtcttgtttttcttgtgagcgctcacctattcacgcgcgatggcatgtttttcaagcaaagtcaataggtgtgatgttattcacactcttcactacgttgttttgcctcgcactgggcaaccccacttcagcaagagattgcacagcttgcgttagggtggagaacatgactatcacagtatccacagatgggtccgcattagggaatccaaacgggccaatgggctgggcctgggccgatcatgagcagaacgccggcggcaagcccggccataagcacgacgaccatggttatgatgcgggcggcgcgaccaacggcaccaatcagattggtgagctgtgcgcagtgctggaagctttgcgagcgcacccgggccctgagccattgctcatcgaatcggattcgcagtacgccatcaattgctcgaccaagtgggtcaaaggctggaagaagaacggctggaaaaattcgcagaaaaagcctgtgaagaacaaagagcttattcaggcgatcgaccgtgagatctcacaacgccctggcccggtggatttccgatgggtcaaaggtcacgccggcaacgagggcaatgagttggtcgatgaactggcacgcacctatgcgggcgattgccgttcgggtgcgcgcgacggctatctgccgattgaaggctggcagtcgctactgggctccgaatacgcacatggcaccgatgtgcctccagacgtgcagttggtgctggatggcaaggcggatgcggcaagtttgcgcaagccggctgcggcgacggattcgacggatgccacaaggccagagaccaagtcttcgtcacccttagcgacacaatcagcgcaacctgtacaatcagcgcaccccgtacaccccgcaaagccaagcggactgacggtatccggtacgctgaccttctcccccgcgccgaaaacgagcccgtatttcaacgggcagccgatgccgatcaaaggcagcatcgaaatcgaaggctatgtggacggcgacggcaacctgaccatcgccaacgcaccattcgtacgacactaacacccaaacacacgaatatgtaccgcaatcggacacgatgacacaaaatcgctcattcgcgttaggataggagataaggcttcacgccgttgatccatgcggcggaggcaaggatggcaaaggagaaaccatggataaggcacagcaggatgcgctgaagaaggcggccggcatcgaagccgccaaactcgttgaaaacggcatgatcgcaggcctcggcactggttcgaccgtgaagttcctggtggacgagctcggccgccgtcatcaggaggaaggtcttgagttcactggcgtaaccacgtctcgccgcacgcaggtccaggctgaaagctacggcatcaagatcgtggacatcgacgacgtggaccacatcgacgtgaccattgacggcgccgacgaagtcgacaagaacttcaacggtatcaagggcggtggcgctgctctgctgtgggagaagatcgtggccaccaactccaaccagatcgtgtggattgtggacgagtccaaggttgtggacaccatcggcaagttcccgctgccggtcgaggtcattccgttcggcgctggccacgtcatcaagaagttcgaggaccgcggctacaagccggtgcttcgtcttgacgccgatggcaaggaagtgcgcaccgacgagaacaacttcgtggtggacctgcacctggagcgcatcgatcacccgcaggagctggccgaagacctcatcaacacggtcggcgtggtggagcacggcctgttcctcaacatggtcgacaaggtcatcgtcggcgacccgaacggcccgcgcgtgttgaccaacgccaacaagtgatcgtctcacatcactgaacttttccaagcccgcatctgtacatcgcaggtgcgggctttactgttgcccgaacaaggcaaaggagccaaaaagagaaaccccgcgaccataacgatcacggggtttctaatgccttgattgcaggtaagactacttacgctggtggcgggtcttacgcagcagtttgcggtgcttcttcttgctcatccgcttgcggcgcttcttgatgacagaacccatctgaagcctccatttcgattaatcgtaaaagttgcaacttgcaccataatacacgtgttgccagacagaggaaaccagtatgttgtcgatagtccgcatatgccctgaacgcagttggggcatccacatcagcaatgtggatgccccaacgttcataagtttgtgcagcagctgacagccgatactagatactacatcgggaacttctggtagaagcgatcgaccgcttccttggtgccggtagcttggaagaccacggtatcgttctgccagatggcagcggcgttcttgctgttggaggcatcggccttcaccacgtacgcgcccgtgacgttgccggaaaccttgacgttgccggatgccgactcatcgccggtctgcgcagcgaccaacgcatcgtactgggtcttggcattgtccgccgacgaccactgcgcggcgaccagcgtgacatccttggcggcatcaccagtggagtaggtcagagtgtactcctcgagcggcgacgcggaattccacgtcgtggaggcatccgccttggtacgcgcgtaattcagcacgctgtccggcatggccttcaacagctcactggcatcatccggcaaagctgtggcgtcgatggtcggcttggtcggctcggatgattcggttttctgctggctgttttgggtggtagtggaggtgccatcattcttctggatggcccaacccggccacacaaaggccgaaagcactgccaggataatcacaacagctgcggcaaccaccactgcaatcaacttgccatgggattgtgtggtcgaggagttctcactattagtcatgccccgattctctcacagccgcgtgacgctaggcggccgtaatcttagtcgttgtgcgcaagccgcgtgaaactcttgtgaacggtaaaaatttaccgtccgctggtgtttgggttagggtgagaccatggcgaaatcaagtgtgcagtatgcatgttccgaatgcggttggaacgggccgaagtggtacggccgttgccccgagtgtggtcagtggggcacggtcgaggaatttcacgaggctcggccggcggcaggctctcgcacggccgctcccggccgaacatcgcgcacgcagtcggttacggttgccgacaacgccagatctgcagcccgtccgattaccgaagtgggcacggaaagcgtcgagcggctcggtaccgggttttccgaattcgaccgtgtgctcggcggtggcgtggtgccgggttcagtgacgctgatagcgggcgaaccgggtatcggcaagtcgacattgctgttgcagacggccggcaatatcgcgcgcgttgtggcgggagacagtacattccgaggagccggtcagcggtctgcccaacagtcgggccgggcgcagggcggcacatcaaacacgatgtcggtacagggcaacgcaccgtcggtacatgccaataccgtgctgtacatttccggcgaggaatcacaggcgcaggttcgtttgcgcgcttcccgcatcaacgcggtggagccgaacttgttactggcctccaccaccgatctgtccacagtattggggctgatcgaacagaacaagccggccttggccattgtggattcggcgcagaccatcgtctcgcaggaggtcgatggcatttccggcggttcgactcaggtgcgcgaagtggcaagcgcgctgatagataccgctaagacgcttgacattccggtatttctggttggtcatgtgaccaaggacggttcgattgcaggcccgcgcacattggagcatctggtcgatgtggtctgccaattcgaaggcgacagcgagaccgcgctgagaatgttgcgagcggtgaagaatcgttttggtccgaccgatgaagtcggctgtttcgacatgagcggtgagggcatcgaagaggtcaccgatcccgccggattgttcctgtctggagacggccctgatgcggccaacgcggcacccatggaaggcacctgtgtgacgttcacattggatgggcatcgcagtctgcctatcgaagtacaggctctggtcaccacgtcggtgctgcccacacctcgacgtgcggtcaatggcgtggaccccagccgtatcgccatgctggtcgcggtgctctaccgtcacagcaagctcaacctgctgtccaacgacctgtatatctccactattgccgggggccaggccaaggagcccggttccgatttggcgatagtggcggcactggcgagcgccgccacgtcaaaacccattgcgcgagccacgtgcgccattggcgagatttccctgaccggtcaggtgcgcccggtaccgcgtatggaatatcgccttcgcgaggccgcgcgccttggctttacgacggcagtcattcctccgctgcgcaagccggtgcatgtcgagggacttcggctggtggagtccaacacattgtccgacgccttagatgccttgggagtgcgtaaatagccctgagatatgcctcaggcggtaagacgcttggtctcttcgacgttgcgcttgagttcgtcaacgagttggtcgggaccatcaaacttgacctgcgggcgcaggaaaccgacgaattcaacgcgaaccttatggtcgtacagatcaatccactcatcggtgatgcaataggcctccaccacgcgttcgttgagtcctgttttctcgctgaaggtgggtttggtgccaatggagatggcggcaggccagcggttctcaccatctaccagccaaccggcatagacgccgtcgaccggaatgtagcctgcaatgtcggagccaagattggcggtggggaatccgatggtgcggccgcgctcctcaccgtgtaccacttcgccttcgatggcgtgcggagcacccagaatggcgttggcatcctggattcggccatgagccagcaggtagcgcacattggtggagctccaggcgcgcattgccttggcctggttcttcttgctccatgcgcggcgctcggccttggtggcattggccagcgggtcgacgggctctccccattcgctcggggcttccggcttgaaatcgcgcggaatgcgcacttcacccgggccacggtcatcgaccacatcaagttcgaatacaccggtggcggcggcaagattggcgatatgcttcacatcaccttctcgccccttgcccatggcggcatcctgcccgaggaccagcgtacgcatgcccagcttgccggtgagtctgccaaggaagaaaatgtatgacatggctgcgaaggccagcgtgtagtgcaccaccaacacatggtccacgccgaactgttccatgcggtgcagtcgatcatccacactggtcaaggcttcggcatccacgttctgcaccgcgggttcctcgccatggtgcgaggcggcccagccgtgcacgaatgcggggcgcgggtcaaacagaatcaccacggaaaaagcatcatgctggtgcgcgagttccaccacacgcttgatcaccgcctgatgtcccaagtgcatgccatcaaatgcgcccaatgtcaccacggccttcttgtcgttactgaacgagggccattcaatcgaaccttcggcgtcaggggtcaggtgcgtgatatccatcagtgtgctgttccttttatccgtgcgatgttattcatgcaatataggcgttgttgtgcgcggcctgtatcaagctgcacttttcaccgcgtctactttacgcgagggggaatacggtgaccggcttggcctgatgagcgttggcacgctcgataatcgccgccacatcatgcgtttgcggcacaatggcggcagtgggctcgctgattgtacgctcgatacggcggccgaagcgcaattcgctggcttcctcaggtgtgatgtcaagcgccggcatcgcgcctcgagcggcctgttccatggtgagggcatggtcaagcagccagttgcggcgctcgtcaccggcaagaccttcaggagtgttcaatacgcacttgttgcgcgtgacggtttgcccttcccgattagtgaacgtcttctgatcggtatgtgcggtgacggtatgggttcgcgtgtcaagcatcgcctcagaggcgataagtccgctagtatcgtccggcaacgcgaatcggccgactcgcgtacgacgcaaacgggtcaggtatccgccgacgccaagttcattgccgaggtcgcgggcgagcgcgcggatataggtgcccgatgaacagctgacccgcacgtcaatatcaagtgcgggaatcgttcccgtgttcgcgtcttcccgcaatggttcagcggcctgctcccctgctacgaatccgctgcggatatccagcacggtgaattcgctgatggtcaccaggcggggtttgagttccacatccttgccttcgcgagccaagtcgtaggcacgctggccgttgattttgatggcggagaacgtattgggtacttgttcgatatcgccggtgaaattggtggcgatggtgcgagtgagcaggttttgccatgaggcagttggtgacgccgttggttcgccgctctggccgccctcagtcagctgcgctgacagcgtttgccagcgggagcgggcttcatcatcgacaagcgcctcgccttcggcatcgtcggtagtggtgcgcaggccgaggcgtatggtggcctcgtaggttttgtcatgcgccacgatggcgttgagcagtcgcgtggcgtggccgaaggcgatgaccagcgtgccagtggccatggggtcaagggtgccggcgtgaccgaccttcttgatgtgcaacgcgccgcgcacggcggcgacggcgtcgaaactggtcacgccttgcggcttgtcgatgatgagtaggccgctgggtgttgtatgaagcacactactcctcgtcggactcgaactcatcgccctcggcttcggcctcgtcgtcgtgcttgtacggatcggcgtcgccggcgtactgggcggtggcgcgggcgcgggcgagttcttcgtcacgcttcttggccacggcgagaatgtcttcgatctcgtgagcctcgccgggcacttcatcgaacacgaattggagctgcggagtcaggcgcaggccagccttgtggcccaccagagaacgcaggtgacccttggcctgatcgagcgcctgctgggcgcgcttgcgttcgccttcctcgtggccttcgtggccgagctgggtccagtagaccttggcgatctgcagatcgttggtcacacgaacttcggtgacggtgatgctggcgagtcgcttgtcatgcagttcgcgctcaatggaggaggcgacgacacgctgaatcaaggccgcaatacgtgcggcgcgcgggttggttcctgccataggaatttccttttctagacttgagccccctctgacgaggggctgccgaacgcagtgaggctgggggagagaaaatcatggaactaccatgtctctcccccagtcagcctgcggctgacagcccactcgtcagagagggcttaacaatgactacttgcgctcgacttcctgcatctcgaaggtctcgatgatgtcgccgagttcaatgtcgttgaaggtgccgaggttgataccagcctcgtagccttccttgacggactgaacgtcgtccttgaagcgacgcagcgaggagatctcgaggtcgttgaccgtggccacgccgttgcgcaggatacggcacttcgtaccacgcttgacctcgccgtcctgcaccatgacgccggcgatgttgccgaacttggaggagcggaagatctcgcggatctcggagtgagaggtgacgacctcttcgtattccggcttgagcatgcccttgagggatgcctcgatgtcttcgatcgcacggtagatgaccgagtagtacttgatctccacgccctcgcgctcggcgaggtccgccacctgacggttcgggcgcacgttgaagccgatgataacggccttgtcgaccgtggccaggttgacatcattctgggtgatcgcaccgacgccgcggtggatgacctggatgccgacctcgtcggatacctcgatcttcatcaaggaatcctcgagcgcctcgaccgaaccggacgaatcgcccttgatgacaatattgagcatgtcgatctcggactcggcgaacttcttcttgaagtcctcgagggagacgaccttgcgacgcttggccagctgggcggcacgctcggtggcctgacgcttctcggcgatctggcgagcggcacgatcatcggaggcgaccaggaagaggtcaccggcggtcggcacggaggtcaagcccagcacctgaacaggagtggacggaccggccgcttccatcggctgaccgttctcgtcgagcatggcacgcacgcggccgtacgaagtgccggccacgatggcatcgcccacgtggagcgtaccctgctgaaccagcacggtggccacggcaccacgacccttgtcgagtcgggcttcgacggtggcaccacgggcgtccatgtcggggttggcgcggaggtccagctcagcgtcagccgtgagcagcacggcttcgagcagcttgtcgacgtgcaggttctgcttggcggagatgtcgacgaacatggtgtcgccaccatactcttcagggaccaggccgaactcggtgagctggccgcggaccttctccgggttggcaccgggcacatcgatcttgttgacggccacgacgatcggcaccttggcggcctgagcgtggttgatggcctcaacggtctggggcatcacaccatcgtcggcggcgaccacgaggatcgcgacgtcggtgagctcggcaccacgggcacgcatggcggtgaacgcctcgtggccaggggtatcgaggaaggtgatcttgcgcggttcgccttcaaggttcacggtgacctggtaggcaccgatgcgctgggtaatgccgccggcctcacgtgcgatgacgttggtcttgcggatggtatccagcagtcgtgtcttaccgtggtcgacgtggcccatgacggtgacgaccggcgggcgaggcttgagatcctcgtcatcctgcagttcttcctcgtcaaggttgatgtcgaactgctggagcagttccttgtcttcctcttctgcggagacgagctggatgttccagccgatctcttcgcccagaatctggaaggtctcctcatccaaggactgggtggcggtagccatctgacccaggtggaagagcacggtgaccagcgcggcctggttgacgttgatcttctccgccagatcggccagggaagcgccctgacgcagacggatggtctgaccgttgccgttggggatgcgaacgccgccgatggtcggtgccttcagctcctcatactcatggcgctttgccaggcggttcttacgggccttcgaggacttaccgccctgacgtccgaatgcacctgcggcaccgccgcgaccgccgcgaccgccgccacgtgcgggaccgttgctcggtgcgccgccgccctggaagttattgccgccgccttggcccccacggaagccgccgcgtgcgccgccctgaccggcaccctgggagccgccgccctggcccggacggttgtggccccactggccgggacgaggaccgccctgaccaccttggcccggacgaccgccacggaagccgcggccctgcccctggccttggccgggacggcccggacgaccgccacgaccgctatcagcagtcggacgagccatcggatgcggacgcggaatatcacccggcgtcggggtgtgcataccctgcttgcgggagaacgggttgttgcccgggcgcgggccctgagcgtgcgggcgcggaatcgcgtttgaagcggcattgccgccattggcaccggcgccgccctgagcgtgcgggcgcggagccgaagcattgtcgcggttgttctgatgctgccccggctggccattgttcggacggccctggttgttacgacgatcgttgttacggcgatcgttcgggcgactctgacgaccgttctcgcggccttcgcgattatcgcgaccattctcacggttgtcgtgctgaccgtggcggccgggggtcggcatgccggggcgtgcgccgccctgcggacgcggtgtcggtgcgcccggagtcggagcctgctgatgtgccgaggcgggcgatgcctgacgtgcgggagcggccggagtcggtgcggaagatgaagtggaagccggggccgaaggtgcggccgggcggcgctgctgcacgggcttggcagcaggcttttgtacggaagatgcgggcttggaatcgcccttggcgttgtccttggcgaactctgccttcagacgccgggctaccggcggttcaatcgtagaagaagcggacttgacgaattctcccatgtccttaagcttctcaagcacggttttgctatcgacattcaaaaccttagccagttcgtatacgcgtggtttcgccactaattactcctattctgtgaccacgcgcgtgcatgggcgtggtcagttggtgatgacggcaagcctaccctgtctcatcgtgcgaccatgatcgtgttacctcgtctctggtgtgggcgatttcgcgcacactgcaccagcccacatacgccaatcaagcatactcatagcgctggatagcgcagacgcagcgagccgcgccattgctgacgcggctcgtatcaggaaataatgcgccctgaagatcattcgccttcgagcccggcggcctattcggcttccggagcagcagcctcggccgcagcctgggcggccttttcagcggcgaccttcttggcatgggcctcggcggattcgatgccgatcttccagccggtcagcttggctgccagtcgtgcgttctggccttccttgccgatggccagggatagctggtcgtcgtggatgaaggcgatggcggtcttgttcttctcgctgatcacctgtacgccggtggccacagccggggacagcgcggctgccacgaacttggccggatcgtcggagtagtcgacgatgtcgatcttctccgggccaaggttctccataacggcacgcacgcgagcgccgccggggccgatcagcgcacccttcgggttcacgccatcggtgttggccttgaccgcgatcttggtgcgggcgccggcctcacgagcgatggccatgatggacacggcaccggagaccagttccggcacttcacgctcgaacagcttgcggaccagctccgggtgggagcgggacaccacgatttccgggcccttgatgccacgggccacgttcaccacgtacacgcggatgcgttcgccgtggcggtaacgttcgccgggcacctgctcacggcgaggcagaatggcttcgacatcgcccatcgcgacatgcacgttggaggggtcggaagcatcctgttggatgatgccggtgatgagcttgcccttctgaccggagaacgcgccgaataccttctcatcttcggcgcggcggaacagctgggtgatgacctggcgtgcagtggcggcggcgagacggccgaagtcacgcggggtgtcgtcgtattcctcgcccagcttgggagcggggtgcgggtcgtcctcggtgggctcgaccgggatttcgtcggcggcccagacggtgaagttgccggaacgttcgtcaagctccacacgcgcgtgcctggcggcgtgcggggtcttgaggtaggcgaggcgcagggcctctgccagcgcatcatccagggttccggggtcgattccttgctcggcggcgagcttgtgtattcctgtcaggtccagttccatcgatccgtacctcctatgaagttatgcggcgcatggcctatgagtggtcacagttagctattagtgtaggtttccatgcagacacgcttctcttcaggacggtttacccggcgcttggcatccgcactatgcgcgagcgcgatgctgtgttcgctttcggcgtgttcgatgccgcgactggccggacgggccgaggcggaagctcaaatgagcccttgcgagaaagcgatgacgttggcggactacgccacccatccggctgaaggcacgccgttattagagcagtatgccaccggcctggccgctcccctgacttggattgacgttgccgggtattgttcgggtcgttttgccgagggaacgttacgtgacgcgcagaccaagcaatggctggcttttctggccgataaattcgggcagtccgcgcctgaggtgacgccggcgcgtcttgatggcgtcacgtccgccaacgttgaccgaccggtattggatgcgatggccgtggccgaggatcgcgccggattcgctatcgaggtcttggccgcacgaggacagaccgctggggctacgttggcgttgagcgatatgcataagaccgccgggcagcagctggtgtcgctggcgaacggcaattttgatgattccggcgcacagtccagttcttccggccagagcgacccccgccaaaaggtctatgccatcgaccaactactggccaaccccaccaccatcgccgacaaggcaagcggccagaccgtaccgaccgccgccgccatcgaaatggactgcgcccgcgcgcagatcaaggccgtgaccgaatcgaaatcttccaccgagagcgatacgctgctcatcctcgccgcactggccgccaagcacgcctacaccgcgttccaacttggctacccagcgactgacgccgcattgttcgagtagtttcgcagtaaccgttttcgtgaaccatagtccggtagacgcgatgccgttcaacaattcaacaggtaaaacacctgtattcgtatgcattacgcatcgcaccaagcaactgctggcacgagacctatacgctacaaccgagtggaaccacgctctataagctcgaaatcagtgcaatacgtgcgtattggcccctcgtagccctgaatacgttcaatcaacatatctatgccgcacttcacgtaatcgctcacatgcggatctacggtggtgagtgacggattggagaattgagcttctggcacattgtcgtatccaataagctgcacatcttccggcacatgaagaccattcgcctcaagaccatgcaacacgccaatcgccatagcatcgttcaggcagacaatcgcatccggccgtaccccctgcttcaacatgtgattaacggcacgcacaccactgtcgctcatcattaggccccacgaaaacagcatatccatgtccggacgtagtcctcgttcttcgaaagcaagaatgtacccacgaacacgcatctcctgtgtgccttcagtagcgttcatatagtagtcgtaatcgcggttgccctcgcatgcaccgaacagcgcgatgttccggcaccccgcatcaagcaaacggccggttgcctgccgcacaccttcgacattgggcatggtcactttatcgactctgtcatatgtttcatagtcgctagcaacaaccaacggatacggctgctccagtaacgcgccttcattggcaaggggctggtcaatgaatacgaaccatccatcaggtgccaacatggcggcattatccataaccgatgccagtccagcaccgccttggccatatgtattaacgattacgccatacccacgctgacgcgcatagtcgataacctgatcagatagatagggagcaaaaggctgcgagaaatcaaaaatagatagtcctatcagaccggtcgtgccggttttcagcgaccgggccgacaagttaaccgtatatccgagtttgacaatggcattttcaacacgttctcgcgtggagtcacgcatactgccagtactgttgagcacattggaaacggttttgaacgaaacgcccgcttctttggccacatctttgatggtcacatgcctaggcattattcactccttaacaatttgctcattattcacattgtaattacggtttaccttcaataatgccactatgacaacgagcccgacacacatcgaaagaagcgaaggatgtgcgtcgggctcgtcgagagcgaaggcgggccgaaggagaagacccgccaagtcgtcaggatttcacagaaccggccgtaagacctcccacccagtagcgctgaaggaagagaaaggccagcaccatcgggatgatggatatgaacgcaccggacgtgaccaaattccacacctgttcagaagccgcaccagcctgggacttgacctgccactgcgtcagaccaacagtgatggggaataacttgttgttcgtcaacactacctgcggcaggaagaagttattccaagctcccaccgtggacagcagatataccgtggtgatggctggggtcataatcggcagcgacacctggaagaacgtgcgcagctcgccggcaccatccacacgggcggcctcgatcatctcgtcgggcaacgattcctggcagtagatacgcatgaggtacacgcccatggggttgagcagcgagggaagcaacacggcccaaactgtatcaacgatatcgatattcgacatcagcaggaaggtggggatgaccaacgcggtgttcgggatcatcagagctgcgagcaccagattgaagaacatcttcttgccacggaagcggaacttagcgaagccatagccggcgagaacggcaaccgtggttgcgcccagtccaccgaccaacgcatacaggaaggagttgagaatccaacgccagtagatgccaccctgataggtggtcagctgcttgatgttgtcgaataacgcgaacttgtcgtcaaaccacagtgaaccgtgcgcgccaaagaacaagccgttattggtcttggtggaggcaacgataagccaccacaccggaatgaggaagtaaacgatggcaaggcagaacactacaatcgtaaacactctcgaattgccacgaatgtgattggccttagcagctttgcgtgcattcttagccatgtcagtcctccaatcccgattggttcttcgtcagtttcataaagacgacgctaaagataacgacgatgagtcccaaggcgaacgaaaccgtcgccgcatagttgggctggttgtagttgaacgccagtgcctgtgcatacatgttcggcgtgtattccggctgtatggccgtcggtgcctgattgcgcagtaccgtcggttccgtgtagaactgcaaggttccgattagggagaagatggtcaccataaccatcgagctggagcacatcggaatcttgactcgtgtggcgatctgcagttccgtagcaccatcgattcgcgcggactcatacagctcatgcggaaccgattgaagtgccgaatacagaatcaccatgtagtagccggtccactgccaagtaaccacattgaccaacgcgccgaaaattccatcaggagtgaggaagccaggcgtaggcagtccgaacaactcgaaaaacgtggtaaatggacccatgttgttggagtacatgaagccccacatcaacgctccgaccacgcctggaatcgcgtacggcaggaaaatgaccaaacgagtcacggatgcgaagcggtttttgagggagtcgagcagcagagcgaagaacaaggccaggccaagctgaatcggaaccataaccaccgtgtatagaatcacgcgccccatgcccttaaggaacaacgggtcagtgaacaccctctggtaattcgacaaaccggtgaattggacgccgaacacgttggatgtgaacagcgacataacgaatgcatatacgaggggcactacgaggaaaatcacgaaaatcacgcaaaatggagcagtgaacagccatccccagatattgccgcgacgagtgacgataccgtctttactaacggtctttgttgcgtttttacccatgtgtatctccaataatcaggtgaagaagctgcgggccgagccggttggcttcggagccgttggcccagcccgcaactcacctgctgtcagggttattcgacagtgtaaccctgctgcttggcgtagttgttgagcgtctcatcgaggctcttgaggttgctggtggtatccttgccatccttgacgatgctagtgaacgtctttacctgctcgtcgtatgcgtaggtctggaagggcaggaatgagtagcccttgtaaccctcagccgtgggaatggtgatctcgttgagcttctgcccgccgaggaactcctcctccatgttcttgaagctgtcggactgcagcttcttggtccaagccgggaacaggccgccatcggtaacaccgatttcctgagccttgtcggaatcgaacagctctcgtgccaccttgtatgcggcttcggtgtccttggcctgatcggttacggcccaagcggaaccgccttggttcaccatcggggtggagtcatcccacaccggggcattgtagatgcggaactgaccattggtgtcgccggcacccttcagatagccggtctgccacgaagcctgcacccatgtggcgtacttgccgccaagaatgttggtggtccagtcgttcgtgttggcatcagtggtgtctacgaggccctctttgacgaggttctgccagtagccgagcacttccttgactccatcggtgttgaagttcaccgaggccttggtgggatcagacgccgagtagttgtagacgttctgattcttctgcgcgaacagtgcaatgttgaacgcggtgccattcggcgcgaaatcagtcaggtagccgtcgtatccggctgccttgaggtccttgccggcctgctcgaactcagcccaggtggtcggcaccttgacgttgtacttgtcgaagatgtcctggcgcacatacatgacgaatggtccaaggtcgacgggaacaccgtaaaccttgtcttcagaacccagctgaacgctcttccaggcaccttcggtgtaatcgtctttatgatcggtgaaaccgaattggctcaaatcgacgagatgttgctccttgccggccataaactggggcatggcttcatattcaagctgaataacatcaggggcacccttaccggccttaatggcgttctggaatttggtgtattcaccgccgccctggccgccgttattccagcaaacctgaagatcatcgtgggtttcgttgaaatcatccaccacctgttcgatagctggataccaagcccaaacggtaaccttctgcacaccctttttcttaacggtattggtgcaggatgcactgtcattagcggtcttatcgctgttgaccttggcaccattcgcgttggagcttccgccacaagcgcttacggtcaatgccatagcgccagccgcaatggctgccatgacccgggttactttcttcatgagctcctcctttggattctcatttgttctttccttattgttctttagttatgggcgctgcggaaattcgtcgaagcgattaacgaaatcccgcagcacagttatgttgttggcgcgcccgctacgattaagcgaaatgcaacgccgtccagctcacggggggcagcacaacatgcgccataccggtctctccatcgagtgatgcggtgtcgttgtcgtgcagcacgacacggttctgattgtccagagtgttcttggcgagtaggtcatcatcatgcagcgtctgcgccgtgacggttttcgcaaaaaggccttcaggcaatttgatttcgaagtcctgctcagcgtccaaagaacgattgaccacgaatacactgaccgtaccatccgcgccacgtaccgccaccgaattgacgaccggcacctcgccatatttagcggtgtcataggttccagaagcgagtttcggctcaagcaccgtaccgcccttggcatattctgcagtgaccgcaaatgggtagaacgtggtctgacgccatgccggcccattgggctcagtcataatcggcgcaatcacattgaccagctgagcaagactagccgcatgcacgcgatcggcattcttcagcaaggtaatcatcagatcgccaaacaccacagcatccgcgacggagtacagatcctcaagcagacgcggcgcaaccggccagttgccgatgccttccggattcttgctcggctcatcatgctgataccacacgttccactcatcgaaggagatgtagacctcatgcttgctcttcaaacgggccttggtggcatcgatggcagccgccacatcattgatgaatccgtccatatcgacgccggatgcgaggaagctgcccatatcgcgggtgccatcttccttaagggccgggaagtaataagcatggcacgaaatgaagttgacggcttcgtaggtcttctcgagaacggtttcttcccaacgaccgaaggtgtccatctcatgggaagaggaaccgcataccacgagttcaaggtcgggatccatcatgcgcatgcccgccgcgaccgaagcggcaagagtgccgtagtcttcggcgctcttgtgcccaatctgccaaggaccgtccatctcgttgccgaggcaccacatacgtatgtcgaacggtttgtcagcaccgtttgctcggcgctgctcggaaagggccgttccgctaggaatgttggaatactccagcaaatcaagcgcttcctgcaaaccacgggttcccagattggcggcttccatcagttcgttgccgccgcacttgtccagccacttgaccatctcgtgcaggccgaactcgttggtttcagtggaatgccaagccaaatcaagacgacgaggacgctgacccttcgggcctacgccgtcttcccaacgatatccggacataaaattaccgcccggatatcggatggtggtggcacccagttcgcggaccagatcaatcacatcctgacggaaaccatcttcatcggccgtgggatgaccgggctcatagatgccggtataaacgcaacgcccaagatgctccacgaaggagccgaagagacgattgttgaccggcgcgacctcaaatgcgtcatcgacgacgagacgcgccttgttcgcagtgacttcttgtgccataggaaccctttcctgttactgtttctcacagagttagtacaacgttgtcttaaaggcgaaaaaagaaccacaacctttctgaaacaatgttcggtgcatacgaagcggaaaccacctcttatgggagaatcatcgaatcaatcggttgctttgaacacttctttctatttagtacaaccttgtaccgactgctgatacacaaggtacaccagtacgcaaaaccgcgcaaacgcaactagtataacgttggagtaattcgcagattttcgcccaacacgccgtgtgctgtcctcaagtatcgcttgaaaacgaacattgaacagaacagaaacgaacacggcctataggaacttttgtggtgcttataacccgggtttggccttgtgggagtaggcgtgccggggtgttatttttcccggcgggaaaataggggcgtcccggtggtgggctggacgcatgagaacgaagtccagcaaggcgaagaaatgcccggtgtgcggccggccgatgaagaagaacggtcggaccgcgaaggggtgcagcgctggaagtgcgcatcctgctcgctgagctcgacgatgccacaggagaacacggagcgggccgggcagctcgacgcgttccttggatggctgctcggccgcgcgagccagtccgcgtgcgacgcgaacggcgattcgcgggccctgcgcaagcgcaccgcgtggtgccggaacatccggcccgccatcccgccgtgcagggtgaaacatcatacggtgatggcggacggcacgtacatgaaccacggctggtgcctggtcatagccatcgacggcgggaacggcgaggtgccgggcttccagtggtgctcgaacgagagcaaggccgcctatatggcgttgttctcgcgcatccctgctccggacgtgccgataacggacgggctgcgcggcgcggagagcgcctgcaacgtgcagcgctgcctggtgcatgtgctgcgcaacacccgcgccgacctgacgaacaggcccaagagcgaggccggcggggagctgctcggactcgcccgcaggctcgtcagggtgacgacggccgacgaggacgccgcatggctcaaggagctcaacgactggcacggcaggcacgacgatcacttcaaggagcgcaccaccgccaaacaggatcccatgcacgcgaggggacgcaagtggcggcggacgcacgaacgcctgcgccgcgcccacttccgattggtcagactgaaccgggccggcgtgctgttcgcgttctgcgatccggccgtcctcaagagcggcggcccgctgccgtcgacgaccaaccagctgaagggcggcgtcaacgccgtggtcaagcgcgcgctcgaccaccaccggggattgtcggaggagcatatgagacgctgctgcgaatggacggtgtacatgctcacggagcagcccggccccatggcgctcgtcacacctgaacaccggaggacgaggaaggggaagccggtcgggaatgacgggcccatgcccggcaccatgacggccgtgcaggaaccgaccgacggcgtcgacgcctacgagagcgggttcgggatcagaaaaggatgggtcgggcgatcaacctgaccatgacacgagggaatagacactttttaacccacttttctttacttaacccaaagatggggttccgcaaaaacaaaaaaggttccgagatgacctcggaacccttgcaggcggataaggcgagattcgaactcgcggaggctttcacctcacacgctttcgaggcgtgctccttagaccgctcggacacttatccatgctgccaaaatggcaacttgttcattatgccacattctgccgacctggcaaatcggagtttcgctgagcaagtctcgagtgtatgccgcttgagacatgtcagatcacaatcccggaattcgcccgaagcgctggcattgcgtttacgcgccaagcactccgacaggaattacatacactccatcatcgcgttgatacgcgaactcgccgacccccaccaacaccgccaagaactccggttcacgggttcgcgcactcggatttctcagcagcttatctttcagtctgcatagatttgccgatgcctcagggactttatcctcactggacttaatttcgatgccgccccaccgtccatcggacaattcaataatggcatcacactccagaccggaatcgtcacgataataccgaaccggttctatcccaatatcgaggagagatctcgcatacaccaacagatcacggatgcatagattctcaaacagaaacccaaaagtctgccaatcgccgataagagcggcaggactcatgcccaacattgcggccgcaatggaaggatcggcaaaataccgacgcgccttggtctggagtcgctttggatcccgtgccggcgggacccagccctttatcggatcgatgacgaacatgttctcgaacatggccgtatacccggataccgttctctccgaaatgaaatcgtcaaggttttcttcagtaccgtacatatccttacgtaaggttttgaatatcacagcttgactgatattgcgcgcaagcgaatccagcagacgacgagccacatcaggatccttgccttgcctgggcacactctcagtcagcgtgagtcgcatgtattcccgaatcagaatctgtgcgtcagatacaggcagagccaccgcctccggccatccacctcggcatacggcatccaacaacatttgtgtacttatctctgattttgcagcggcgaacttatgttcaaacagtccactgagacttaccgcacctgtcgagagtccggactcatataaagtcagaggattcatacggatacgtccgattcgtcccgcaccactatggttcggccgattctcattgagaggagtggatgaaccggtcagaatccactgacctttattcgcggaatcatcgtcgacgcgatgacggacttcatcccatatagctggagcgagttgccactcatccacgatatgaggcctatctcccagcagcatcaatgacggatccgccttagccgcagccaaattgttattgcgatccacataggtaatgctggctgcatgggcccgcgcagaccaagttttcccgcaccacttggtgccggtaatctccaccgcgccaaagatgcgcatatatcgttcgatctgtgcatccacgatacgagggcgataggctttcggcttgatgtcgctcgtcagagaatcggccattccgcgcacctcccgttatttcacgtccgccatcgcaataatccgaatttctcaactaccaaaatccgaatgttgcaacgacgaaaatccgaactttctaactacaataatccgaatttctcaactaccaaaatccgaatgttgcaacgacgaaaatccgaatattggtggtggtagaagcggtgacggggccactctgcattgagcggtctctctcagtctcgctacgctcgacagctcgaacgcaatttaaggacagctttccagctgccattttatttgctcactgtcattcgccttcgcctaaaaacgcctccggcgttttcttcacggctcagctcatcagagggggcttgaaattttgtttacgccacctgttcgtggacggaggcattgacccattgggtctgctggacgttgtagccggagaagatgccgatgtcgagcatgcagtcgcggtaatcgcggccgtgggcgatggtgatgtagctgtcgtccaccaatcggttatgcgtgggatccagtccgacccatcggccatcctgatacacctcgacccaagcgtgggtcgcgccctctcccccaagcaaaccggcaatgtagcgcgcggtcaatcccacatgccggcacacggacagcattacatgggcataatcctggcatacgcccttgcgctgggccaaggcctgttcggcggtggtgcgaatcgtggtggaaccgggcgtatacacaaacgccttgtagacctcatccatcacttcggcggcctgctgcaccggagtggcgtcggcaggcaacgcagccaagcgttcgcggcatacgtcgatcatcgcctccacgttcgggccgggaatggtgagcgctgaattgaatcggtacagcggtttataggcttccttatggatatgcgcattgtccacgaaggcgatgccggtcaccgaatagctgaatatgtcgtgcggctcggggatgaatccggtcatcaccacggagccaaaggagtcgatggtggtttcgagttcggtttcgggctgaatcttcacttccacgtcaatcacctgttggcgagggccagtggcgggaatacagcgaagctggaacctgtgatcggtgaccggtgcgctgaaggacagcttcatctcatagtcgaacacgagttttttcacaacgtctcctgcacttacacacgagccggcaaccggcacattctcgggataacgacactacagccatggctgaggtatggtccgcgcgctcacagtccacgcatatattccggcaattcgccgatacgcatcggccggcactcgggcgcacggtttttcgccataccaccatagcatttgaacccgtcagggcgaacgtcgggttaggggcgcttggcatccatgttcatggagctcagtgagcccatgtctttgatggccagggcgctgacacggccggaataatcgtcaaggtacttcttcagcaggtcggcgacttcctgatacccgcgagacggcagctgaccgaccagccagctcagcccatcggcgaagcaactaggcaacggcatgccgtcgaggatcatcgagtaggaggcgagcttcctaagcggggcttccatctcctccatcgtcaggccgaagcgcgtgtacaggtcgatgcgctcaagatacttgccgatgaagatgaacgccttcagcgtggggtcgaccggcgaattctcgatgccgccccagaaggcgagcatgtcatcggtaatatcgcgctgcttgtagatgtcctcggcgtcggccgcgtatttggcggcatcggtgatattggtcatcgccaactccacgtactgcaacagacgcgagctcaattccgggcgcagaatcacggcgttgttgaatgcggaggttacggccgaccgcaccgaatcagggttggacccgtcgtacaggaagctgttcacgaacccgtcgaagtcctcgaaatcttcgggcaggtcgagtgcgtgagcgaacggacggaaggcgtccacatcggtgtccatcacacgatcgtagaacgggaagaactggttcagcgtggtgaaggcgcgctcggtgtaccgacccagccaatacaggttgtctgccttggaagcggtgaccagagacaacgagtggcggcgggactggctcagcaggttcgccacctgcacttcagcaccgtattcatgctccacgccggattcgggtgccaacacccacgtatccttgaatccgccaccctgcgacgagttgacgatcatctggccgggcaccgacgagtatcgagtcaagcccgaataccacacgtgcgtgtttttgccggtgaccacaaaggcacgcaaatcgcatttgcgcggcgacatctcaccggtcttcgggtccaccacatcgatatcgcggaactgaatcacctcttgggcgatgaatcgacgaggctcctccttgatccggttggcaagctcctcacgtgcggcagcatccagcgacgaaccgaacaccacgccgtaaccaccggcttcggccacatccttgatgaccagctcgcccatacgattcaggacttccttacggtcggcctcgaacatcggcatatacgtgggcgcgttgttgagaatcggttcctcgccgagatagtacttgatcatctgcggcacgaagtagtagatggccttgtcatcggccgcgccgttgcccggcgcgttgacgatggccacgttgcccgcgcggtaggcggacaggataccgggcacaccgatcaccgaatcaggattgaaggcaaacggatcgaggaattcgtcggacagacggcggtagaccacgcccacacggtggcgtttgccggcgtagtcgaggaagtagaccttgttgtccaccacttcgaggtcttcggggaaggccagtgcggcgccggttttctccgccagataggcgtgttcgaagaacgcggaattgtagcggccgggggtcagtaccacggcgatgccctcagtggacacaaagtccatggccttgcgcagtaggcgcgggtattcgcgattgtcgcggatgtgcacgtcgcggaacaggcgcggggagatgcggcgctcgatgtcgcgcacgaacagcgggtagctggcgcccgaggggatgcgcaggttgtcttccagcacccaccagcggccatcttcaccctggaccaggtcttcgccggcgatgtgcgcgaagatgccgccgggaggggtcacgccgttgacctgcgggaagtagccggccgaggtgtatacgtattcctccggcacgacgccgtcatggatgatggccttgtcggagtagatgtccttcagataggcgttcagggcgttgacgcgctgcttcaggcccttctccaattcgtcgtattcgtcggattcgataatgcgcggcacgggatcgtacgggaagagccggtcatggtattcgccgttcttgtagatgccgaagcgtacgccgttgcgggacagctcgcggttgatcgcctcgcgacggtttaccagttcatgggccagtctgcgtgctgcggattcgatcatcgtgcctgctccttgctgtggcggcttctgtggcctcaagcggttaggcgtttcgagcgcacgctgacgccgcaagccgtaaccgggtttgatggttacaacctaaggcggccccgtttcagcaaacgcgcgagaatgttacaggcaggtcacttcgccgaccgcactcgtctcgccgaccgcgcgcatctcgccgaccgcactcgttacaatgaatggctatgacacgactgcgcattgacttggcctacgacggcggcggattctatggctgggccaaacagcccaatctgcgtacggtgcaaggcaccattgaagatgcgctgcacaaggtgctgcgggtgccggccgatgatgcggccgaaccgttgcgtctgacggtggctgggcgcaccgacaccggtgtgcacgcctcccaccaagtggcgcatttggatgtatccgatgaggtactgaatcgctgcgtaggtcacatgaccattccggtcaccgaggcgctgactcgcagactcaaggccgtgctgccttcggacatcgtcattcatggcattgccgtggcaccggccggtttcgatgccaggttctccgcattggagcgcacttatgtgtatcgggtcgccgatcgttcgtccgagatcgacccgcgcctgcgtggatgcgtgcttaccgtggatgaatcgctggatctggagcttatgaaccgcgcagcctcattgaccatcggcctgcacgattttggttccttcgccactccgaatccgggaggcactacgatccgcgaagtcaagaccgcctattggcggcgggtgccgatcactcccctggtgccggatgcgatggcatcgcatgaagcatatcggactccgtcgctggagtccggactggcggtgttcacgattgtggcggacgcctttgcccgcaatatggtgcgctccttggtcggctcatgcatcaaagttggttcgggacgcaaatctctggaatggtttgccggcaaaatggccgagccagtgcgtgaaggctcaagcgggccgattgcgccgcagggcctgactttggagcatatcgcataccccgtcgatgatcagctggccgcaagagccgaggccattcgagccgtacgtacgttgtagtttctatgaaacaacgcaaaagggctggaacccaaacggattccagccctttcagctagcttggcgaaacgctattcagctcactcggccttctcggcgtcagcggcttcctcagcgggagcctcagcctcagcggcggcggtctcctcgaccggagcctcagcggcctcagcctcaacggccggagcctcttcttcggcaaccttggcggcggcttcggcttccttcacaacagccttcttggcaaccggctcggtgacgagctcgatcacagcggccggagcggcatcgccaacgcgcggggcgatcttgacgatacgggtgtagccaccttcacgctgctccatctgctcggcaatctgggtgaacagaatgtgcaccacggacttgttgcggatgacgcgcatcacgcgacgacgggagtgcagatcaccgcgcttggcgaaggtgatcaggcgctcagccagcggacgaaggcgcttggccttcggcagcgtggtggtgatgcggccgttctggaacaggctggtcgccatgtttgccagcatgaggcgctcgtgtgcggggctggaagccagacgcgggcccttcttgggtgtaggcattgggtttactccttatatgtccgttcttcaggcaagcaggtgggcatatgcccgaacatccgcttgcctagtgaacgaacgattggtcaaagaggcagatcactcgtcttccggcgagaagaacgtaccaccttcgagattattggtatcgaaggccatcggcgaggacttgaggctcaggcccagggtctgcagcttctccttgacctcatcgattgacttcataccgaaattgcggatgtcgagcaggtcctgctcggtgtgggagacaagctcaccgatggtgtggatgccctcgcgcttgaggcagttgtaagaacgctgcgtcaggttgaggtcctcgatcggaacggccatctcggggttggtctcctcggccaccggggccggaccgacctcgacgccttcagcctgggcgttgagctcacggcacaggccgaagagctccaccaaggtggaaccggcggaagccaccgcgtcacgcggggagatggcgggcttggtctccacgtccagaatgagcttgtcgaagtccgtgcgctgttccacacgggtggcctcgaccttgtagctcaccttgagtaccggggagtagatggaatcaaccggaatacggccgatctcatcgttgtcctgcttgttcatctgggcaggaacatagccacggccacgctcgacagtgaactcgatctcgagttcgccatcgtcggcgagggtagcgatgtgctgctccgggttggcaatagtgacgccggcaggcggggtgatgtccccagccacggcttcgcccttgccgctcttgcgcagatacatgaccacaggctcgtcatattcgctggtgagcacgatgcccttgatgttcagcaggatctcggtgacgtcttcctggacgcccggcagagtggtgaactcatgcagggcaccggaaatacgcacggaggtcacggcagcacccgggatggagctcagcagcgtgcgacgcagcgagttgccgagcgtgtagccgaagccaggctcgagcggctcgatggtgaagcgggagcgctgcggattcagagattcctcggtaagagtcggacgctgtgcaataagcactgtggttatcctttcagcttgaactcggtggtgcactcaccggtcaggcggttttggatggatttggtattgctgagtgctcagacgcgacgacgcttcggaggacgaacgccgttgtgggcttgcggggtgacgtcggtgatggaaccaacctcgaggcctgcagactgcagggaacggatggcggtctcacgaccggaacccgggcccttgacgaacacgtcgaccttcttgacgccgtgttccatcgccttgcgggcggcggactcggcagccataccagcggcgtacggcgtggacttacgggagcccttgaagccgacatcaccaccggacgcccaggacaccacggcaccggacggatcggtgatcgaaatgatcgtgttgttgaaagtggacttgatgtgagcctggccgaccgggaccgacttgcggtcgcgacgacggggcttacgagcggcttgcttaggcgctgccattgaccctcgtttcctagtaacgaactttgttgttgacgttcgggcgatgggatgaaatcatcccgtggcccgaatcatgccaccgactacttggtggccttcttctttccggcgaccgtgcgcttcgggcccttgcgggtacgagcattggtcttggtgcgctgaccgcgcacaggaagtcccttacggtgacgctggccttggtagcagttgatctgaatcttgcgacgaatatctgcatcgacttcacgacgcaggtcaccctcgatcttgtagttggcttcgaggtagtcacgcagcgtaatcagctgctcgtcggtgagatccttgacgcggatgtccgggctgataccggtcgcggcaagcgtttccttggcacgagtgcgacccacaccgaaaatgtaggtgagggcgatctcgatgcgcttctcattggggatgtcgactccggcaagacgtgccattgcgattccttcttgttgccgtaggtcttgcacccgctcgcccggttacccggcacgggcctacgtacccgtggttcagtgtcgttcccttgcgggaagcactgtgagagagtgccttatttacttagtgccgctggagaatctgctctcagccctgacgctgcttgtggcgcgggttgacgcagatcaccatgacgcggccgtgacggcggatcacgcggcagttttcgcagatcctcttcacgctagggctgaccttcatggttatccttttcttgtgtacctttacttgtaacggtacgtaatgcgtccgcggttcaggtcgtaagggctcatttcgagcacgacacgatcctgcggcagaatacgaatgtagttcttacgcattttgccggaaatcgtggcgagcacgatgtgcttgttctcgagttcaacgcggaacatcgcgttaggcagtgcttccacgacctgtccttcgacttcaatcacaccgtcttttgccatgtgcctctagtcctattccgttggatgattacaatggcatatccgaagacacaccaactgtcaactatatacgcacatacccctgtacgaacactcggcgtgtcgcacaggggtatggaaacattgatgtggtatttcggcatcactccggcttgttggccgggccgccgaacctactactcaaggtggctgatgatacggccgctgatctcctcgatgtcgccgacgccgttgaccacgacgagcaggccacgggattcgtagatgtcgagcagcggagcggtttccttttcgtaggtctccaggcgcttggcgatggcctccggagtgtcgtcagcgcggccctgctcggcggcgcgcttcttcatacgctccagcagcacgtcgcgggcggcttcgagggccaccacgtggtcgagcggagtgtcgaggtcggcgagcatctcgtcgagagcggtgacctgggcggcgttacgcgggtagccgtcgaggatccagccgttcttgcagtcttccttggccagacgatccttgacgatcttgttggtcagggagtcaggaaccagctcgcccttgtcggtgtagctcatcgcctcaagaccgagttcggtcttgtttttgatgttgtagcggaagatgtcgccggtggagatggtggggatgttgaagtgctcggcgagcagagcagcctgggtgcccttgcccacgccctgggggcccatgatgagcagacgcatggtggtctccttttgtgtcggttattaatacggtttcggctcccttggttaagggagccattgagttatatatggaagaaagattgctccgtcgtggaacagtccactggactgttccactcctcgcgcgcccgcctgcccattgcgggcggccgctgccaagcgggcgtcagccttctttgtggtccacgttttcgaacaggaagccggtgtactggaactgttcggtctgggccttggcctgacgcagggtgtcgaggcccacgcccgcgatgatcaggatcgtggtgccgccgaacggcagcttggcgttgaggccgagggccatgatcagcacggtcgggatcagggccacgaacagcaggtagacggcaccgacggtgttgagtcggttcatcacgtaggtcaggtagcggctggtggcgttgccggcgcggatgccggggatgaagccgccgtactgcttcatgttgtccgcggtctcgtccgggttgaacgtgatcgacgtgtagaag

SEQ ID NO: 1068 - DNA, 11218 bp, Unknown
  R13_10m  MAG No. k141_4418
aatgccagcaatgctgaacattccgatgacatgcccaccgtgccgattcccgcacgcaaggctgccacgacgttcgacaccccctccaagcgtgagcgcatcgaggtcaagccgccgatcacccgattcatacgtcgtgccatcacccgcgtgttcggcgtatggtcacacatctccactcaggtggtgcgccaatggggctggtatccgcgagtggaaccctatgtgggttatggcaccggcgattactcgcgcctgatctgccgcacggtatacgcccccaagcatgcgcaatccggcgaactgatccgcggcatccgcggcatgcttgccgtatccgcgccgcgcacccacgtgcaggccagcattgatgacacgccgctcaacaccgtgcagatcggcgtctccgaggtctatgacaaggtggaccgcacgcgcgatctcggcagcgaatacgccatctccgattccgccggatacctcgacctcgtggccgagcatcgtctggtgcccggtatccatcgcgtctcctacagcgtggccaaccgcaaacccgtgagcgccaacctgtacaccatccccgccagtgccaaagtcggcatcatctccgatgtggacgacaccatcatgatcacacaggccccggtgccatggaaggccgcgtacaacctgctgttcctcgaccccaagaagaaagcctccgtgccgggcatgagcgtgctgttcacccgcatcgccgacttgttccccggcgcaccgttcttctatctttcgacatcgccctggaatgtggagagttcgatccgcaacttcatcactgaccatggttttcccgaaggcccgctgctgctgcgcgacctcgacccgaggcccaagaccttcgtgcccaccggcccccagcacaaacttgagtttgccgaacaacttatggccgacttcccggacatgaagttcattctggtgggcgatgacgggcagaaggacccgaccacgtacgccaccatcgcccgcagatatcccggacgtgtactggcgatcgtcattcgtgagttgagcccgcgcgaatcaaccggattggcgtcggtgacgggactcacctcgacccagccgactccggtaaccgatgtaccagtattcaccggcaccaccggctcgaacattctgaagaccatgctgccgtatctgaagacggtgttgcgataagcgcggcgtgatgaacgccgaatgcgtcccggtgtggtgcctcgcctataatcgcgtggtatgactgacgagagcacaaacgccgcggccgcgatgccgccttatgccaagcgcgagccgaagcgccgcgaattccacggtgacgttttcgaagacgattacgagtggatgcgagacaaagactccgatgatgtgcgcagctacgtagctgccgaaaaccagtactgcgagcgtcgcatggcgcatctggcggatttccggcatacgttgtttgaagagctgaaatcgcatgtggaagagaccgatatgtcggttcccacgcgcgtcaatgattactggtacttcacccgcacgcagcagggcaaacagtatggcgtgcaatgccgcatccccgtgcgcgatgccgatgactgggacccgccggtcgtggatccgcaaggcgcgcccggctccatgcccggtgaacaggtcgtttttgatgcgaacaaggaatccgaggggcatgacttcttccggctcggcggcttggatctgagcaaggacggccgttggatgctgtacggcgtggatgttgcgggagacgaacgatatgatttccgcattcgcgaccttgccgggctggagaccggggagccggtcagcgaactgcccgaacagttcaccggcattggcagcgcatgcttcacgccggacggccaatgggtgttctgggtggaattggacgattcctggcggccgctcgccgtgtggcggcatcgtgttggcacggcggtcgaatcggatgtgtgcgtgtaccgagaaaccgatgaacggttctgggtgggcgtcggcatcagttttgatgagcgcaatatcgtgatcggcaccggttccaaaaccaccaccgaagtgctgatgctgccggtggccacgcctgaaggcgaattccaagccttcattccacgtcagaacgatattgaatatgatgtgagctttgcctgttttgaaggcgcgggggagaacggtgcggatgtgccactcgccgtggtctaccacaacgccgccaatccgaatttcgaaatcgacgtcattgacatgcgtggccatgagccgccgtaccgactcggcgaaggcgtgtgcatcgccgccgggtcgccgtacggctgtgaacatggtgagccggataagccgattaccgaggcatacttcaacgccgccaatccggcgatattgcagggtgcccacggtctgggcatcgaaggcatcgcgttgcatcgcaactttgtgtccctgagctaccgtgccgacggccagccgcacgtggcatacatgaccaagagcgcggctgccgccgacttcctggccggacggccgtggcggtttacggaactgctgccgcctgccctggaggacgactgggacatggttgccgccgatcgcgaaggcttcaccggcgatcatggcgagatcttgtggaccgaagatgaggcccccacggatcacacgtcatcttccgatggtgccagcgacgaccacctgcccggtgagacccggcgcttgtacaccatcggcgtcggcggcaacccatcgtatgaggcgccgcgcatgcgctactcgttcgccagctatacccgcccgggcgagctgcacgaaatcgatcccgccaccggcgaagatgcgctgctgaagcgagccaccgtgttgggcgacttcaatccacgcgattacatggaacgccgtgtgtggattaccgcgcgcgacggcgaacgcattcctgtttccctcgtctggcaccgcgattgcccggcgcaggattcgccgatgttcattaccggatatggtgcatacgagatttcctccgatccggggttctcggtctctcgtctgagcatgttggatcgcggtgtgctgtacgccgtgccgcacattcgcggtggcggcgaaatgggacgcgcctggtatgaacaggggcgcagactgaacaagaagcattcctttgaggacttcgtggacgccacacgcgcgctgcagaaggcgcatttggctgatgcttggcgcaccgtggccaacggcggatccgctggcggcctgctaatgggcgcgattgccaatatggcgcccgaatgctacgccggtgttgaggcggatgtgccgttcgtggacgcgttgacctccattcttgacccggacttgccgttgaccgtcaccgaatgggacgaatggggagacccgttgcatgaccctgaggtgtatcagtacatgaagtcgtacacgccatacgagaatgtgccggtggccgtactcgagggcggcgacgacgaggctgccggtgacggcagtgctgatggggctgccgccggcgcgctcgccgccgcgcaattcccgagaatcttcattaccacctcgatgaacgacacccgcgtgctgtacgtcgagccgctcaaatggctggcccgtctgcagtccgccggcgtggacgcggtggctaagatcgaggtcgaggccggtcacggcggtctatccgggcgttacaaacaatgggaagaggtttcctatgagaacgcttggtgcatggatgtgatggggctcgctcattaggtcattctgtcgttcattaggtcggtgtcctcttctatgtgagactgaaatgccgccatttcagtccctgaaatgaacccacgccgacctaatgaacactaaaatgacctaatgaatgtctcgacacgatacgcatgttggttgtgtccactagctgagcgggttcgggccggcaggtggtcgcgcgagtaggctccttgaactatggcaaagacatataaaatcgccgttattcccggcgacggtattggcaaggaagtcactccgtgggctcagaaggctttggaaaaggccgctgaaggcgtagctgacttcgagtatgagaacttcgacttgggtgccgagcgttatctgcgcgatggtgcgatcctgcccgaggacgaagaggagcgcatcaaggccaacgacgcgattctgctcggcgccgtgggcgatccgcgcatcaaggccggcattctggaacgcggcctgctgctgaagctgcgcttcgacctcgaccagtacgtgaacctgcgcccctccaagctgtacaagggcgtcacctcgccgctcgccaaccccggcgacatcgacttcgtggtggtgcgtgaaggcaccgaaggtctgtactgcggcgccggcggcgcggtgcgccgcaacaccccgcaggaggtggccaccgaggtgtccatcaacaccgcatacggtgtggagcgtgtggtgcgttacgccttcaagctcgctatgaagcgcaagaagcacgtcaccctggtgcacaagaagaacgtgctcgtcaacgccggtgatatgtggcaacgcatcgtcgacaaggtcggcgaggaataccctgaggtcacccacgactaccagcacatcgatgcggccaccatcttcctggtctccgacccgagccgtttcgatgtgattctcacagacaacctcttcggcgacattctgaccgatgaggccggctccgtggtgggcggcgtgggctactccgcctccggctgcatcaacgcctccgacgagttcccgtccatgttcgagccgattcacggttccgctccggacatcgccggtcagaacaaggccaacccgaccgccgccatcctctccgccgccatgctgctcgagcatctcggctttgatgatgcggccaagaagattcacaccgccgtcgaagcggacatcgaggagctcggctccaccgtgcgctccaccgaccaggtcggcaaggacattctggcccgcatgtgatgtcccacttggctcccctccagaggggagccaagtttatactgagttgcatgcaaatgcgacatggggaatgcaaaaccgttggcggcaaactagtcgccgtgaccgtatccgtcgatgatgacggcaccgcacagtcatgccatatcagcggtgatttctttattgaatcagtttcggatgccgaatctcatgctttgttgcgtgacttggaacaggctctaattagtgatgattcattgcggtccgtattggacgctcaccctagttgccaaattatcggcacagatgaagttgccatcaaaaccgcatatagccgagccgtaagcagcaacttgcccccgctggtgggggctcccgcgcagcgggtgggggtggtcagccccgatgcgccgaacaccccggcatccatcaatacacaaaccaagcagcccgacaaaagctctgaataccgggagcgctggaacgccctcagacctcaactcaccgtgatccacgaccatccgcgtactccggacgagcaaatggccattgacgagacctgggcgcgtgaagtcgcagcaggaacacgacagccgaccatacggttctgggagtgggcgggcccggctgtggtcatcggccgtttccaatcggcccaggacgaggtgaatctggacattgccgagcagctcggtttcgacgtggtgcgccgttgcacgggtggtggcgcgatgtttatcgaaccgggcaacaccattacctattctctgtatgcaccgctcgatttcgttcagggcgtaagcatcgaagaatcctaccggctctgtgactggtggctggtcgaagcgctgcgcgaacttggcttggatgtgcggttcgcgggcctcaatgatatcgcctcgcagtacggcaagatcgggggagcggcgcaacggcgcttccccgtaggctcaggcggcgcggtgctgcaccatgtgaccatggcatatgacatcgatgcggccaagatgagccgtgtgctcaacaccagtcgcgagaagatgtcagacaaagcggtgaaatcagcagtcaaacgtgtggacccgatgaaaagccagacgggtctcagccgcgaacacatcgtcgaacaccttattgactggtttgcggcgtgatttcaccgatggccgtatacgattttgccggtggccgtgcgtggttttgtcatgggcgagcgcggtaaccgcgacagtgccgttttttgcggtaacacattcgtcagcatgtcgtacggctatcggatcgcgccacacatgaagtgacgaatgatggcatgcttctgacgaaacctgtggggcgcgttacaatatgacggatggccgacgacggtcgtaggacaataaggatggtgcgatgagcttggaaacgccaaacgcttttgctgacgaggagaacatcctgctgcatacggcattgttcaagcaggtatcgccagccgaagccgaggagctgctgccgcatttgaagcgtgcgaccttcgataagggcgactatatcttctccgaaggcgataccgatcagcgcatgtatctactggagcaggggcgcgtcaagctgattcgcacttcttccgatgaccgcgtgcagctgctgtccatccacgcgccgggcgaagtgcttggcgagattccggtattcgaccctcatggtggcccgcgcactgcgtccgcggtgtccatgagccatggcacgcgcgtggtctggctggagcatgatgccctgttcgcatggcttgatgagcatccgcgtgtggccatcgacatgttgcaggtcatggccaaccgccagcgcggcaacaacgaacgcatctccgacttggtattcatggatgtgccggcgcgtctggccaagacattgctcaacttgggctcacgtttcggcgagccggtggaacagggcctcaaagtgccgcatgacctgactcaggaagagctggcccaactggtgggctccagtcgtgagaccgtgaacaaggcgttgatggacttttccaaccgcggatggatcgcacgtgacggtcgatcgatcatcatcttccagccaggcatgctgattcgacgctcgcggcgctgaccgttcggctgacttccagccaatgttacgctagtgcggttcttgtgatgatatgttcacgggagctgaccgcgagcccggttggtagggcaccccatttagaatggggctcatgcccaaaaagaagtccctcactctccaacgtgtgcttgttctcctcttggcctatatcatgcttgccgtctgcggtggcgtggcggccagcgtgttgtttgtaccgggtgtggtcggtgccaataaagccgccaaagcggtgattccgtcgctcaaggtagaaaacgtggacttcgacgtgaccggtctgccccagaagtcgacgatgtacgcgcgagacggttccaccgttatcgcgacgttctacaaccaaaaccgtatcgtcgtgccgctgaagaagatttccaaaaccatgcagcaggcagtggtggcgcgcgaggaccgtcgattctggactcacgccggcgtcgacgtgcaaggcgtgatgcgtgcgttcgtgcagacctacctcgtcaaaggctcccagcagggtggttcgtcgctgacccagcagtacgtcaagaacgtgctgctcatgcaggcgatcgaggacgacgacccgatcgcccagtaccatgccaccgaagacaccgtcgcccgtaagattcgcgagatgctgatctccgtgcagatggagaagaagtattccaaggccgagattctgcagggctatctgaacatcgcccagttcggcaacaacctgtatggcgtggaaaccgcagcccagcgctacttcagcgtgtccgccgccgacctgaacgtggtgcagtccgccaccatcgcggctatcaccaagaacccgagccagtacgatccgctggtcgaggagaaccagaaggaaagcgagaaccagcgcaatatcgtgctcaagctgatgctgcaggaggggtacatcacccagaagcagtacaccgaagccgtgaacacgccgctgaaggacacgctgaaggtgcaggccgtgaacgtcggctgccaggacaccggcgactacgcatacttctgtgatttcgtggtgcatcgcatccagaactccgaagaattcggcaagactcgtgcggagcgtaacaagctgctgcaggagggtggcctgaagatcgtcaccacgttggatgtggaagcgaattccacgatgatggagaccgcgcgtaataccattccaccggacgatcccagcggcatggagatcgccatggccgcggtcaaaccggggaccggcgaggtgctgggctttggcctgaatcgttactatgacgccactccggcagccgcgaacgatccgaccaagtcgggccagaactacgccgtcgatctggtggacggcggcggctccggttggaccatcggctcgacctggaagcccatcaacctcatcgcgtggatggaggcgggccattcgatcaacgacaacctgcagaccaccacgacgtaccccacgaccgacttcgcctgtgacaactacaagggcggcgccgattcgtggaacgtgtcgaacgccatgggcgccggcacggtgaacccggaaagcccgttcctcggtctggtgcgatcgcacaacaccacccaggcctccatgggcgccatcctcaaactgtgcaaggtggcggacaccgcgaccgaactgggataccatgacgccgccaccggcgagaccatcgacaagaccccggtgtacacgccgtccatgatgatcggctcggtgaacgtgtccccgctgaccatggcgagcatcttcgccgtatacgcctcgaacggcgtgcagtgcaacccgatcgccatcaacaaggtgaccggcagggacggcaaggagttcaaggtcccgtccgcgaactgccatcaggcggtggataaggacatcatccaaacactcgcttataccctgaaccaaggtacggtgcggccggatggtgccggttggtcattcagattggctgacgggcgtaagccgtttggtaagaccggtaccagtgaggatctcgcggtgtccggtggatcgttcattcctaatcagatcgcggcgttcgctgtggtcggcgacgcacagaacccgtacaccaaccgtatttccaacattgccatcaacggccggtacaacagctattgggatggttcgacaatcgcaggtccggccgttaccaacttcttcaatagctacatttccaagaagaaaataccgattgacaacgattatggccagcccgtctcgaagtacaccacgactggcaagtacctgggcattggcggacgaacgttcagcgtgccgcagaccactacgaatggcaacagccaatcgcagacgaccaccaatggtcaatcccagtcgcagtctcagtcgcagaacactgggcaaaacaacacccaaacccagggcaccaattcagagcggtcgaatgatggccagtgattggtgattggcgtttgacatttggtgattgcaggccggctgagtctacgtaacatagtcgactgcgatacccaaattacgtagtttgcgggcgttacctgtttcaggtgacgcccgttttacaatacttaatgacaacgccagcgcgttcatcgaatattcgccatgaacgcgcattggaaaggggaacgatgagcaacgacgatctgacgcatgagaattttgattttcgtggattcgacgtgccggatctcaaagcggtgacgctggcttcgtcttcggacggcgaacagtccaagcagccgaagaccaagcacgaggatgcatcgaggaaccgtaggcacggtaagaagaagtcaaaatccgacgcacggtccaagaagcgggccggcgcgggcaagacgagcgaatcgtttgatgattatgaggattatgaggaaagggaagctgtgagcaaggcagataagaaagccagcaaggaccgtccgggactgtttgcgccaatgacgctgcgcgaagtgaccgtgcgtaatcgtatttggttgccgccgatgtgcacgtattcgtcgttcgcctgcgatggtaggcccacgccgttccactaccagcattacgtgtctcgtgcgttcggcggattcggcatggtgatcgtcgaatccaccgccgtggctcctgaagggcgtatcacgccgtgcgatctgggcctgtgggaagacgggcagattgatgcttggcgctggatcgtggacggtattcgcgaggcgggtgcggtgcctgccatccagctcaaccatgcggggcgtaaggcttcgaccggttgcttcgccgttggttacgacggtcagagtgtgccggaggaggcgggcggctggcccaccatggcaccgtctgaaatcgcgttcggcgggctgcgtacgccgcgcgcgctgtccgtggatgagattcatggtctggtcggtgcgttcgccgcggcggcgggccgtgcggtggccgccggcttccaggctattcagattcatgctgcgcatggctatctgatttctcagttccttgacccgctgagcaatgagcgtgatgacgaatatggtggcgatttgaccggtcgctctcgtttcctggtcgaggttgtggatgccgtgcgcggggccgtccccgagggcgtgccggttctggtgcgcatttcggccacggattgggccgctggcggttgggatttggatcagaccattgcactatccaaggtgctgaaggagcatggcgtcgatgtgatggacgtgtccactggcggcatcatgtcgggagtgtcgattccggtcaagccgaactatcaggtgccgttcgccgagcaggtcaagtccaaggccgatattccggtgaccgcggtgggtcttatcaccaagccgaagcaggcggccaagattttggcccgtggcgaagccgatgccgtggaaattggccgcgccgcattgcgcgatccgtactggccgttgcgtgcggccaacaagctgggcataccgtccacagaggtcccctacgccccgcaatacgtggccggtgcgtactgaatcctcatggggcggtgactttcccatggggcggtaaaaccctcatggggcggtaacccaaaacggcggtattctgcggaatgtgaaatttggctaaccgccccatggg

SEQ ID NO: 1069 - DNA, 8760 bp, Unknown
  R13_10m  MAG No. k141_4614
ccggacggcaagacctggccgctgtgcctggcttacgccaaggctctgggcgctctgcgtgcaggtgccatcaagaccaccttcaccgaggagaccgagaccgatctgttcggtgagcaggacgtcctcatgggtggcatcaaccacctgtgcgacctcggtttcgacgtgctgactgaggctggctaccagccggagatcgcctacttcgaggtcttccacgagctgaagatgctggtcgacctggctaacgagggtggcctgaacaaggctcgctggtcctgctccgacaccgctcagtacggcgactacacctccaccgtcatcaccgaggagaccaagaagcgcatgcagtaccagctcaagcgcattcaggacggctccttcgccaaggagttcatggacgaccaggccgctggcgccccgaagttcaagaagctgcaggaagagttctctcacccgcacctcgagaccgtcggcccgaagctgcgcgccatgttctcctggaacaacgccgaggccaaggacaaggacgaggccgagtccttcaacggcaagatcgctcgtacccaggttcagtgattgccgcccctgaaggggatttaagctagcaaaccgccgttcccgcccatacgggagcggcggttttgtgttgttgcgcgcagcgaatcattctcaataacaactatgcgctgatttcttgcaggcaaacgaacaccgaatatgcaagatcgttgatatctcagcctttccccatatgtgggattgtgcgattctgttcaaaagggtgcagagttgttatcgagaatcgttctctgcacacggctgtccatactccaatagtgacctagctcacgttgtggactccagcggggctgcgacggcgttctcggtaggattgatttcggtttgaaggacacaatcctcgcaacacaggacttatctgcacaccgtagataccccggcgcccagcggcgccacaccccactactgaaaaggagtgccaataatggcagcacagatctggtatgagaacgacggtgatctttctgttctcgaaggcaagaaggtcgcaatcatcggctacggctcccagggccacgcccacgcgctgaacctgcgcgattccggtgtcgacgtggtcgtcggcctgcgtccgacctccaagtcggtcgatttcgccaaggagcagggcctcgaggtcaagtccgtggccgaggcttccgccgaggccgacgtgatcatgatcctggcccccgaccagtaccagcgcaccatctgggccaacgacatcgagcccaacatcaagccgggtgccgccgtcgcgttcgctcatggcttcaacattcactacggctacatcaagccgtctgaggatcacccggtgttcatggtcgccccgaagggcccgggtcacatcgttcgtcgtgagtacgccgctggccgtggcgtgccggtcgtcgtggccgtcgagcaggatccgcgtggcgatggttgggctctgaccctggcctacgccaaggccctcggtgctctgcgcgccggtgccatcaagaccaccttcaaggaagagaccgagaccgatctcttcggcgagcagaacgtgctcatgggtggcgtgaacaagctcgtcgagatgggcttcgaagtcctgaccgacgccggctaccagccggagatcgcctacttcgaggtctgccacgagctcaagatgctcgtcgatctgatgaacgagggcggcctgaacaaggctcgttggtcctgctccgacaccgcccagtacggcgactacgtcaacaccgtcatcaacgaggactgccgcaagcgcatggaataccacctgcagcgcatccaggacggctccttcgccaaggagttcatcgacgatcaggatgccggcgccccgcacttcaaggaactgcaggagaagtactccaacgagcgcatcgagaccgtcggcccgaagctgcgcgccatgttctcctggaacaaggatggcgtcaaggatgccgacgaggccaactccttcaccggcaagatcgcccgcgcccaggttcagtgagcccctgtagctcccgctggcgcgtaagcgcctgagggtggtccccagtgcataccaaaaggccgccgctccgattcattcggagcggcggcctttcgcatggtcccaccatatagtcaaacctccaccacgtagtaaaatccccacgacgtagcaaactgcccaccacgtggtgacgcaaaacggctttattccgcggaatacaaaattacgctgacatcgtggtagaagattcatcgcgtggtgggcagttcatcgcgtggtgggatagacagttgatatacgccggctatcaaatcaatgatgtcttgctgtgttccccgtatgccgagctgcttcatcggaagcgtttcatgggatatttccccaagaaaatcagcgagatcatggtaggcctcgtcgttgagagacacgcgatcctctggagcaagtagttgagccaaacggaatacatcatatttatgcttcttgagatcttttccgtctacgtgctcgccatgttgttctcgggcgttgagatccaaccatgctttcgccttgaaaggaatgagatatttctcgttaagcacgctgatgccttgtattgattcgcggccttgctgcaatagccgatagtagctgtcgttcagcatgatggctgacaggctggaaacgtcgtttgcaatatgcaatggcgtcaggaacgagttcggcacaatagggaagtcagggtgacgtgaaaatagctcgatcatagtgggatacccgtacgtactggggtgcatgaaacggtacaggtgaggctgtgcggagttcttcgtgatagaggtgtatccgccatcgcgaatgaaagaccacaatcgttgtgcaaactcgcgaagatgtccctcggcaatcagcaccatgtcaatatctttggtggctcggaagtccaggtcgttgtcggtcatgatgatgtcacaagcggtgccgccgatgattacgtaagaatcctcgtagccggcaaaggccgttctgatgagctgcaggccttgtgtcatattgtcgctcctgagaaagtattgcggatggattcttgtatggcgtcttccaaacgttcgtcggcaatctcgccaagagtcagggccgtggaaatggggtcggcaaggtagtcttcctgcgtatattgagcaagtaggcggggatcgtacctccacagctccagaatatatgcattatctggcaccttttccaaagcggggtcgataatgcatagttccttgttgtgctgcttgagccaatgacgttcaacggcatagattcgcagttttggggtggccagttgcgtcctgcgcgaaagagcaaattcgccggccggaatcagctcgtcggcaatcatctggcgattgcgattcgtgacggtatatttgctgaatattggtgacttcaggagatgccaagatgatttcagtaaatcaagtcggctggtctgccttgaagtcagtagttcgacgctattgctgcggccttgcttggtgcggtgcacgaatgccagctgttctaacagcgtcacggcaacgctgacctgagcttcggtaaactgaagcgctcgggcaatatctgattggactttgctctcgttggagtagagcaaatacagccagaccagctgtgttgcgggggagaagggtcgcacctcgatatcctgtgcgttctccagcggccgtgaggagatgcgctgggtgaacaccatgcccagtgaagggatatacagttgggtaccgggcacgatgaaaggaacgtgattctgaatcagggcttttcgctggtatgcagaaagccggggaaactgaaagacaatgggcagatccgtccgctgctcaagcctgctggcgtcggcggtgacgcgtgtgatgctgaatgggtgagcctctccgctcgcgattagcatgctcgtgttgtcgatggtgagtttgctgaatgtccgtccgttggtcagaaatagcggcagtgaggcagtgccatcccaagaagtgatttggcagggcagaccaagtgtctcgcgaatgtaatgctcggcatccatgtcgacctcaatccttaacgaaaatctgtaagattcacatctcttgttaagtatatagaatattattaagtatttcggggttggcatgtcgcgaatggaaagaaagggcagtcatccccgaaatggagacagcttagccgggaaaaaggacgacgccagcatccggagaagatggatgactggcgtcgggtaagctcgcaaaagctctacttgataacccacgcagaagtgtcggtggggagctggccttcgggggtcagcgggccggacgccagcaccacggagccatcgggcagcgcgaccggggcattgccgaagttggtgattgaggtgaacacccgcccgccaaccgccgcgcgggtgtacgccaccacatcgtcgcccatgtccacctgctcggccgtggtgtcgcgcgtggcggtcagcgactcctggcgaatcgccagtgcggcgcgatacagcgcgagcatcgagtccgggtcggcttgctccacgtccaccgcgtaatccttgaaccacagcggttgcggcaggtgcgggtcggcggccggcgtcacgccctcagcgcgcgtagccggcgagaagccgaaggaagcgcccgtgccgaactggccggcggcgcacagcggcacatggttctcgccggtaccgtcatcggccggagtcggacggctgaaatcggccaaggccggctcatcggcggcggtccacggcagcggcacgcggcagccgtcgcggcccttgtccatcgtggcctgagcagtgtggaaagcggtcggatcctccaagtgatcccacggaatatcggccacttcaaacaggcccagctcctcgccctgatagatataggcggcaccgggcaggccgagctccatcaaagcggcggcgcgggcgcggcgagtgccaagctcgcgatcctcgggataggtagtgccgttgcgcagcagccagtcgtgcggcagctggtggtagggcgcgcccttgatctgcggcaggccgtaacgggaggggctgcgcggcacgtcgtgattgttcatgacccacgtggtggtggaaccgccggtttcggccgccgccttgagtccggcggcgatggcctcacggaactcgtcggcataccagttggcttgcgcgaagtcgaagttgaaggactggcccagctcgtccatcgaagcgtacaggtgctggtgctcgggcaccacccacgcctcggccacggcaaagcgcggcgggttgtactcgttgaacaccttgcgccattcgcggtagatatcgtgcacctcgcgacggtcgaacagcgggtggctgaagtcatgattcagcacgccgaccacgctgtattcgcggccgagctcttccaacggcttggattcgaggtccttggccaggccgtgcgccacgtcgatgcggaagccgtcggtgccgtggtcggaccagaaacgcagggtcttcttgaactcctcgtggatgtccggattcttccagttgacgtccggctgcgccttatcgaacaggtgcagataccactggccgtcggccacgcgcgcccaggccgggccgccgaagaaggattgccagtcgttcgggggcagttcgccatgctcgccgcggccgtcgcggaagatgtagcggtcgcgcgccggggagccgggctcggcggcgagggcctcctggaagaacacgtgcttgtcagcggtgtggttgggcacgatgtccacgatcaccttgatgccggcctcgtgcgcggccttggccatcgcgtcgaagtcttccatggtgcctaggcgcgggtcgacgttgcggtagtcgattacgtcgtagccgccgtccgccagatcggaggggtagaacggggaaagccagatggcgtccacgccgaggctcttcaggtagtccatcttctcggtgacgccggcgatgtcgccgatgccgtcgccgttaacgtccttgaagctgcgcgggtaaatctggtaaacgacggcctgcttccaccagtcgtcattgaggttatttgcggtcatgccgattccctcctgttccgggtgcgttgtggttgggttgttccggtcgcggccgaactgctgtgtgaaggcccgaccgttgtattgatgatgacaacgatatcatgtgaattacgcatgcaaaaatcgatttatcggcgttttgcggtggtaacgtgctcacgcctgcgcgggcgctgctgtcgcggcaggcggcgcggtggtttcgcgcagtattagcggagtgtccggccgtacgaatgccggttcgattgacttgccggcaatggcatccaataccatgtgcccggcagtcgcgcccattgcgaacgggtcctgatgcagcgtggtcagtcccacggcggcggacagggtggaatcgtcgaagccgatgatggaaatgtcctgaggtacccgccgcccgtattgacgcaggcgatacagcacgggcgcggccatttcatcatcctcaaaacagaaggcggtgatgctgggggagacgttcagtacggcgttcaatgccgcgttgctttcgccaagaccgcgttgaatgctcaggggcgttagctcgatccccggatgggcggcagcggcatcaatgacgccctgcaaacgagcctcggtactgtagcgcatattggtttcggtcggtgcgctgccgacgaacgcgatatgccggtggccgagtgcaatcaggtgctcgatagccgaacgtgtggcggcgtaatcatcaatgctcacgcctgcgtcgaacccatcggtggaggggatgttgatgccgacaatcggcacgtgcatatgcttcagccgctccacttcagccggttcgatgtcgaaggagctgacaatcaccgcatccgcattgcgccgcacgggcaaatccacaaagaagtcgtggcgctcggcggcgttgcgcatggggtagggcacagtgtcgtagccggaggggcgcagcgccgagtcaagaccggcgaagatgttcgaattgaaccaactggcgatggtctcgctggcaagtagtgcgatacggaacgattggccggattttagggcggcggccgagcgtgagactgagtagtcgagcttttcggccgcggccatcactcggtctcgagtctcgggaagcaccagatccggcttggcgaaggtccgggacaccgtggatacggaaacgccggcctcgcgggccactgcctgaatgcttgccttggtcatatgccgtcgctcctttaccgtcgcgaacaatcattgtcatgacaacgataacatgcccataacaagtcgccgtcttcggctatctcgattacgaggggctgatttagggcattccggacatctacttccgtttcaaggggctccttgccggtgaagccacaagtgcaaacgactttgtgccaacgtcattccgccgttctcgcgttgggtctacttgggcaccagccccttgaaacggaagtagatgtccgggacaccctaaatcagcccctcgaagccgatttagaccaatttcccattgcggaatcgatcaccgcttctctcggcgcatcacggcggctagggactgcacgcgtggcaggtcgaagacctcgtcggtatgcaccacgtggcctgagctgtccgccagcggcacgcgccagttcgaatattctctggaagtgcccggctgattctgggagcggcattcgcccacgccgtccaccagcgctgcctgcagcagcagcgacggcgtatcggtgagcatggcgtgcatcgcttccacgatctcctgcacatggccttccacatcatccgccacggtctgtgagatatagccgttctccaccagacggttcatcatggccgtgcgttcggccatcgccgaggcggcgaacgcctccaccggctcgctcaggagatgcagctcctcgcgcagcttgacgtgttcgaagttcaggtagccggcggtgggtggcagatcgtgcgtggtcaccgaggccaatgcctgtttgcgatagtcctcgggtgcgcggtacgggtcgccggcgttcggcgaatcgtccacgcggctgaaccattccacgtcagtgccgagtacgccgtgatcggccagaatgcggcgcacgtaatccggcacggtgcccagatcctcgccaaccaccatgcctccggcgcgcgtggcttcgatggccagtactcccagcatcgcttcgtggttgtacgttacgtatgcgccgttgagggcgccgagcccctgcggaatccaccacaggcggaacaggcccagcacatggtcgatgcgcaccgcgcccgcgtgctcgtacatcgaatgcaccatctcgcggtacacctggtagccggtggcctccagatagcgtgggctgaacggcggctggccccaatcctggccctgctggttatagaagtccggcgggcagccgaccgtgacgccgccggaggcgaagcgttccggattggcccaggcatccgcgccgagcccgtgcacgcccacggccatgtcttgcatcagacccagtgtcatgccgtggtccagcgcctcctgctgcgcggcgttcacctgctcggcggcaatccactgcagccagcggttgaactcgaacaggtcgtggtgctcctcgacgagctggcgcacggccgggtcgtcgatggtcttctcg

SEQ ID NO: 1070 - DNA, 27172 bp, Unknown
  R13_10m  MAG No. k141_4672
atgggtcaaggccaagtccggcgactgctgggccgatatggccgagctcgccaagatcggcatcatccccagccccggcgaattctacggcgctcccgcctacctgcgtttctccgccaccgccaccgacgaggccatccgttccgcctgcgaacgtctgcaatcggcccgcgcctgacgacaccgactaccgccggggcgccgccgtggtattgcggatggccaggaacgtgcgcgcggtctcgaacggctcgcccaggtcaatgccgaacgtcgcggaatcaatcagcgacagcgccttttccgctgccttgcgccccagggcctgcggatcctgatgaatggtggtcagcccgaactcggccgcatagtcgctgtcgtcgaatccgatcagggacatgtcgttcggcacgccgatcccggctttgggcagcttgtacagcaggggcagcgccgtcccgtcgctcaggcagcatagggccgtgggcggctggtccatgacggtgatgcgcgcgatcgcctcgtccacggtgaagtcgttgcggggcagggctatggtcaactgttcgatatcctcatacgccgcacaggccgattcgaatctctgcaggcgcgagtccgcactgtattccatcggcgcctccgagacgtcggtgcagatgtaggcgatacgccggtgccccagggcatgcaggtgattgatggccatgcgcatgctcttggcgttgtctatggacacggtggcgttgaacccctcgttgtgcggcacgttgacgccgatcagcggcacgcccatgccctgcaggttggagatctcctccatggttacgttgaacgaggccacgatcaccgcgtcgacattgcggcgcaggggcagctcgtcgaagaacgacatgcgctgttcggtgtccgcaatgccgtagagggacacgtcgtagccatgggtctgcagcacctcggtcagccccttgtacagattggagtcgaaccaggtggcgatcgcctcgccggtgagcatagcgatacggaacgtgtgtttcgatttcagcgcggtggcggaccgggagatggcgaagtcgagttcgttggccgcttcgatcactttcttgcgcgtggcctcggtgacgatatccggtttggcgaatgttcgtgacaccgtggccacggacaccccggccctgacggctacgtcgtagatcgtggaatgtatcacgcgcgaaccttcctcatgggtgctcgataatggccacaatcataccatgacggaatgtaaccgtttacagaaatcctgtaattatgccgtttgatatcaataaatatgggtgttaacgtatacatcacgacagtcgcggagtagcgaagtcgtgaagtgtaaatgaaaggagaagcagcagatgaagtccgcatcgtcttggaccgagcgctggtcgtcctccgggcatgatcgacgcccgaaccgtatggcggcaaagacccgcagcatatcccgcgccatcgccgccgtctgtgccggcgccgcatgcgtggccgcactcgccggttgtggcacatccaccgccggaaacgtcactctcgaattcttccagtacaaggtagaggcagtcagccagttcaagaagctggtcaagggattcgaggcggaacaccccaacatcaccatcgacatcatcaacaccgccgatgccgccaccgatctgcgcacgcgcttcgtcaagaacaaggtgccggatgtcctcaccgtggacggcggccgttacttcggcgaattcgccgcctcgggaatcttccaggacttcaccgacgacgagatcctcgacaacatcaacccgcagatggtcaagctgctcaaggatctggccaaactgtacgacaccagcgccgaccgcgcgtacggcatcccgttcgccggcaacgccaacggctacgtcgtcaacgtggacctgtggcgtcaggctgggctggacccggacaacctgcccgaaacttggtccgagttcatcgccgcgatgaagcagatccagcaggccggcatcacgccgatcgaaggcagcctcgccgaaccgtggaccactcaggcgccgttcgcctccctggccggcacacttgtgccgatcagcgaatactcgaagctcagcggcggcaccgccacattcgccgacctgtggggtcccgtggcggaaaaggaagtcgagttctaccagtacacgcaggacaatccgggcgttacttaccagcaggccacccaggacttcgccaacggcaaggcggccatcttgcccctgggcacctacgtcgtgccgcaggtgcgcatggtcaacccggacatcaacgtgaagttcgcccagctgcccgccaccgacgatccggacgagcaggtgctcaccgccggcgacgacaccgtgctcaccatttcggccaccaccaagcatcccaaggaatcgcgcatgttcgtggaattcttgatggacgaggaccggctcaaggaatacgccgaatcgcagttctgcttcaccccgttcaaggacacctacgccggcgacgaggctctgcagaacatcctccacttctacaaggagggacgcatcgctgatttcgccgaccactacatcccctcgtccatgaccatggccggcagcctgcaaagcctgctgaccaccggcaacgttgaggcgttcaccaattcaatgcagacgcagtgggatcagatccaagccaggaccgtacagtaaggaggttcaccatgtccgccattgccgaaaaaccacgcaagaagcgtgtctccgctttctcccatcgcaaggtcgatcccgcatactactggatgaccgttccggccatgatcctgttcatggtgttcctgtactggccgttcctgcgcggcgtgatgtactccttcaccaattccaagggctacggcaaatacaaatggatcggcctgaccaactacaaggccatgttccaggatgagcgcattgggcgcgcctacctgttcacgttcttcatcgccatcgtggtgacgattctggtgaacctgctgtccatgttcatcgccgtgctgctcaactccaagatcgcgttccgcaacgggttccgcgccatctacttcatcccctacaccctggccgtgcttgtggtcggctacgtgttcaagtacatcttcatgatgccgatccccgaactcggcaaggcgttgggcatagggtggctgtccgaatcgatgatcacctccgaatcgctggcatgggcgccgatcgtggtgctctccgtatggcagggcgtggcctacaccacactgatctacctcgccggcctgcagaccatcgacaccgacatctacgaggccgccgcccttgacggcgtcaacgcctggcagaagttctggcagatcaccttcccgctgatcggaccgttcttcaccatcaacctcgtcctgacgatgaagggcgccttaggcaccttcgaccaggtggtcgccctgaccggtggcggtccgaactccgctacggaaacggtcacctacctcatctaccagggcggcctgaccggtggcgaatacgcctaccagaccgccaatgcggtgatgttcttcatcgtcctcgcgatcatcgcgttcattcagctcaagttcttcggtagcaaggagaaggtgtgatcatgaccagcgctgttgctgcacaacccaagaaaaacaagttccgcaaggaccataagatcaactggtggctgaccgcggtggtcgcggtgctgagcctgaccattctggtgccgctctacttcaccatcgtcaccgcactgaaaaccccggccgaagccggcacgttcgccctgcccaccagctggcagtggggcaacttcgccgaggcctcgaacatggtgaactatccgcgcgcggccctgaactcggcgatcatcactgtgggcgccatcgtgctcaccctgctgaccaacacgttcgtggcctatgcggtggcccgtaacatggacaagcggttcttccgcttcctgtactacttcttcatcgcagccatgttcgtgccgttctccgtgatcatgctgccgctggccaagcagatgggcgggtggaacctcgacaacaagttcggcctgatcatcctgtatatgatcttcggcctgggcaccaacctgttcatcgccatcggcttcatccgttcgattccggtgtcgctggaagaggcggcccgcattgacggcgcgtccacctggcgcatcttctggaccatcatcttcccgctgatgggcccgatcaacgccaccatcgcgatcctgaccgcgctgtgggcgtggaacgacttcctcctgccgttgatcctgctgtccaattccgcggatcagacgatcccgctggcgcagttcgtgttcagctcgcagttcaccgccaactatccggtggcgtttgccagctacctgatggccatggcaccgatcctcatcgtctacatcttcgcccagaagtgggtgatcagcggcgtgatgcgaggcgcgaacaagtaagccgtctcatcccgtcatcagtctgtggaatcctggagggttcttgccgccctccgggattcccgtcacattcgttagaaaggttgcaatcatgactactgcgcagcgtgtcgtgcttcccgattccgttcgaaccaatggcaccacgccgaatccgtggtggtcgaatgctgtggtctatcaggtctatccgcgttcgttccaggattcgaacggggacggtatcggcgatctgaagggtatcacctcgcgtttggattatctggccgatcttggcgtggacgtgctatggctgtcgccggtgtacaggtcgccgcaggacgacaatggctacgatatttccgactatcaggacattgaccccctgttcggcacgctcgaggatatggacgagctgctggccgaggcacacaagcgggggctcaagatcgtgatggatctggtggtcaaccatacttcggacgagcatgcgtggttcgaggcgtccaaagacaagtccgatcctcatgcggattggtactggtggcgtccggcccgcccgggaaccaccccgggtgagccgggggccgagccgaaccggtggggttcctatttcggcggttcggcgtgggagtattgcccggaacgcggcaagtactatctgcatcagttctcgaagaagcagccggatttgaattgggagaatcctgcggtgcgtcgtgcggtgtacgacatgatgaactggtggctcgaccggggcgtggacggcttccgcatggacgtcatcaccctcatttccaagcgtatcgattcggccggccgtctgcccggcgaatacggttccgaacttgaggacctgcccgtgggggaggagggctactccaacccgaacccgttctgtgcggacggccctcgtcaggatgaattcctggccgaaatgcgtcgcgaggtgttcgccgggcgcgagggcttcctgaccgtgggcgaggcccccggcatcaccgcccagcgcaacgagcacatcaccaatcccgccaacggcgaactggacatgctcttcctgttcgaacacgtggacttcgactgcgaagacaacgtcaaatggaagccgctgccgctcgacctgccccagctcaagcgtattttcgccaagcagcagtcggccgtcaagaatgccggctgggcgagcctgttcaccggcaaccatgatcagccgcgcgtggtctcccgttggggagacgactccaccgagggcagccgcgtacgttccgccaaggcgttgggtctgatgctgcacatgcatcgcggcaccccctacgtctatcagggcgaggagctgggcatgaccgacgtccacttcacccggctggaccagtaccgcgatctggaatccctcaatgcctaccatcagcgggtcgaggaagccaaagtgcagtccgcggaatcgatgatggccggcatcgccgcccgcggccgtgacaacgcgcgtacgccaatgcagtgggatggttccgcctatgcggggttcaccgcgccggacgccgccgtggagccgtggatttcggtgaaccggaatcatacccagatcaatgcggcgggcgaattcgacgatccagactccgtgtacacgttctacaagcggctgatcgccattcgccacgagaatgcgttggtggccgccggcgactggcaactgatcgatgcggacgaccagtacgtctacgcattcactcgcacgctcggcggcgagaagctgctggtggcggtcaacctgtccggacgaacggtcgatctgccgcgcgacgccgccgaactggtgcagcacggggtgaccgaaccggatatcgtgatttccacctacgacgcctcgcacgccgtggtctccctcgccaaccgtgagcttggcccctgggagggcgcggccgtccgcgtgtgagctagcgtatgttgttccagacttttttcgtccttgtctggggaaacgtacgcttacttcagctcggtgtatgttgttccggactgttttcgttcttgtctgaggtgccgtacgtttgcttcgtctcggcgtacgttgttccagatgatggggaaattggtctggggaaacgtacgccaagaggctggtgcctgcttggtgcctgcccggtgtttgttaatgtccaacgtggaaagcccgcgcggctggcgggaagccacgccgcagggccgtcacgccccaaactgggcggccttgctgccaaatttgcggcgcacagcgtccagtgcggcctcggcatcatgcaaacgcgcctgtgaggtctggccgcgggcattgtcggcctcttcgagcatgtcatccagtgaaggctgcacggccgtagccgccgccttactgagcgaagacgtgctcatgccggccaagcgaatagttttgggcaggggagtggcagactccgccgaggccggtagccccagcatgactttcagctgccgcacgcattccgggtacagcacgccggccgtatcggtcggccgctccatcgtaaaagaccgggtctgatagctcaggtcggcgaaccgcaacttcaccgtcagcgtgcgcgccaccagccccttgcgccgcagcgtgctggctacttcgtcgcaggccgaacgcagtagcccacacaccacgcgcatatcgcgtgtatcctcggccagggtttcctcggacccaatggatttctcctcgcgcaccgtggtaatttcgcgggaatccaacccgtgcgaggccgcccataatccacgtgccgcagccggggagccagtggcacgagtcaatgcagcctcatccagctgagccaattcagccaccgaatgcacgccccaagcattaagccgcttctccaaagacggcccgatgcccggaatgccacgcaatggcatcatctgcacgaactcagccgagcaggccgccggaatcagcagcatgccgtccggcttggcattggtcgaggccattttggccaccagtttgttacaggcgatacccactgaacacgtcacgtggaagcgctcggccacctgagcgcgaatccacgcgccgatcgcgctcggccgcccccactccagcagtgcggcggacacatccatatagccctcgtccaccgaaacctgctcgaaccggtcggtgacggtcaaaaacacctcatgcatgattcggtgcgacatcatgcggtaatacgccatatccactggcagaaaaatgccgttcggacacaactgatgggcgcgcgcggccggcatcgccgaattgatgccgtatctccgggcttcgtagctcgcggcggacaccaccgcgcgcggcccggtgccgatgatcaccggcttgcctttgaacccggggttgcgcgccacctccaatgaggcatagaaggcatccatgtcgatatgcagcacggtgcatccggtctcgtcgtgaccccaatcgcgtttggcggcctcaagtctcggtgcggtgctcatgccaccattgtaggaatgccgaacgaggtcatgctcactatgtggcgcgcatggcgcggcgctcattgtcgtaatgccgaatatcgccggaattccaagggtttgcgcactgtgcggctgtttcgcatggtgggtgcgattccacggaatcgtccacattgcgtcactgtccgtaacgccttccaagtcgctgcgcgctgtcccgactctccgagtagcgtaaacctcgtgaagaaggcagtggtcggtatcctcaaccgtgttcccgtggtgcttatcgtgattggtgaggcactggtgatttatttggctacggccgtcgccaaacttgcgttcacccagctcgacccgctgtattcggtgtggtaccgcgtgggattcatggcggtgctgttgctgctgtggtgcaggccctggagcaaggctaagcgagcgcagctgtttcaccgcgacgcccgcggctgggggctggtcgtactgctcggctgctcgctggtgctgatgaataccctgttttatgtggccatcagcaatatggatatgggcattgccgtgtctatcgaatttttgggaccgctttcggtggcggtgattaccggcaaaagctggcgtgagcgggtcggtatcggcatcgcggcggtcggtgtggtgctgttggccggcatatcattggccaatccgtccggcaagggcacgtttttgtatggtctgattgcgattttgatcggcgggtcgatgtggggcatgtacatcatcaccggccggcgcgtggcggctggcggcaattcgctggataatctgtgcatcgccgtgaccatcggctggctggtccagtccctgttccttggcgtgccggctgtggctcatgtggttcaccccaaggccgatgccacgtgggcgcttgagcccggcggctcgctgaagctgctggctctgctgtttgtgatttccctgatggcctcgttcattccctatgtggtggagcagatcacgctgcgacgcaccacatccggcgcattttcggtaatgcaatccatcaatcccgccatggcggtggccgtgggactggcgtttggcgagattcccggcgttggtgaaatcatcggtgtggcgttggtgatttgcgcggttatcgttacgttctccggcgatgccgcgcccgcggacggtcaataatgtgtcgttcggcacgtcgtatccgcaggacgtggtacagtgatttgctgttgcgcattattgcgtaacgtggagtcatgcctgagtggccgataggggcaccctgctaaggtgttagtcgtgtaaacggctcgagggttcgaatccctctgactccgccgattaaggttccgggtgaaagcttggaatcttttttgttttccggaaactcctgatgatgggcctgttcgcacttcgcggagtcagagggattcgaaccccgggaatacggttctggtgggttgtccggatatctgttttgcgacgcattcctgggaatgtgtttctagtgggttgcttgggggtctgttttgcgaaactttcctgggaatgtgtcgctagaaataaccgaaataaccgaaataaccgaggacggtcggtctccgcttgtggtaagcggagtcggaggtacgccattgtccgtccgcctccaaaccgccattttagcgggtgaacgagtgcggcacctcggggaaaggctaacaaacgaaagaagaatgtccactaagtgagacttttgcgtggtgttcgtgaatggtgattgaagattaaccggtttatgtcgcttgtccaatcgcttgcccatcgccttcctccccgcagtgtttgactgagatgggcggtatcctagagagagaagaagagttccgaagggtgggcaaagatgagccatatcgctgggcaggggcaacatcgctccaactcgacacgaaccaaccgtgcggcgctgattatcgtgttcgtgatcacgctcgccgttacgctgggcatcggcgcatggttcgcaacccatcgcacggacggcaatggccccgcacgcgccggagtgtcggacgtcgcgttgaataaagcgaagaacacgcccaaaccggtgaccgaacatcacggcaattcaccggattgcccggatacggactgcatcgccatgctggtcaacggcgatttgttgttccatgagggattgtggagccatttccaaggcccgaaccccaacgccacggatggcaccgccttcaacttcgacccgctgttcgcgccgatgaagcagtacattcaggcttcggacatcgccgtgtgcgaattcgaaaccccgatcgcccagcgcggcggcccatatgccgcgtacccgatcttcaacattccgccggaagtggcggatgccgcccgcaacgtgggatacaacgcctgcacacacgccaccaaccattcctgggatcagggggcggatggcatcgcccgtctgtgggacacgcttgaggccgatggcatcgcccagaccggctcgtacaaaaccgaagccgactccaccaaaccgttagtcatcgattccccgaccggcggcggcaagctgggtctggtcaccggcacggtctccctcaacggcatgaccgccgacgaggactggcaggtggatcgtctgcgcgaagacggcgacccgaatcacggcagcgacatccagcgcgcggtagacaaggccaacaaggcccgcgagcaaggtgccgatgtggtggccatcgccatgcactcggtgcaggaataccttgattacgccgattcctggcagatttcggaagcccatgagcttgccgacactggtgccttcgacgttatctacggtgccggctgccattgtgcgcagcccatcgagaactataacggcacgtggattgtctacggtctgggcaacaccgtcaccgagtcggcgaacacgccggaaaccttggtcaacaaccagggtgtgaccgcacgcatccagttcgccggcaagaagggcgtcaaggggtcgtggcgcgtcaaccgcatcgactgggtgcccaccgccaacgtgcatcaaggcaactaccaatggtgcccgatatccagcgaccatcccataggcacatgttgggacgaagcctacgacgctcagatacgccaacgcatctgggatgtcatctattcgatgggcgcggaccagaacgtcgtcaaggaatggaacatcacgcaggagcaggcggcaaagcaatagttgctcggcttggtctcaaggaggggaagccgcaaggtgacgcttttcccgtcggcctcctaatgtggagcccatgaccgagatttacgaaacccaaagcgaacgcaccgatctgcccctcgtcgtgatgccgtccgtgctcgacgcgatgatcgagcccatcaaggcccagttccccgcgctccacgacgttgcccgcgtgcgtatgttcgaggaattcacgtccgacgaggcgatcgtagccgagcgtctgaaggatgccgacgccctgctggtgggcggctaccacatttcggatgatctgctgcgcaccatcagcgagcaggggcacgtcaagtgcatcgtgttctgcggtaccggcgtcgccagctacatcaatctcgataaggcgcgcgagctgaagatccgcgtctgcaacgccgaacattatggcgatcacgccgtggccgagcacaccttcgccctcctgttcgagctcatccgccgcgttggccaactcgataaggatgtcaaggccggcaactgggcgtgggccggcggcgatggactgcaactcgccggccgtcgcatgggcatcatcggactgggcggcatcggcgccaccgtggccggcatcgcccgcgccttcggcatggaggtcgccgcatggaattcgcatgtgccgcccgagcatttcgaacgctccggcgccactccggtcgacgatctcaacgagctcatcgaaaccagcgacgtcatctccgtccatctgccgctcaacaacgccacgcgcggcatcgtcaccgccgagaaccttgcgcatgtgaagcccggcaccctgttcatcaacaccgcccgctccgaagtcatcgaatccggtgcgctgcttgcccgactgcaaaagggcgatgttcccgccgcactcgacgtgttcgaccacgagccgctgaccgccgacgacgccatctgccatgtgcccggcatcgtcctgaccccgcacgtcggctggcgtaccgacggcgcgttcaaggagctcacccgccagatgatcgcctgcctgaccgcctacttcgccggcgaggactataacgtcgtcgtctccgaacactgatagtcctgtctagcctcgcgctcaatcgaacacccagtcagccgaccaccggaacacgcttatgcagacgattctcaacacgtccgacgatcccgcccacgattcgctcgtcgaaaaaaagtccgaattcatcggcgacgctgcccatgtcgatacgctcgacgaggcgctcgcgttcgtggccgcgatccgcgagcagcatccgaaagcccgacacgtggcgtatgccgccgtgtgcggaggcgcggatgggcgactgtccgaacgcatgagcgatgacggcgagccgtccggtaccgccggcaagccgattctcgacgtactcaagcagtccggcaccaccgattgcgtggttgccgtcaccagatatttcggtggtattctgctgggctccggtggtctggtccgcgcgtactcatccgccgcatcattggcgatgaaagccgcccgcgccgcccgcatcatgaccgccaagcgataccgggtccgtctcgaatacccgcagctggcacgattccagcagattctggcgcagctcggtggcagtcaggaggatgaatcgtatgcggtgaacgtcgagttgaccgcggtggtgccgcaggatgattgcgcgcgattcgaggagtgtgtgcgggaagcgttcaatgccgcggtggtgccggatccgattgacgtggtcaacattccggttccgctcgcgtgacgcctgtatgactaagctgggcatcatgaccgacgagaacaccaccagccagcggacccagcccaccgaggccgcaaccgagactgcaaccgacacgggcgcccagcagcgggaccaaggcgcgcaggacgcagccgagtccgccgctccggtggatttcgaaccgctgaccgctacatacgagcgtctgcgtcattccaccgacccggccgaactgtccgaattcgcccgtcggccgttgcctgaccgtgccgatcaggcggcgttctcccgcgccaccgcacttttggaggctgtggccggcaacccgcacaccccggtggccgatcgcgtgttcctcgccgacaccatgccgttcccgaacgtattggtcaaactctccgaagaccccgaaccgtccgtgcgtcaagccgtggccgccaacggggatgacaagaattggctggtcggccgcctgaccaaggacccggtgcctgcggtccgggatacggcgttgaaaaacaagcgcaccagctggaagatgcggcttgagggcgcgcaggaccccactgcggatgcggagacattggatttcttgggcgtacttggcaccgaatccgaagagggagcaccggcggtgctttcctcgatggtccgccgtgccgtggcgctgaaccccaatacgtccgaagcgatgcttgccaaattggccaacgacccctcggccgaggtgcggcacgccgtggaaagccgccgctaagcacactattgctgtgttttgccgtgcaaatttggccggcaatcaccctctatccaccattgtgagcgctcacatctcactatgtgagggtaaaaagtacataatttggcggaatcacggcattttgcttacggtgtggcgcaatcaaacggcgttagactggggctatgagtgagattaccgagagtgaagagcgtctggcccgtccgttgattcgactggccaagttggtcggtgtcggcacgagttatgtgggcatgagccatgactaccacgagatagacgatgacgtcctgatcgaggtgctggcagcgctgggcatcgacgcctccagcgagaacgcccaactcatcgccatccgacgcattctgaacgagcgttactcccgattggtggcacccaccgtgctgcatatcgccggtagcgaggaccgggtgctggtgaacaccggcattctggacgtgccttcggcgagcatcacgctggagaacggcgagccatatcagggcaccgttgaagttggtcctggagatggatcccaggcctacgacttggatggcacgttcatttcgaatgcgactgtggtcattcccgccgatctgccgattggctaccatacgctgcacgtcaaggtcgccgaccgtgtgcaagacgccactttgatcagtgcacctgatcgcgtcgatctgcttgacccgatgaagggcggcagtctgtggggctggatggcccagctgtactcgattcgctcctccaactcctggggcgtgggcgattacgaggatctgaagaccatgctggtggacgccaagcagaagaccggtgccgacttcgtgctcatcaatccggtacatgccgccgagccggtgtccccgctcaccccgtcgccgtatctgccggtaagccgtcgcctgatcaacttcacgtacatccgccccgaggcgatcgccgaatatgccacgctcagcgcgggcgacaagaacgccgtcgacggactgcatgccgacaccgaaccgctgaacggtgattcccagctcatcgaccgtgacgccatgtggcgcagcaagatgcacgccctgtggattatcttcaaggccggccgtaccgccgaacgccaaagcgcgttcgaccaattcaaggcggactgcggttccgacttggaggcgtatgccacgtggtgcctgtgctacgacaagtggggagcacccaacggcgaggagagcaactgggagcgcaagttcaaccgcaactccccggaaatcgccaatctgcgcaagcagtacccggacactttggacttctaccgctggctggaatggattgccgccgagcagctgtcctccgcccagcaggcagccaaggacgccggcatgcatatcggcatcatgtccgatatggccgtcggcgtgcacccctccggcgctgacgtgtggtggaatcccgagcgcttcgccaagggagccacggtcggtgcaccgccggacatgttcaaccagcaaggccagaactggagccagccgccgctgagcccgatcaatctggaggccaccggctacgagacctaccgcaatatggtgcatggcatgttcgcccgtgccggtgcggtgcgcatcgaccacattctcggcctgttccgcctgtggtggattcccgagaaccggtcggctatggatggcgcttatgtgtactacgactcagacatcatgctgggcgttctggccatcgaggcctctcgcgccggcggcgtggtcgtaggtgaggacctcggcgtggtgccggaccatgtggccgattccctgtcgagccacggtattctcggttgcgccgttgaatggttcgagcagtgcgacggcgtgttccgcgccccctcccagtggcgtccgtgcgcattggcctccgtgaatacgcacgatttgccgccgaccgccggttacctggaatacgagcacgtcaagattcgtgagcgtctgggcttgctgaccggcccggctgaggaattcgaagcctccgcaaaggccgagcaggatgcgatgctggtcatgctggtcgagcagggctatcttgatgccgacttcgccgaacatcgtgaggatcacgaggcggatatcatcgacgcgctgtaccgcgcactgaagggttcgccgtgcaagctgctcgccgcctcgatcaccgacgcggtgggggagaagcgcgcgcagaaccagccgggcaccaacaacgaatacccgaactggcgcatcccgctggccgacgccaagggcaacgtggtaccgctcgaaaccctcttcgacacccccggcgtccaacgcttcgcccaaatcttcaattcctgacccactttacctccctctgacgagccgagtcgttaagcggacagtccagtggactgtccgtagacgaggcctgaacgaagcgatagctgagagaaggcagggaattgcctcaccgtaggcgagtcggttagccgaagtgggtggaagagaaaccataaataggggaagagaagccataaacccaatggagtgtcccctgttgccctatgtcaagcccggcgatatactagtggattgttgtgtttccctaaggggtccttcaaagcgctatcccactcgccatcgaggactttcagggagcccacggataatgaggttcgatgcctcttggatgcggccctgaccaagccacgccaagcagctgagacccggaacacaatatagaaaaggtaatccagtgaaaactttcactccgaagccagctgatctgactcatgactggtatgtcatcgacgccaccgacgtggtgctcggccgtctcgccacccaggctgcaatcctgctgcgcggcaagaacaagccgacctacgctccgcacgccgattccggcaaccacgtgatcatcatcaatgccgacaagattgctctgactggcaacaagatgggcaaggaactctactcgcactccggtcgtcccggtggtctgcgtcgtgactcctacgccgagctgctcgagaagaaccccgagcgcatcatcaagaacgctgtcaagggcatgctgccgaagaaccgtctggccaaggtgcagctcgaccgtctgcgtgtcttccgcggcgccgagcacccgcacaccccgcagaagccccaggtcttcgagatcgcccaggtctcgcagcaggccaagtgaaacctgagaggagataagaatcatggctgaaaataccaacgactcccaggttgtcgagaccgaagaggagctcaccaactacaccaccgagaccaacgctggcgctggcaccggcacctccgcgatcgagccgggctacggcaccggtcgccgcaaggaggctgtcgcccgtgtccgtctggttccgggtgacggcaagtggaccatcaacggccgcaccctggaggagtacttcccctccaagctgctgcagcgtgaggtcaactctccgattgttctgctcaagctcgaaggcaagttcgacgctatcgtcctcgttgacggcggcggcaccaccggccaggccggcgctatccgcctcggcgttgcccgcgctctgaacgccatcgatcgtgatgccaaccgcgccgccctgaagaaggctggcttcctgacccgcgacgctcgcgtcgtggagcgcaagaaggctggtctgcacaaggcacgtcgcgccccgcagttctccaagcgttaatttcgcttgtcctgtaccgagcatacaaaggctctccgtggaattccgcggagagcctttgtgtttgtgtcgtgctgttttgagtgtgactcacacctgtttcatcagcgtgatgctcagcgccggcatggtccagacattgtcgtcgacgggagtgtccggcgtatcatccacaggggcatcaggcatatcatctgatacctcatcccgaggcgcggacgaggtgccgtttgcggcgtgatccgttgctggcatcgcgaatccgatggtatccgcttcatcctcagtcgaggattccgtgcgctgcatggccacttcttcgaccagcgtgcgtaccgtctcgctggcgtccggtacatgctgcgtccaaacggtggtgtcatcgttcaaatcgcattcctcgacctgaatgccatgcccggctcggcggccgttgatttcggccgagcaccatttaggcgtccagtgagtgtctggcggcaggtggaatgtgcggtcgtcagcggtgccgttgaccacaatgcacacgtccacctcactgttggacagcaatcgcatggtgaagctacgtacgcccagatcgaaccagtcacgctccatcggcgtggtgccgtcgggcaggaaccactgcacgcggcttgagggcttgagtaggccgagttgggtcagtcgggtgaagaagtcctcgtggtgatacaggtccagtgatttacgtagcgccaccagtcgagacacggttttcaggcgacgcatttcgcgtgtcttgttggtggaatacatccaatcccacttcagccacgtgatgtcgttgtcttggcagtaggcgttgttgttgccgtcctgtgtgttgcggaattcgtcgccggcgagcatcatcggcgtacccagcgagagcagcagcatgccgatcatgttcatggccgcctgttcgcgtgccgtgatgacgtctggatcatcggtgacgccttcgacgccgaaattggcggaatggttcaccgacgagccatcattattgttctcgccgttggcttcattgtgcttggagcggtatctggtgaggtccgtcagcgtgaaaccgtcgtggcaggacacgaaattgatggaggccggagcgccgcgcccgggttcggtggcgaacagatcggccgagccgcagagtcgcgtggccatctcctgcaaactgatacgaccgaaatcggagccgccatccacatcctcaagccagaaggtgcgggccgtgtcgcggaagcggtcattccattcggcgaacggcacggagaattggccggtgcgccagccgaggttgcccagatcccacggctccataatgagcttcaggttgcccagcagcagatcggaacgcagggcgtagaggaatgggtgatgatgggtgaattcgccttccaggcgggccagcgtgacgccaaggtcgaaacggaaaccgtctatgccgatacgcttggcccagtatcgtaatgagtcgatggcaaaggtgaccacatgcgtgttggtgaagtccagcgtattgccgcaaccggtggtgtcttcgagtcgaccggtattggatttttgatggcgatagtaggccaggtcgtcgaggccgcgccagcagaccgtcgggccttcgacgccgccttcgcatgtgtggttgtagaccacgtccatgatgacttcgaagccggcctcgtgcagcgcgcgcaccatgtctatgacttcttggcgcacggcggccgcgcccttctcttgggctgctttggtggcataggagggttcgggggcgaagtagctgagggtggagtagccccagtagttcttgcggccgtgttcttgcaggaagagctcgtcctgcttggccataatcggcagcagttcgatggaggtgatgcccaatccctgcagataggcgagcgttgtggggtgggcgagtccggcgtaggtgccacgcaacgctttgggcagccacggcgcgttggcggtgaagcctttgacatgcatctcgtagatgacggttttgcgccacggcacatgcgggtgctgcgggtcgccctcatgcttatggatatcgcgatcgtcgatggccacggacaccggcacatggccgagcgagtctacggtgctcatggcaccgtatgccgagccggttaccttgcgatccacgacatcgcattcataggagaaggcggcgggggtgagctccatggagccgtcgatgcccttgccatacgggtcaagcaggaatttgtatggattgaagcgcacgccgtgtttcgggtcccatgcgccgtccacgcggtagccataacgcatgccgtcccatgctttgggcaggtgcacgtaccacaggccgtagttcggtccggtcatgcggaacagggtctcgcgcagatacaaatgttcgataatgcgcgtgcacaccggaaactcatggatctgctggatgaacgaggcgttcgggtcttcgaacaggcggatggcgtcttggaagaaggcgccgggctcgtcaatgggctccagcacacacagccaaacctgatcggcagtttcggaacgaacaacgacgtcagccccaccgtcgtcagtgaagtacagccctgggcgagtggcgtaacgatgcaacggtgggtttttcatacctccattgtagacgtgttgtcacttctggtggaagcccttgatttcctgccgcgttccgcagcaccacagatatcgtcgagataattctcggcgaatcgcaatgcggcaccgatgatgttctggtcttcggcgcagtagctcttgcgcagattgaaatggtcggtgccgaacggactgcgtgcgatgacgcgcgccttcagatcctcgatgtcactgtcttcaagatgctgggctgcttcaccgccgacaatcacgtcgcccgcgatgatggatcgcgcgttgacgatggcctgcgccacgtaatccagccattcgtccatgcgctcgcgatgatgccgttcaccctgctcaagcacgctgaagaagccgggaatactttcgtaatcctcgggcaaggtctccggcgagcagtaggtgtccatgcaaccgcgctggccgcagtagcattcgcggccgcccggcaccagcgtcatgtgttcgatggcgccattgcacatattcggaccctgatacagcttgccgcccacgatcaccgcgccgcccgggcgtcgctccagatagacgcacaccgcatcggtgagcgtggagtcgaaccatagctcgaccatggcggaggcatcggaatcgtggatcatcatgcacgggtaatggaccgactggctgatggtttcgagcgtaagccccgtgttgcccataatggtgccgaaggtgatggtggtggcgtcgggggagaggatgccttggatggcgaacgagacgccgagcactttgccgtgcttcttttcgacgtcggaggcgaagttgttgatgatgccgccgatacgctggtagtaaacgttggtgttgcggtaaggcagggcatcgttgcgtttttcgatgacgttgccgtacaggttaatcgcgcacaggcgcagttcgttggaccgcatcactacgccgatggcagtgcgatgatcgggattgaactcataattttgcgccttgcgcccgccggtggaatcctgcagttcgcctttgcggatgagtccgtcatcttctagggcgcgcagattttgggtgatggtgggcaggctgaggccgagttcgcgttccagttcctgcttggtgacatggctatggccatacagatactgggtcatggcactgcggttgtgcgctttcactgcggtcgatggcattgccctcatatttacccctttgtgcgatgagatatatgtaagtatactttatgaaagtggctttcatgtgcttcgacgcggagattatgaggcaacaatcgtatatttgtaggcgattttgggcacttttttaaaccaattttctagaaatgtggagaaaatgagtacttttggaaacttgatttaagaaagttgtcggattgcgttgtttgcaagcatgtgattttcggtaaaaagtgaacaaaaagtaccaaatcgccgaataaagtgaggatttgttcgatatttcgcacaactcttaacaaaaactgttcaatatcgcacgtgaaacgccgtcgattttgtgcgtatgcatcgcgccggaccgttcggtatattgtgactcaagtcacatatgcaatgtgacaacgcatcaccggtcattttcggttactgaggcggtatcccgctggtgcaactgaggtgacgaggcgatggcccagaactttgccatataccccaagaagatcgaggaggaccccaagtggcagaagcaaagaagaaagtcgaagctgccaatccgaccccagaagagaagcaggccgcagctgaggccgaagttgacgcgctggttgcccgcgccaagaaggctctcgacgaattcgagaacctcgaccagaagcaagttgatcgtatcgtcgccaaggcctccatcgccgctctgaacaagcacctcgttctcgccaagatggccgtcgacgagaccggccgtggtctcgtggaagacaaggccaccaagaacatcttcgcctgtgagcacgtcaccaactacctggccggccagaagaccgtcggcatcatccgcgaagacgacgtgatgggcatcgatgaggtcgccgagcccgtcggcgtggtcgccggtgtcaccccggttaccaacccgacctccaccgccatcttcaagtccctcatcgccctgaagacacgctgcccgatcgtcttcggcttccaccccggcgcgcagaagtgctccgtcgaggccgccaagatcgtgcgcgacgccgccatcgaggccggtgctcccgagaactgtatccagtggatcgagcacccgtccatccaggccaccggcgcgctgatgcagcacccgggcgtggccacgatcctcgccaccggcggtccgggcatggtcaaggccgcttactcctccggcaagcccgccctcggcgtgggtgccggcaacgccccggcctatgttgattccgatgtggacatcgtccgtgccgccaacgatctggtgctctccaagcacttcgattacggcatgatctgcgccaccgagcaggccatcatcgcccacaaggacgtctacgaccagctcatcaaggagctcaaggtccgtaaggcctacttcgtcaacgccgaagagaaggccaagctggagcagtacatgttcggctgcaccgccggttccggcgtcaagcccgtgctgaactccgtggtgccgggcaagtccccgcagttcatcgccaaggctgctggcttcgagattccggccgacgccaccattctggccgccgagtgcaaggaaatctccgacgacgagccgctgacccacgagaagctcgctccggtgcaggccgtgctcaaggccgacaacaaggagcaggccttcgagatgtgcgagaagatgctcaagctgggtgccggccacaccgccgccatccacaccaacaaccaggagctcgtgcgtgagtacggcgtccgtatgcacgcctgccgcatcatctggaaccagccttcctcccttggcggcatcggcgacatctacaatgccatcgccccgtcgctgaccctgggctgcggctcctacggcggcaactcggtgtccggcaacgtgcaggccgtgaatctcgtcaacatcaagcgcattgctcggaggaacaacaacatgcagtggttcaagatcccggccaagacctacttcgagccgaacgccatcaagtacctgcgcgacatgtacggcatcgagaaggccgtcatcgtgtgcgataaggtcatggagcagctcggcattgtcgacaaggtcatcgaccagctgcgcgcccgctccaaccgtgtgaccttccgcatcatcgactacgtcgagccggagccctccgtcgagaccgtcgaaaagggcgcggagatgatgcgcgaggagttcgagccggacacgatcatcgcggttggcggcggctccccgatggatgcctccaagatcatgtggctgctctacgagcacccggaaatcgccttctccgacgtgcgcgagaagttcttcgatatccgtaagcgcgccttcaagatcccgccgctgggcaagaaggccaagctcgtgtgcatcccgacctcctccggcaccggttccgaggtcaccccgttcgccgtgatcaccgatcacaagaccggctacaagtacccgatcaccgactacgcgctgaccccgtccgtggccatcgtggacccggtgctggctcgcacccagccgcgcaagctggcctccgacgccggcttcgacgccctgacccactcgatggaagcatacgtgtccgtgtacgcgaacgacttcaccgacggcatggccctgcacgcggccaagctcatctgggacaacctggctgagtccgtcaacggcgagcccggcctggccaagaccgacgctcaggagaagatgcacaacgccgccaccatggccggcatggcattcggctccgcgttcctcggcatgtgccacggcatggcccacaccatcggtgccctgtgccacatcgcccacggccgtaccaactccatcctgctgccgtacgtgattcgctacaacggccagattcctgaggagcccacctcttggccgaagtacaacaagtacatcgccccggagcgctaccaggacatcgcccgcaacctcggcatcgacaccggcaagaccccggccgaagccgtggagaacctggcgaaggctgtcgaggactaccgcgataacaagctcggtatgaacaagagcttccaggattgcggcgtggacgaggattacttctggtccgtgctcgatcagatcggcatgcgcgcctacgaggaccagtgcaccccggccaacccgcgcatcccgctgatcaacgacatgaaggacatcgccgtcggtgcttactacggcgtctcccaggcggaaggccacaagctacgcatcgagcgcgagggtgaggccgccactgaggaagcctccgagcgctgattgcaggcggttggcggctgctggcaccagcagtagccaccaaccgcggtgttgcagcttagtggctgcatagcggacacaaggagcccgaccccattacaggggccgggctcctttgcatatgtggtgctccctcagccggcaggtgcctccatggggcggtaatctactcatggggcggtaacttgcccatggggcggtgaaaaccccatggggcggtgtacgaaaacggctctattctgcggaaggtaaaattttaccgtccgccccatgggctaattaccgccccatgagggaattaccgccccatggaatcgctgagcgtcgctaaatcaccgcaataatgcagccaaaagcaataaagctggcaaacgcctcggtaatgccggtcaccacgggcttcaaggttgtgcgccgtgtaaccaccggcaacgcaacggcgcgggccaacagcagcacagtcatcgcaatcagatacgggctgcgtccagccggcacggcggctagcagcaatagcgccacatgccatacccacgaagccgccacgtacgaacgcttcccgcgttcccggatcatggttttgaccaccaaaaccgacccatactgcgtcagcgcaaacagcacggtggcaatcagcccgttcacgggcaatgaacccgcaggccaccaggcgtgaaggtcgaatatctggctcaaatctggcatattccgaatcgcggcgcgtgcggcggtgacatcagcggctgcgcacgaggcatgtgctgcgttgatgggaataacacatgccgtctcaacagcgttgccaaacgacgcgatcaccgtggccatggccgatgcggcaatcaccgacacggcattgccccacagcgagcgctccttcctcagccacgaggacagcatcgacagcgcaaccagcactatatataaaggagcccaacgcagtatgccggtatgcgtaatcaggaatggcaagccgatgacgatgagcgctacggcataagtgagcatcggcggcagataacggcgtgaaaagtgtgctttgaaccagtgcgcggcgctgaactgcacgcaatagcacacggcccacgtcgccaacagccaaagcgtatcaagattaggcccgccgataaagaagccagccacagcgggcagcataaccattacccatgcgccaggttggttgtcgaaccaatcgcgtttaagagtcttgcggcgggaagccatatctgtcatgatatcgcagcgaatggttctcaataagaaagatgtgagacctgcattgcgacaatcgaacataggaagtgcgagaagccagtgcttccgccattatgcaacatgtgcgattgttcggaaatgttcatttggctcacattgtgtttatgtgagactaatctcgttgagtatcgccctcggcgctggaaatggcctcggctatcggatcttggctgaagtcgtggttgcgataatcagggtcgtccaccggcagatgctgcaccaaggtatcgaacacctgactgtagattttgccgcgctcgagcaccgcatcgagcacatggccgccgaacgtcttgtcgtcggacaggaagtgctcgtggaatccggccacagccgcgccgtgaaacatcacgggggagaagtacccgagcatggtgcccttgacgtcgtggcgcaggaacacggcctgccggtcggccacctctaccagcgtggggtagggtgcctgctgcttgatgaccgcgcgtgtcttgatgaagctgaacgtgccgcgcacaattaccgaaaagaacgtgttcgcgcggccgttcgccttgacgatcttttcgttgagctcttctaggccgatatcatgacgctcgcactggtactggaaggccgcgcgatggctattagcgaatggcatggtgaagtcgtccggcacgcgttcggccacaccggattggcctatcttgtatgccacgccatccaggatgatgagctcgccgtccaagccctcgccggtgccgatgccggtgtcgccatgcttgagcaattcgccgatggtggtggtgccttccagcagccccggcacgagtaaggccaaagtgccgtgctgatataacacgttggcaccgtgctcacgaataggtttgatgttctttgccagtgattgtgtcacgagccttaagagtaattcgcgtcaccgtccaactcaattaatcaatccatattcgccaacgtgagctgtgccactatatataggtaagtctcagaaggatgttggtaggcgacgccgagcggctatgccgcgaggtaatacgaacggcatgagcgcgacacgcgcgaattcctccgcgctgtcccacctcaatgcttgaataaacaagttgcctgatttgggctcgcaaattggaattaaaaaagcgagcgcgggccgggagccacttcaagtgaagtgacagccggaaaccgcgcactgatgtcggatgaccgccagaggacgtatgtccaagggaggccatgcgcgccggtgccctagaagcaggttggtaaacagtacaacgaacatcgctagaaagggcggacggcaatggcgggacagaaaatccgcatcaggcttaagtcctatgaccacgaggtcatcgaccaatcggcgaagaagatcgtcgaaacggtgacgaacgcgggcgcaactgttgttggccccg

SEQ ID NO: 1071 - DNA, 10614 bp, Unknown
  R13_10m  MAG No. k141_4748
acggattgccggggccatttggtctggacaatccgttgtttcgcgcgtgttttgtagcatccgtggagttacatggggagtatgactgaaaacatcgctgataaggccataaacgatactcgtatcgtcaagcagttcaccaatcccgtcaaggagccgattgacagcgacatcaacctgttcgatctgctcgataaccgcgccaagcgcgatcccgaaggtgccatgatcgaatacaagggcgatgatggcacctggcagccgtacagcgcccaggtcttccgtgacatggtcatcgatctggccaaaggcctgattggtctgggcgtcaacaagggcgactccgtggccatcgtgtctcgcacgcgttgggagtggaccgctctggatatggcgatcatgtccatcggcgcactcaccgtgccggtatatgagaccaactccgccagccaggtcagctggattttcaacgattccaaggtcacgctcgccatcgccgaggatgacggtcagcgcgacaagattgaatccgtgcgcagcgaggtgcccaccctgcgcaacgtgttcgtcatcgaagcaggcggcctgaacgccatcaagacctatggcgaaagcgtcaccgatgccgaattctgggaatacaagaacgcctcccacggcgacgaccgcgccaccatcgtttacacgtccggctccaccggcaccccgaaaggcgtggagctcacccaccgcaacttcgcgttcctggtgcgctccgccctgcagtacatgcctcgtgccggcgcatggcccaaccgccgtctgctgctgttcctgcccctgagccatgtgttcgcccgattcctggaattcttcagttttggcggcacgatttcgctggccttgagctccaatatgaagacgatggtcaaggacttcgagaccttcggccccacgctgctgcttgccgtgccgcgtgtgtacgagaaggtctacaatgccgcctcccagcgcgccggcaccggattcgccggcaagatgttcatgcgcgccgccgagaacgcgcgcgaatggtccaaggccgagcagaaggacgagaagctgccgcttcccggtcgtattgctcacgctttctacgagcaggtggtgtacaagaagattcgtaccatctttggcccgaacgccgactttgccgtcaccggtggagccccgatggattccgagctttcccacttcttcaacggcatcggcatgccggtgctggaaggctacggcatgacggaaacctgtggtccggtgtgtgtgagcttgccagaggacaaccgcatcggcaccatcggcatgccgatgtgcggcatcaccgccggcatcgctgaggacggcgagctggtggtcaagggaccgctggtgtgcaaaggctaccacaacaaccccggagtcaccacccagcagatcaccgatggctggctgcacaccggtgatctgggcgatatctccgaagacggcttcatctccatcaccgggcgtaagaaagacctcatcatcaccgccggcggcaagaacgtgtcgccgggtctgcttgaggcttccgtgatgacctcgcccgtggttaatcagtgcttggttattggcgataagaagccgttcgtggccgctctggtcacgctggatctggcggatgccaacaactggttggaatcccagggcgccaaaccggaacccgatctggcctcgctggccaagaacgccatcattcatgccgaggtagagcgtgcggtgaacgccgccaacgagggcgtttcccgcgccgagtcgattcgtaagttcgagattctgccagacgaattcaccgaggccaacggcatgctgaccccgagcctgaagacccgtcgcgcgcaaatcgttgagcactatcgcgagctcattgacgacgtgatctacgtgccgttgaagaagtagctatcaactccctctgatccaaaaaaataagctctctctgacgagggagctgtcagccgcaggctgactgggagagaccgcggctagcccgcgaaacaacaaggccgggtgcgacttgcacccggcctcagcttattcagtccaaaatcgccgaaacataatcggcggcggcctgatccagctccgcatcgccgatggtggcggtgccctgcaccaggaacggctcagcatagttcatgccgatcttgtacgccacgacctcaaacgggctcagcagctcctccatggtgtggctgtactcgccatccttgcggtacttggcggcgtcggaaccagtggtgaccaccagcttgagctccttgcccttgagtgcgtggcctccaccgtaggcccagcctgcggtgatgacctcgtcttcccattccttgagcagcgcgggggaggagtaccagtagaacgggaactggaggattacgcggtcggcggcctccagtagctcgtgctccgtgtcggcgttgacggagaagttcgggtattcggcgtattcgtcgcgcacgatgatgtcgtcctcgccttgtgcggcgagttcggcaagcagacgggcgttcactcgcgagccgtccttcaggtgcggatggaatacaagaatcagcgttgacatgggatttcccttctataactgctaccaatgtggcctaatcaccactatcgtatgccgggaagcggaactcagtctagtccggattcaggtgcgagccgcgggatgccgcggatgagtaattgacgcgggaaaggatgctgactgatgatttggcgctgaagcttcagtgggccgcatatacgagtcctaaagcggataggatgggatatgacgcggatatcgtcggtggactgaataacgggaggcgcacatgaccatgaaccgcatgctgatgtgccgtacccatccggtaatggagttcgagtatttcgaacgcggcggatacgccctgagggcaggggagatctacgacgagtcccgaatcccgatcggcatgtatgtggacggcaaacctgagcccaccggtgagtcgattaccgggtggtggcgttctcgcggcattcccatgacccgtgacggtatgcgttccgtatttgccggttcgggtatcgcttcgacgaacgatctgctggaccgttccttgggactcagcctgtcggaccagtattgggtgcggcctctcgaccggcccgatctgacgtgggaaaaactgaactttttccacaacgattttgacgaacgacttgggcaggccttattcttcggtaattcgtcgcgcatcggcaacgtgaacaccccggatgtcaccagtgccggtgacctgccgaaacgttggattatcggtcccgatggcgtccgcagcctgatcaagggagggcgcaccggtcaggagccggacaacgagcgcatcgcctggcatacggcacgactgttcggcatcgaccatgtcgaataccgcatcggccgcgccaagggcatccgggtctccgtctgcgatgaaatgctcgaagacacgcaagagctgattcccgcagggcaggttatgcgcatcttccgacgcggcgacaacaccgaacgcaagatgatatggctggacgcatgtcagcaactcggcgtaagtcatgatacggcaaatgcggcgaccaacgattttctgttccttgattttcttctgcgcaacaccgaccggcattacaacaacttcggtctcatccgtgacgtcgaatcattcgagattcgcccggccccgatttttgacagcggcgccagcctgtggaacggcatggaccccgaagccatcaccaacgaagactacccggcgaagccgttctgggtcgacgactacggcgatgcggacaacgcctactggcagttgggacttatcgacgattgggaccgttatgatttggggatgctcgacgaggtgcctgaactgatacgggcacagctcgccaccaaccgccggctgtccgctgatgtgattgacgccatctgctccgccatgcaggagcgcatcggcatcatccgcaagcttgcacgatgatgccgcgccgggaggcaactcagtcgaggttggactgcgtgcctgcggtggcttcgttggcggcttgctcggcttgtgcctggtcgagcttggctcgtacgtcgttgagcaggccctgggcgcgcttggccaaggcctcgccgatttcccattgacgcatcgactggtcaagattgaggccgccggtttccagtgcctggacagcctgaatcagcttgtcgcgcgcctcctcatatggcatctgggcgatgagctcgcgttccttgtccgtcagggacgaggcgggggtgttcttgtcggtgggtgtggtgttctcggtcatcttgttctccttatatatacggtatatatgcgtgaatgcatatggtgcattacgcggttgcggttgcggatgtggcggtggcggtaatgacgccctttttcagggtgacggtgatgtcatccccggtactgacccgcgaagcgtcatccagcacgtagccatcggaggactgcaccaccgcatagcctcgattcaatgtggattgcgggctgagtgcggtcagtgaggcgtgagctcgctcgacggtgagctgggcatcgtccacgatgcgtcgcaggccgatgtcaagccgctgcagggaatcgtcgatcagccgctgatgcggttcgagcatggtatgcggttgggtcaggcttggccggttcgcatatccctcgataagtcgaatctcgttctccacgcgcgaacggacccgcagtcgcatacggtcgatggcaccttcgatgagctgcgactgctcacgcacatccggcaccacgcgcttggccgcatcggtgggggtggaggctctaagatcggcgaccagatccagcaacgtccagtcatcctcatgcccgatggaggagattaatggtgtggtgcaggcatacgccgcacgaaccacacgctcatccgagaaaccgatgagatcctcaaacgagccgccgccacgggccacgatgatcacatccacgctcgggtcggcatcgagttgtgcaatggcctgaaccacttcggccgggcattgctcgccctgaacatgcacatggaccaccttgaaggttacggaaggccaacgaaggttcacattggtgatcacatcgccttccgcgcgtgcctgaggtgcgcaaatcaggccaatagtcttcggaaactccgggagaggcagtttgtgatcggcatcgaacaggccctcgcccttaagctgcttgcgcaattcgtcgatcatggccttgaggctgccaccggctccgaccttgagaatcgtgtccccgcgcaacgacagcgaagtgcgcttcatccacaggttcggtttgccatgaatcaccacgcggtcgccctgaacgaactggctggccgcggccgcgaacctgccgaagccattgacttccatggcgatatcctcgaagtcgtcgcgcagcgtgatgtaggccgagccggcgcgacgggtattgatctgcgtgatctggccggtgacccacgcggacggccatcgttccacggcaccgtagaacttctggctcagcacacttaccggccacggattttgcgcgctggtttcagcggcgcgtgcaggcagctgatcgatagggcgaggctcattcggcagattgatggtgccctgatcaggcgcgaaagtgccttgacccggctcaaagccagccgaggccagtgaagcggcggtcggtggacggccggtagatgggtagcccattgcagtagtcatgcactccactataagtgcgttggttgatgacggtaaatatttaccgtcgcctgaaaacggtgtgatgatgaatgcgagaaccgtacgaagcgatgtatcagccgatgatggagatggtctggtgcatcagaagaaaggagtcattatggcgaagaaacgggtgctatgaagaggagtgagatatgcgttgcgctgacgattgagagtcgttagtgagctcgctgtgcgacacgcgagcagaaaacagttacgctaatcacacacttgtggttttggcggaaaatagccgaaaaccctataaatagttcgacacaccactgttgagcactagatatagtggtggagatgccgtattcttctagaggttcaaaaaaacgacatcaatgtaatttcgtgtggcccacgtcgagtgcggccaaaatgcggaactcaggagagtgttcgccttataggaaaggggtgcccgatgggcgcacaggtgttggaggaaatcgtcaccgataacgagaccaaggtggccgccaaggcctccaccgtgctcgttgagaagcgtgatggtcgtgtggtcgacttcgaccccattaacatcatctctgcggtcaagtctgctttcggtgacctgaacaaggaagtcggccccgaagaagatgccatgatccgtggtttcgccaaccaagtcgaaggcgaaatcaaggggcgttacgccggccccgccaagatcgaggacatccagaacctcgtggagcacgccctcattgacgcccacctgtacgatgtggctcgcgcctacaccaactaccgtctcgacaaggacattcagcgtgccaaggccactgatgtcaacgaggccgtttcccgcttcatcaaccacgacccgaccctgattcacgagaacgcgaacaaggattccaacgtctactccacccagcgtgatctgctggccggtgccgtgtccaaggccgccgcgttcaacatgctgccgccggcggtgtccaacgcccacatgaagggcgacattcacttccacgatgccgactactcgccgttcactgcccagtccaactgctccttgccgaacttctgggacatgttggccaatggcttcactcttggcaacgctccgatggcttccccgaagtccatcgccattgcggccacccagattacccagatcatgaaggacgtggcctccagccagtatggtggccagaccgccaaccgtgccgacgagcatcttgcccagtatgccaagaaggattacgagaagttcctcgaggaagctcgtgagaccatccccgacggcatgccagttgaattcgcccgtcgtcaggtcgagagcgccaagaggaacgagcccgccaagctgcatttcggttcccgcgaaccgctgccgatggacaccccgttccacaccgacgttgacgaacttgagcaggagcgtgaaattctcgccaagattcgtacccgcaaggccatctatgatgccatgcagaccatggaataccagatcaactccaaccgtgtgtccaacggccagaccccgttcgtgactgtcggctttggtctcggcaccgactggttctcccgcgaggtgcagcgcgcgatcctgctgaaccgtattcgtggcctcggcaaggaacaccacaccgccatcttcccgaagctcgtctttactgtgcagcacggcgtgaacgccgacccgggtgacccgaactacgatctgaagcagctcgccctcgagtccgccaccaagcgcatgtacccggatgtggtgttctacgagaacatcgtcaagatcacaggctccttcaaggctccgatgggttgccgctccttcctgcagggttggatcaacccggagaccggcaaggacgaggaggatggccgtatgaacctcggcgtggtcaccgtcaatgtgccgcgtatcgccatcgaatcccacggtgacaaggctcgcttctggaagctgttcgaggagcgtatggaagtcgcccatcaggccctccagttccgcatcatgcgctgcaaggaagccaccccggtcaacgccccgaccctgttccgcttcggtgcgttcggtcgtctcggtgccaacgacaacgtggaccagctgttcaagaacgagcgtgccaccgtgtcgctcggctacatcggccttgccgagaccaccgcggtcttctacggtaagaactggattcgcgaccacggctgggatccggaaggcaaggagttcgcgctgtccatcgtcaagcgcatgaacgagctgtgcaagcagtggagcaaagcggagggctaccactattccgtgtactccactccggctgaatccctgaccgaccgcttcaaccgcatggaccgtgaaaagttcggccgtatcgaaggcgtgactgaccacgacttctacaccaactccttccactacccggtgtggttgcagcccaccccgatggagaagctcagctacgagaaggacttcccgtactacgcttccggcggcttcatcaactactgcgagtacccgtgcctgcaggacaacccgaaggcgctcgaagccgtgtgggattacgcctacaacatcggcatcggctacctgggcaccaacaccccgatcgaccactgcttcgtgtgcggcttccagggcgacttcgagccgaccgaagaaggcttcaagtgcccggagtgcggtaactccaacccggacaagtgcaacgtcaccaagcgcacctgcggctacctcggcagcccggtccagcgcccgatggtgcacggccgtcacgaggagatcgcccaccgagtcaagcacatgagcggcgaaaccggtcgtgtgacgctggatgacggcaccactcgcgagtggttcgaagaggccaagtagggttattcgtgagtaggctcccctctctgaggggagctgtcagcaaagctgactgaggggagtccgaagagctattccgaagctcccctcagtcgcctacgacgacagctccccctcaaagaggggagctaatgctttccgcaaggagggaatcatgccggagttgcatacgaccaagcccgaacccaagcgccatgactttgcggccagcgagaccgggcgtggcccctccgtaccctccaacggtcttgccaacgatccgaaagccggtcaatgggatggccggcgcatgtccaagcggatgatcgccgactacaaaaccttcatcgtcaccgacggagaaggcgtgcgcaactccctttacgtctccgggtgccccttccactgcgtcgactgcttcaacgcctccatctgggacttccaagcaggccacgaatacacgcaaaaacttgaagacaagatcatcgaagacctgaaagcgccatgggtgcaaggcattacgttccttggtggcgagccattcctcaacactcctgtgctggtgccgctcgcacaacgtatccgtcaggaattcggccataccaaagatatctggtcgtggaccggctacacatgggaagagctcatgcgcctcggagaaacaccagacaagcttgaattgctgcatcttatcgacatcctcgtcgacggccgctacctcaaagaccagaaggactcgctgctgcaattccgcggctccagaaaccagcgcatcctcgatgtgtccaagtctctggaagccggcgaaccggtcatctgggccaagctccacgatcaagaacgagatatccccgaaatctatttgagagaccgcgaagccggcgaaggccaacaggcctcgtagtagcaggtccggaatgccgcactcagcaatatcgtcggaactgttggggaacgcccttcccgtgagcgaaatcaccatgcccggcgtcacgttgggcaggtggtcggactaatattccagaagaagtagccgggcgaagccgtccgcaggtatctgccagccatcccgaaacggctcatgatgcctgaaggcgcacatacccggaagtcggaattaagaggaacacatggttgacatcgtcactgacgcgagcgtaaagcccgcttcacacccgaagcccctgcgtgtgggattggacatcggttccaccaccgtcaaggccgtggtgcttgatcagtccgattccctgaaagacaccctcttctccgattaccgacgccaccacgccaacgtgcgtgccaccgtggccggcctgttggtcgacatccgtaaagagcttgtggaactaggtcgaggcgatgagccgattcgcctgtctatcaccggttccggcggtctggcgcttgctgacaatctgcatgtgcctttcattcaggaggtcatcgccgaaaccgaggcgatcgacaaggaatacccgcaggccgacgtcatcatcgagctcggcggcgaggacgccaagatcacctacctgaagcccacgcccgagcagcgtatgaatggttcgtgcgcaggcggcaccggcgcgttcatcgaccagatgtccacgctgcttgacaccgacgccgcaggcctcaacgagatggccaagagctacgagaacctgtatccgatcgcctcgcgttgcggcgtgttcgccaaaaccgatctgcagccgctgatcaacgacggcgcggccaagcctgatctcgccgcctccatcttcaccgcagtggccacgcagaccattgccggcctggctgctggccgcccgatccacggtaccgtcatcttcctcggtggcccgctgttcttcatgtccgaactgcgcgccgccttccagcgtgcccttgaaggcaaggtcgacgagttcatcgtgccgaccgacgcccacctgtatgtggcctacggttcggcattgcaggccgacatggattccgacgatcaggg

SEQ ID NO: 1072 - DNA, 35117 bp, Unknown
  R13_10m  MAG No. k141_4940
accgccccatgggtaatagggcaatatgtgagttcactccacgtccacgccgacggcgtcggagacgtgctcgaatccgtcgcggcgcagcagctgggccagaccgcgcttcaacacggtgatctgctgcgggcctcggtacatcagcgagctgatgaacatgactaggctggagccggaacgaatcttcgcataggcttgctcgggggtaaagacgccaccgatgccggcgatggcgaaccggtcgccatactccttatacaccttgcgaatcagctcggtgctggcgttggtgcacgggccgccggacaggccgccctcccaatcgcgcggaatctcgaggccggtgcggtccttctgcagattggcgatggacagcccctgcacattgtgctcggccagcacatcgagcagctccttgtactcgccccacggcttgttcaacggcatcttgaccagcgtgggctgcgggcggtcgatcttgtcgagcgccgtaaacagacagtcgagcgcttccggagtcgcggtgaacggttcgccgacgtgcgtgttcgggcaggagacgttgacctccaccatcgcggtgcggccggcggcgcggcgcatcgaaatgcagtaatcctcaatgccttcgtccaaatcgccgcactggtcgtcgttggtgcgggcgatcgacacagacagctgcatctggcgggcctgagtccaagccttctcggcgcgctcgatgaccttgtccgaaccgatgttggcgaggccgacgtgcaccatcatcgaatcgtattcaggcagacggtggaaccacggcttggcgttgcccgggcagggacgcgaggtggtggagcctacggtttcaaaaccgaagccggcatggtccagcaccacggacatgtcgcagttcttgtcgaggccggcggacaggccgaacgggttggtgaaatcgacgcccatcacattcgtttccagaatggggtcggtgtagtcgagcatcagctgctcggcgagcagcagcggcgggacgttcttgacgacgtggcagaactcgatcatctgatcgtgtgcctcatcggggcggtggttgaacacgaagttcggtttgatgatgtgcttgtagccgaaggtgaacagatcggtggtggctttgttgacggcgtcgtgccagaagctttcagaaacgtaagtcataccgcctattgtctcacgcttgggctggtgcggctaggcgattcctgcctaggcgaattggggaaggggctaccgcgtgtcgaggcgcacgcaggcgtcggctcggcagaagatacatgaatcgggatgcaccaggtatcaggcgtgactcgccgctgagcaacgcgctcgggagagtcgtcggtcgtgagtcatcgcgctagtggtcgctgcgagaatatcggttcgcacaatgtgcgattttgcgcggttttgtggaaatgaacacctgaattgcccggaattttcgagagattgtccccaaaacgctcaagccggtttggtttgtgagcttttgtgtgcgataatgttcacatgatttcgtcacaacgtcagcacctcatcttgagcaggttgcgcacgcgcggggcagtgcgcattacggcgctatcgaaggaactgggtgtgtcagcgatgaccatccgccgcgatatcgccgaacttgccgacaagggactgctgaagcgcgtccatggcggcgcggtgactaccagtaccttgctcagcgaacccctgttctctgtcaagtcccagatggatctcggcctgaaggacgccatcgcccaggaagccatcaaatatgtggctcccggcgatgtgatcgccatcggcggcggcaccacggcctatgtcttcgcccagcatctgctcgaatcgcagcagtccagcggcatcaccatcctcaccaattcgattcccgtggccgaactggtccaggccctcgaatccaaggacgtggaggtgatcgtcaccggcggcgtgatcacccgatcgaactcgcttgtcggtccgatcgcggacaaggtcgtcgcctcgctgcgtgtcaacaccgtattcctcggcacccactcggtgtcgattccccgtggcttcctgatgccgaattcgctggaagccgcaaccgatatggcgatgatggacatcgccgatcgtaccatagttttgaccgatcacaccaagtggagctgcacatcgctgtcgctgtttgcgcgcttcgaccaggtggacacggtcattactgacgacgggctcgatcccgactccgccgccaaaaccaaggatttggtaaaggaactcgtgctggcccaccagagcgagatcattgaggaaagtgagtaaacccatggctgatttcgccaactacacccccggggagtatgcgaaggagcacatccgcatcacgccgacgacgcttgccgacggtcgtgacttcttctacctggacgacgaccccgagttcgtctccggtgccaagacccgcgagctcaaggacccgcgcccgctggactaccgtttcgccccgcacctggacgccgacggcaacgaagtgccgtacgccgccccgcagatgcgccgcgacccgctgaccggcgactggatcccgatggccaccgcccgtatgaaccgcccgatcaccgccggccccggcgctaccgccaagggcaacccgctggccgcccgcaagcccggtgacccgtaccaggacggcgaagtgccggacaccgactacaacgtcgtcgtgttcgagaaccgcttcccctccatggtgcgcgtgcccggcgtctccgaggacgtgacctacgttgacggcaacccgctgtgggagaagaagctcgccgccggccgctgcgaggtcatctgcttcgacccgaacgaggatggcctgccggccgatctgccggtctcccgcctgcgcaccgtggttgaggcatgggccttccgtaccgccgaaatctccaagatggaaggcatcgagcagatcttcccgttcgagaaccacggccaggaaatcggcgtctccctcgctcacccgcacggccaggtctactgctacccgttcatcgccccgaagatggagaaggaactccagcacaccgaggcctaccacgagaagaccggcggcaacctgcttaaggacatcatgaacgccgagctcgaagccggcgaacgcatcgtgatgcgcaaccacagctgggtcgcctacgtgccggccgccgcccgttggcccctcgaggtccacgtggctccggtgcgcgacgtgctcaccctcgaccagctcaacgacgaagaacgttgggaccttgcctccatgtactcgcacctcctgaagcgcggcaacgccttcttcgacaagggcgacggcaagggcatggacctgccgtacatcgctgcctggcaccaggccccgatccacgacgcccgccgcgagaactaccgcctgaacctgcagttcttctccttccgccgcgccgccaacaagatcaagtacctcgccggctccgaatccggcatggccgcctggatctccgacaccacgccggaactcatcgccaagcgcttccacgagctcggctccatcgacatcgccgactgatagaaagaaaacatcaatgactgctgttgaattcattgagccgctgacccatgaggaaggcgtctcgcaagccaccaagctgttcgtcgatacctacggcgctgcgcccgagggcgtgtgggctgctccgggccgtgtgaacctgatcggtgagcacaccgattacaacgccggcctgtgcctgccgatcgctctgccgcaccgcactttcatcgccctgaagccgcgcgaagacaccaaggttcgcgtcgtctccggcgtggctcccgacaaggtcgccgaagctgatctcgatggcctcaaggcccgtggcgtggacggctggtccgcctacccgaccggtgtggcctgggcgctgcgtcaggctggtttcgacaaggtcaagggctttgacgccgccttcgtctcctgcgtgccgctgggctccggcctgagctcctccgccgccatgacctgctccaccgctctggctctggacgacgtgtacggtcttggctacggcgattccgacgccggccgtgtgaccctcatcaacgccgccatcaagtccgagaacgagatggccggcgcctccaccggcggtcttgaccagaacgcttccatgcgttgcaccgaaggccacgcgctgctgcttgactgccgctcggagctgaccccgctggagaacgtctcccagcaggagttcgacctcgacaagtacaacctcgagctgcttgtggtcgatacccaggctccgcaccagctcaacgatggccagtacgctcagcgtcgcgccacctgcgaggaagccgccaagattctcggtgtggccaacctgcgcgttaccgccgacggcatctccaaggccgatgaccagttccaggccctcaaggaaacgcttgacgccctgcctgacgagaccatgaagaagcgcgtgcgccacgtcgtcaccgaaatcgagcgcgtgcgttccttcgtgcgtgccttcgctcagggcgacatcaaggctgcgggccgtctgttcaacgcttcccacgattcgctggccgccgactacgaggtcaccgtccccgagctggacatcgccgtggacgtggcccgcaagaacggcgcctacggtgcgcgtatgaccggcggcggcttcggcggctccatcatcgcgttggtggacaagggccagggccacgagattgcacagaagattgctgaccgcttcgaaaaggaaggtttcaacgcacctcgcgccttgccggcgttcgctgcggcttccgcgagccgcgaggcctgatctcggaagctgatgcaaaaacgcgcgttggcgcacgtccatgaaaaaggacgtgcgccaacgcgcgtttttgcatgatttacttgtgggccagatggtgcatagcgtatcccacgacgatggccagcaggcacgatgccgaatgcttcatcctggctcccaggtgcggctactgtttggtttggtgctgtctgatcgtatccgtgcgcttcttcttcctcctgaaggaggggagcaccttttgtaagtagcggccgacttggtggccgtcatgttcggctacgcttttgtgcgtacaacggacgggttgtacgtgtatttgatggaaaaagatacgttatacgagtaacggcgtgtcgcgatgtgggtgattccggtgttctgcgagaacggcagtatggagccgaagtttacgtttgcggcgctgggtggactggtcaatgagagtgttaactattgagataaacgattaacgtttgacattaaacgattaacgatttatagtgttgaccaccgcaaagaaacagtcacaaagcaagtggctgacgggctcgtacaggtgcgtcttacatcggtacgaggaggaaacatcaaggaagaaggagcctaatcatggcacgaaggagtgttcgcctgttggcatcaatcgctgcggttgcgactatggccacggcgcttgccgcctgcggcaacaagcaggccaccacagatgagaatggcaagccgattgtcaacattctggttcgtcgcaacgtgaccgaccatccgatgcaggacacccagtacaccaaggatctggaagccgcctgcgactgcaccatcaagtggcaggaagtctccgacaacgcgtggggccagcagaagagcgccaagatggccgccggtgaattcccggacattggcttgagcttgtttagcatggtggatgcggccaagtacagcacctatttcgaggatctcaagccgcatctggacaagatgccgaacgtcaagaagttcctcaaggcccagccgggtgccgcgaagtacgttaccgatggcaccaagatcgccatgctgccctccgaccgcggcaagggttacgaggtttccggcactcacatgttcatcaacaagacttggctggacaagctgggactccagatgccgaccacttgggacgagctcgagaacgtgctcgatgcattcaagacccaggatccgaacggcaatggcaaggctgatgaggtgccgatgaacatccgcagcctcggcttcggcctgtggagccccctgacgctgatgaactccgaaggcgtggtcacctccttcatgggcggcggcgcttccgaacagggctactatgtggacaacggcaaggttaagagctattacacctccgacgcgctcaaggacgtcgtctcctacctgcacggactcatggccaagggacttatcccgaaggatgtgctcacccgcgacgcctcgcaatacgcttcacagaccgtcagtgacggcaagaccgcgctgaccggcgtctccttcggttggtccaactacgccgaatacggcgacaagctcggcgaccagtacgtcaccctgccgccgctgaagaaggacgcctccacgcccgactcccaggtcaagtgggattattcccaggacgcctgccgctgggcctactccggttctggcctgaccgtcaacccgaacgccgccaaccaagacgccatctacaaggtcatcgacgccatgtatggcgagaagctttccgtggccggtttcttcggctctattccggatatcgtctccgatgacggcgaccaccagtacaccatcgacaaggctaaagcctacgccgaatatcctgatacccgcgccgtcgccctgcaggaccgcttcggtggctggatccgcgacgatgtgaagatggtcaacgacaccaacgccgaccaggtcactgcgtccgacttggccattcgtgaggcgcgcaaccgcgtcgacggcgtcaaggatgtcgtaccgatttacgtgcgcccgaataccgaggattccaacaccctgcagaacaacaacaccgccatctccaactacgcgaacaaccagatcgcgaagtgggtccagaagggcggcatcgacaaggaatgggatgcctacgtgaagaaggtgtccgaaccgaccctcggcctcgacgccaacatcaagatttggcagaagtggtacgacaagtacaccaagtagccaagtaataccgcggggtccatcgcacgggttcgtttctctcccgtgactgccgccggaccccgcacttttgttctctagcaatcatcctaaattggagaccaacatgagtgcacaaacatcgcaaggcgttgctgcacggaccgtggcgatggaagcggctcccgaccgcaagaaaccaggtctgctcgatcgcatcgccgaccatttacgtcgctactggcagttgtggattctttccgctccggcattgttcttcgtgggactgttctcctacgtgccgatgtggggcatccagctcgccttccgcgagttcgatccgaccaaaggcctgaccggcggcaaattcgtcggtttcaaatacttcctggaattcttccacaacccgctgtttggtgagattatgaccaacaccatccgcatttccctgtggacattggttatgggcttcatcttcccgattatcctggccctgctgatcaaccagatcggttctaagaaaatcaaaggtttcgtgcagacgattacctacatgccgcacttcatctccgtggtggtcatcgtctccatgctcaacatcttcctgactcctggcaccggaattctcggtcgcttcttcggcgacgaatcactgatgggttccaccagcgccatcaccgcggtctattggatttccgaagtctggcagcatgttggttggaactccatcatctacctagctgcgctcgccggcgtggacacatcgctgtacgaggcggcgaagatcgacggtgcaggccgtttgcagttgattcgctacgtcgatattcctgcgatcatgccgacatgtgcgatcctgctcatcatgaacatgggctccgtgctcaacgtgggcttcgacaagatctacctgatgcagaactcgctgaacatgccggccaccgaagtcatcgccacatacacctacaaaatcggtattatcaacggccagtactcgtactcgacggcaatcggtctgttcaacaccttggtcaacttcatcttcctgatcaccgcgaatgcaatcgccaagcgcgtttccgatacgagcattttctagaagggttttatcatgtctgcaacaattgaggctgttacccagaacaagaacgacattccctggaacaagcacgtgcgtcagaagcagaagccgggtgactgggcggtgtcgggcatcatcaatgtgctgctgctcctgaccattgtggcggtgctctacccgctgtggttcgtggtcatcgcatcattttcaaatccgaacgccgtggccggcggtgaagtgctgctgctacccaagggtgtgaccttcgctggctatgctaaggtgttcgccaaccagcgcatctggcagggctatctcaacaccatcatctattcggtggtcggcaccgcggtcaacatggcagtgaccattccctgcgctttcgcgctatcccgtcgcgagttcaagccgcgacgcgtgatcatgttcctgttcaccgtgaccatgttcatcgccggcggcctgattccgaactacctgctgtacaagagcctcggcatcaacaacagcatgtgggtgttcatcctgcctggcgcggtttccgtgtacaacgtgatcgtggcccgctccttcttcgagacctctatccccgaagagctcttcgacgcggcccagatcgacgggctgagctactttggctacttcttcaagattgtgctgccgttaagctccgcgattctggctgtaattggtctgtactactttgtcggccactggaacgacttcatgacgggccttatctacatcaccgacgacacgaagcagccattgcaggtggtgttgcagcagttgctgctggtggcgcagggtactggaaccaatgtcaacgcggctgcgcagcagcaggccgccgatcagatcaagttcggcatcatcatcgtctctaccctgcctctgcttgtgctctatccgttcttgcagaagtacttcaacaagggtgtgatgctcggcgcggtcaagggttgagtcaaacgcaatccgacgagagacaaccaatccaaaagccagccgatagaaaggattcgctatgcttgcccgcttctctgtggcctacgagcggttctgccgtctgctagtcgcgattttcgtggtcaacgtggccatactcgcgcacactctgatgggagccgtcgtgctgggagttttcccctcgttcgcggctgcgcaggctacgttccgtgcgtgggtgctttctgaggaccgttcaatgcgggccaaggaggtttggacgacgttccacggcttctggaaaagcgaagtcaagagtgcgaatcttttcggttggcctttgattattctctgggccgtggtcatcgtcgactactacgtgatgaactggcatgctcgcggcgatttcgacatcatggtttccggcgtgctgctgctcatcatcgtagttttggcagtgttctcgtccttggtttgggtggtacgcgcgaactatgcggagcgtcccgtctggattgttcgtacaacactggcgatgattgtggcacgcccgttgtgcagccttctgcaggtcgggctgctgattctcactgtgcttgtatgggtgcaatggtctggaattctcatggtgttcggcttgtcgctgccgatgttctgcacagcttggattgtttattcattcggccgtctgcctggaatggacattcatgaccgcatggaacagagcacgggccgcgcccgaaaccagacatcgtgacatgttcgaaaaaaaggggggtgataaaatggtacagtcgtcggtaagtcaacgagtgaacaggtccaaacgattggtgtctatcaaagacatagctaaggaaacgggtgtttccgtatgcactgtgtctttggttatgaacaacaaggatcacaatcgcgtcagcaaggcggttgcgcagaaaatccgtgcgactgccgagaacatggggtacaagcctaattccgtggcgcgcaccttacgcaccagcaaatccaatactctgggattcgtcaccgatgagatagccacgactccgtatgcgagcaaggtactcgaaggtgcgcaggatgccgcgagcaagctcggatacatactgcttaccacgaacaccaataatgacgccgaactcgagaaccaagaaatatccgccctgctccgatataacgtggatggcttcctatacgccatgatgttccaccgcaaagtggacattcccgaagtcttggaaggcagcccgaccatggtggtggacagtgaggatgcagcggggcgagttccctcggtctaccccgatgatgaactggcggggtatgacgccaccaaccgtctgatccaagctggatgcagacgcatcgtctactacggttccgcaacatccatcgtcgcgcaagagcaacgtctgactggttaccgacgtgcgcttgcggaagcgggcattccattcgatgacgctttggtcgtcgaagtatcggaatttactaacgcggacgatgaagcggcgcgggtgttcgacgaaatcaagccggacggcatcttttgtttcaacgatgtgcgcgccactttcatctacgaagccgcacgcgaacgcggagtgcgcatcggcgctgacgtgtcggtgatcagcatcgataaccagccgttcatcactaatgtgatcaaaccatcactgactacgctggaactaccccattatgagatgggttttgaagcggttcggcaacttgtcaccatacttgacggcgacaaggccgtagccgatcttgagtccgatcgtggcatggcggtgcagaggcaacgtgatggcagcaaaacagcattgcgctgccgcatcatcgaacgcgattccatcgtgtcgtgacggacgtttcctttttccgtatttgtttttctaattatctgtttttcaatgcgtagccacatgatatctgatcatgtggcgctgtggaggaaattattatgcctgacaactattccgttgccatcgaaaccggcggctaccgcttgctggaattgttcgccgaaagatgcggcgatgacgctgccgtcaccattacagacggggacggccatcaaatcgccagccatgccatgccggtggccgagcgtcgccaccgtttcttgattccggtgccgacaaacgtgtgtctcacggtgagagcgcgccaactgaccgtgcggttcgcctacttgtccgagtgtgagaatcttcttgatgaaggcgtgcgtttcatcagcatgaatccatatgacaatgaatgggatacgcagccgacgctggatcagatctatgatcgtttcgctcgccctgcggcgcatttcgagccattcgctcgctggatgaatgatcctaacggcctgtgtcgtttccaaggacgctaccatctgttctaccaattcaatccgtatggttttggctgggacaatatgcactggggccatgcagtgagccgcgatctggtgcattggacgcatctgccaatcttcctcgaaccgcagccggagctgcatatcgacgaacgcatcgttggcggcgcgttctccggatccgcggtgacggtggatgcgtgtgacaatccctgcaagggtgatgatgcggccgctattcgcctgtatctaacccggcacctggagactcgcggagacgaatcgtctgttactgaataccagaccacctgcttgtgtgaggatggcgtgcatgtgagtgtcgaatctccggtcgcgttgcgcgttaacgatggttttggcttcgatttccgtgatccgaaggtggaaaccggcatgggcggcgaggcgatcgatccggaacgcgcttacatggtgaccgccacgaatctgccggtcgccgaattcgatactgatgctgtgtcctccgcggcgcctggcatcagcgtacagggtacagacggctggtttacgtgcggtccgcaaggcatgcccggcaccgacaagcccaatatggatacggtgcctgccatggcgctcttctccgcgaagaaaccgctcaagcgcaacgtgacgtggcagtatgaaggaccggtgctcgccgacttcggccaccagctgtcacgtacctacgaatgtcctgacctgttccagctcgacggcaagacggtcgccatcggagctttgatgcactaccgtgacaagcaaggtcgtttccagcaggtgcgttggtatgttggtgatctcaaggacaccgccgatggcccacgtttgcaggtagggaacagcgattggtgcgatttcggtaccggctactacgcgacacaaagctttgctgccgacgacgggcgtcgtatcgtgttcggctggtataccgactttcccgcgatgcgtgtggaaaagccgtgcatcgctaacggcatgatgtcgctgccacgtgaactgcacgtgcgtgacggccgcttgaccagccgtcctgtcaaggaagtgtacgagcagctgctaggcgatcgtttggaagcgcatgcagacgaaaacgggaccttctttattgtgccgaacaacgcgtattacacggacatgcatctggctgacgatgacgatttcacaatgctcatcgcgactggtaccaattccgccaatggtaattcgatggaattgcagctgcagcgtcgcgacggcgtgacccgactggtcacgaagggaacagtcgtggacgacatcgatttcgatagcggcatcgccgatgtgcgtcgcgtcgaaatcttcttcgaccgtaatgtggtggaagtcttccttaacaacggcgaagcggccggcagtatgctgttccaaggtgcggacggcgatggcgagttccgttttgttgctgacggcaaggtcgattgcgtggatgtgcgtgtgcttgacggcatctggcggtgacatacagttgctgcagcggtaggtggtaaccggcagtcatctcagtatgtaaggcaaaacagacgaaaggcacgtgttttggcacgtgccttccctatacttgagggcacgtccggcaattcgccaagacggtaactggatattcacacctcacgtttagggagttccatgaacaaggcaatcatcaccgtcgtcggtcaggatactgtcggcatcatcgcgcgagtctgcacctacctgtcccagcacaacgtcaacgtgcttgacatttcccagaccatcatcgacggttacttcaacatgatgatgattgtcgactacgccaacgcggacaaggacttcggcgcgatggtcggcaaccttgaggacctcggcgacgacatcggtgtgcgcatccgctgccagcgtgaggaaatcttcaccaagatgcaccgtatttgaggaggcccgctcagcaggccgccgcacgcgaggaggcggaaagcccggtgggctttccgctgacggagccatccttatccctctgatgagggtgaccgccaaactagtctttaaatatcctgtaaggaacaaaccatgctgaacatcatggaggtccacgagaccaatcagatgatcgagcaggagaagctcgacgtccgcaccatcaccatgggcatctcgttgctcgactgcgcctcggacgatgtcgacaagacctgcgacaacatctaccgcaagatcactacctatgccaaggacctcgtttccaccggcaaggccatcgaacgcgactacggcatcccgatcgtcaataagcgcatcaccgtcaccccgatctcgctggtcggtgccagctcctgcaagacgagcgaggacttcgtcaagatcgcccacgcgcttgacaaggcggccaaggaggtcggcgtcgacctgatcggcggctactccgcactcgtctccaagtccatgaccccggccgaggagttgctcatccgctccctgccgcaagccctttccgagaccgacatcgtctgctcgtccgtgaacgtcggttccaccaagaccggcatcgacatgaacgcggtcgaactgctcggccacatcatcaaggacgttgccgagcgcaccgccgacaacgactcctacggctgcgtcaagttcgtggccttctgcaacgtgcctgacgacaacccgttcatggcaggcggtttccatggcgtgaccgaaggcgacgcggtgattaatgtcggcgtttccggcccgggtgtggtctcccgtgcattggacgaggccaagggcaaggatttcgagttcctgtgcgaaaccatcaagcgcaccgcgttcaagatcacgcgcgtcggccagctggtggcacaggaggcatcccgtcgccttggcattccattcggcatcatcgacctttccctcgcgccgaccccggccgtgggcgactccgtcggcgaagtgcttgagaagatcggcctcgaacaggttggcgcaccgggcactaccgcggcgctcgccatgctcaacgaccaggtcaagaagggcggcatcatggcctccagctacgtgggtggcttgtccggcgcgttcatcccggtctccgaagacaagaacatgatcgacgcggcaaccaatggctgcctgaagatcgaaaagcttgaggccatgacctgcgtgtgctccgtcggcctcgacatgattgccattccgggagacaccaccgcagccaccatttccggcatcatcgccgacgaggccgcgatcggcatggtcaaccagaagaccaccgccgtgcgcgtgattccggtggaaggcaaaggcgtaggggagatggccaacttcggcggcctgatgggctatgcgccgatcattccggtgaaccagaccagctgcgaggccttcgtgacccgtggcggccgaatccctgcgccgattcacagcttcaagaattgattcggtagggtatctgctttcagagaggtacatttggcccctcgcggagagctatctgctttcaaagaggtacctatatgcggaaaccccgggtatgagcgttggaatatcaacactcatacccggggtttctcgattgcggtacctctttgaaggcagatagcattctgcaaacgctcgaatgtacctctttgaaggcagataccagctcgaattacctttctggaggtctattcccgtttcgaggggctgattccgacctttctggaggtctacttccgtttcgaggggctggtatatatgaagaccccgagtacaagcattgatatttcaacggccatactcggggtctcgtcctttgacagccccttgaagcggcagtagacctccggcggatgccaaatccgcccctcgaaacgcaggtggccttatattcagcgttcatcactgcgcgaagctcagtgtttccgctctcgcgcctgtcggcgttcgttcggcgtcgttactcgaaggcccaccgggccttctcctcacgctccgcccgcaaaattgagctggcgccaggcttcgtagatggcgatggatgcgcagttggtgaggtttagggaacgcagggacgggcgcatgggcagccgcacttgttcggccacatgagggccctccatgatgtccatcgggtcggggatgtcgccgggctcggggccgaacagcaggatgtcagtcggcttgtattccacctcggtgtagagcttggtggcgtgcgcggtgaacgcgatgatgcgcgaattgggcatcgactccaccaggttgtcgaaattcgggtgcaacaccacgtgggccatgtcatggtagtcgaggcccgcacggcgcagcttggtgtcgcgcaggttgaagcccagcggctccaccagatgcagaatcgtgccggtcactgcgcacaggcggatggccgaaccggtgttgccgggaatacgcggcgagtaatagcacaggtgcggcgtcacggtttcggtggcggcggccttctcggcggaaagcatcgcgtccaccacggagatggggttgccgtgtgcgtcggtcaccagctcgtccggcccgtaattcgacttgcgatagccgtattcgaacattttctcgactttggtttcgggatttgctggattcggtgtgctctgggggttgtgttttgcctcgttcgtcatagctgctaagaataagaacgatgaacgacacagcaatttctttgcgattgggagcatggtgggaggccaatgcgcgtgacttgccatggcgcttcggacgggccacgccgtggggcgtgctggtatccgaagtcatgagccagcagacgcagatgagccgtgtggtgccgtattggaacgattggatggcacgctggcctgacgcccgtgctcttgccgcagcacctaaagccgatgtgatcaccgcatggggccggcttggctatcctcgccgtgcgctgcgattgcaggaatgcgcccgcgtggtggccgagcagtacgccgacaaactgccgcgtacgtatgacgaactcactgcattgcccggcatcggcgattacaccgcctccgcggtgctgagctttgcgttcggcgaacgaatcgccgtgatcgataccaacatccgccgcgtgctgagccgtgtgttccttggcgtcgaatcgcgcgggggagcggccagcccggccgaacgcgcgctggcgaaccgcatgctgcccaaagacgagattctcgggcgcgatgctgacgtcgccgataatgccggtagcgccgaacataccgtgaacagcactatccgtggcggcaaacgctcccgactgcatcgtggcgaacgcccatcggtcacatggaaccagtcggtaatggaactgggggcggtgatctgcacggccaaatcgccgttatgcgacacctgcccgattgccgacgattgcgcgttcctcaaggccggccgccccggactgggggagcgtcgcacccgcccacgccaacgattccaaggcacggatcgacaggtgcgcggtctggtgctcgccgcgctgcgcgagcttcccgctggagtcacgttgcccagggaagatgccgacaagctttggaaggaccagattcagcttgccgcctgcatcgccagccttgacgatgacggcctgatcgagattctggacggcggcctgcgattacccagctgacattgtgaaaatggcgggctccccaagcgtgtatgggtgtggtgaccgtagactggaagggttatggcagtgcagaggaacacatcaggcgcgagaacggcacgcggagccggcaccggggccaatgggccatccggcgggcccgcccgaaacgaccgttccggcaagccgcgcaagcgcaggatcagcaaaaagcagcaggccatctatcgtcgtcggcgtatcgtggccggcacggtgttgctgctgataatcgcgctgattgtattctgcgtgtacagccttggccggggtatcggtgccgtgaacacgatgattcaccatgacgaggtgtatgcgatttcccgcgacgccacgccggctccgaagaaagtcagcaacgtcaaggattgctcggccagtgatgtgacattgcagctttccgcggcctcccaatccgtgccggtaggaggatcgcttgatttcaccgcgaccatcgtgcacgaggggtcaggcaactgtttggtggacggggccgattccggccgtgtgctcaccattacttccggtcaggaaacgatttacaagtccgatgtgtgtccggcggattcacgtctgctgctgatgtccaagggtgataaggacgttcagaaggtcacgtggaataccgatgcgaacgccacgctcaccgaatgcacggatgagtcggattgggccaaggtcaatgcgggaacgtacgtggcgcagctgagtttgaaggatcatccgaaggtgaagagcgatccggtgacgtttacggtggggtaggacctgcggttggtgtttggacactgggtctctccctcagtctcgctccgctcgacagctccctcgtcagcgggagctaaaaatgtcctcgcatatcagtattcttttgactttgcatgaggtgtgtcatattgcgggcatgccgtcgacaatgaagcgtccgcataggcatatggtggccatgccggcgctcccaggggaattaccacatattagcgagcgataaggaacgtccattggctactgagtctacgacgaacaccaccaccatcatcgcacgcgccgaccagcatgacattgatctgcacaaggcgtcggatcgcgtgaacttcggttccatcaaggaacccatcgatgtgccctacctgctgggcgtacagaccgacagcttcgattggctgatcggttccgaccgctggaagaagcgtgtcgaagaggatgaggctaacggcaccaacaccgtggcccacacctccggtctcgacgaggtcttcaacgagatctccccgatcgagaactttgcacagaccatgtccctgaccttctcggacccgtacttcgaggagccgcgccacaccgtgcaggagtgcaaggagaaggattacacctactccgctccgctgtacgtgaacgccgaattcgagaacggcgacaccggcgagatcaagtcccagaccgtgttcatgggcgacttcccgctgcagaccccgcacggcaccttcatcatcggcggtaccgagcgagtcatcgtctcccagctcgtgcgttccccgggcgtctacttcgaccgccagcaggaccgcacctccgataaggaagtcttcggcgcgaagatcatcccgagccgcggtgcatggctcgagttcgagatcgacaagaaggaccagccgcaggtgcgcgtggaccgcaagcgcaagcagtccgccatcgtgttcctcatggccatcggcatgaccaagtccgagatcgcccaggccttcaaggactacccgctggtgctcgacgccctggagaaggaaaccctcgagacccaggacgaggccctcgtcgacctctaccgcaagattcgtccggccgacaccccgacccccgaggccggcaagaacctgctggactccttctacttcaacaccaagcgctacgatctggcccgcgtcggccgctacaagatcaaccgcaagctgggtgtcgaggccgatttcaacgatcgttccctccaccaggaagacatcatcgccacgatcaagtatctggtggccctgcacgacggtgcggcgaccttcccgggcaagcgcaacggcgaagacgttgacctgcgcgtggacgtcgacgatatcgatcacttcggcaaccgtcgtatccgccaagtcggcgagctgatccagaaccagctgcgtaccggtctgagccgtatggagcgcgtggtgcgcgagcgcatgaccactcaggacgccgaggccatcaccccgcagtccctgatcaacatccgcccggtgaacgccaccatcaaggagttcttcggcacttcccagctctcccagttcatggatcagaacaacccactgtccggtgtgacgaacaagcgtcgtctttccgcactgggccccggcggtctgtcccgcgaccgcgcctccatggaagtgcgcgacgtgcacccgtcccacttcggccgtatgtgcccgatcgagtctcctgaaggcccgaacatcggtctgatcggctccctggcgaccttcggccgcgtcaacccgttcggcttcatcgagaccccgtaccgcaaggtcgtcaacggccacgtgaccgacgaggtcgagtacatgaccgctgaccgtgatctcgaccacgtcatcgcccaggccaaccaggaacttgacgagaacggcaacttcgtctccaagtccgcccttgcccgagtcggcgaggaagaggcggtcgatgtgccggtgagctccgtggattacatggatgtctccccgcgtcagatggtctccctcggtgcctccctgattccgttcctggagcatgatgagggccaccgtgcactgatgggtaccaacatgcagcgtcaggcagtgccgctgatcgaatccgagcgcccactggtgggcaccggctccgaatggcgcgccgccaacgattccggcgacgtcatcaagtccgagaaggacggtgtggtcacctacgtgtccgccgacctgatccgcgtgatgaacgacgacggcaccaccagctcctacaagctggccaagttccagcgctccaaccagaccacctgctacaaccagcgcccgatcatccatgatggcgagcgtgtggaggccggctcggtgctggccgatggtcctgccatccagaagggcgacctggccctgggcaagaacctgctcatcgccttcatgccgtggaacggctacaactacgaggatgctgtgatcatctcccagcgcctcgtgcaggacgacaccctctcctccatccacatcgaggagtacgagatcgacgcccgcgaaaccaagctgggcgccgaagagatcacccgcgacctgccgaacgtcggcgaggacgctgtggccaacctcgacgagcgcggcatcatccgcatcggcgccgaggtcgaggccggcgacatcctggtcggtaaggtcaccccgaagggcgagaccgagctgaccccggaggagcgcctgctgcgcgccatcttcggcgagaagtcccgcgaggtgcgcgacacctccctgcgcgtgccccacggcgagaccggtaccgtcatcggcgtcaaggagatcacccgcgaggatgccgaggaggacggtgacgagctgcccaacggcgtcaaccagatgatccgcgtctacatcgcccagcaccgcaagatcacggtgggcgacaagctctccggccgccacggcaacaagggctgcatctcccgcatcctgccggaagaggatatgccgttccttgccgacggtactccggtcgacatcatgttgaacccgctgggtgtgccttcccgaatgaacctcggtcaggtgctcgaactgcacctcggctggatcgctcactccggttgggatatctcccttgacccgaacatggaagccgagtggaagaagctgattccgtccggtgccgagaaggccgagccgaacaccccggtcgccaccccggtgttcgacggtgtcaagcccgaggtcctgaagggtctgctgtccactacgctgccgaaccgtgacggcgaccgtctggtcggccccgacggcaaggccaccctgttcgatggccgtaccggtgagccgtacaccaagccgatttccgttggctacatgtacatgttgaagctgcaccacctggtcgacgacaagattcacgcccgctccaccggcccgtactccatgatcacccagcagccgctcggtggtaaggcccagttcggtggccagcgcttcggcgagatggaggtgtgggcccttgaggcctacggtgccgcctacacgctgcacgagatgatgaccaccaaatccgatgacgtcgacggccgcgtgcgcgtctacggtgccatcgtcaagggcgataacctgccgccggcaggtatccctgagtcgttcaaggtgctcctgaaggaaatgcagtccctgtccctgaacgtcgaagtgctcaacgccgaaggcgtggccatcgacatgaaggacgaggacgacgatccggccagctccgctgacgacctcggcttcaacattggcgcccgccccgacgcggccgccaaggaagaccagaaggccgaagagcccgaataccagtgatccctcgggctgcatgcggtcaatacgccgcgtgtagctccgccaacgtgaaataaataacgtacagagacctttccggtttgcactacccctcagtcagccttggctgacagctcccctgacaaggggagcttgggaaggtctcaagaacagaaacggattaacaagtgctggacgtcaacgcatttgacaagattcgcatcggccttgccaccgccgatgacatccgtggttggagccacggtgaggtcaagaagcctgaaaccatcaactaccgtacgctgaagcctgagaaggacggtctgttcggcgaacagatcttcggcccgacccgtgactgggagtgcgcctgcggcaagtacaagcgcgtgcgcttcaagggcatcgtctgcgagcgatgcggcgtcgaagtgacccgcagccgcgtgcgccgtgagcgcatgggccacatcgagctcgccgccccggtgacgcacatctggttcttcaaaggtgtgccttcccgcctcggctacctgctgaacgtcaccccgaaggatctggagcgcgtgatctacttcgcctcctacatggtcaccgaggtgaacgaggacgagcgccacaacgatctgcccggcctgcaggacgagttcgattccgagatcaagcgccttgagcagcgccgtgactccgacatcgaagcccgcgccaagaaggtcgaagaggatctcgccgcccttgaggagaccggcgaggccaagggcccggcccgcaccaagctgcgtaacggtgccgagcgcgatatggccgccatccgcacccgctacaacgaccagatcgcccgtgtggacgccgtcttcgacaagttcaagaagctcaagcccggcgacatggtcgacgacgtggacctgtggcgcgagatgcaggaccgctacggcgattacttcgacggctgcatgggcgccgaagccatcaagaagcgcctgcagtccctcgacctggagaccatctccaaggaactgcgcgaggagatcaaggacgcttccgagcagcgtaagaccaaggctctgaagcgcctcaaggtcgtcaacgccttcctgaccaccggcaacaagccggaggccatggtgctcgacgtgatcccggtcatcccgccggacctgcgcccgatggtccagctcgacggtggccgtttcgccacctccgacctcaacgacctgtaccgccgtgtgatcaatcgtaacaaccgtctgaagcgactgatcgagctcggcgcccctgaaatcatgctcaacaacgagaagcgcatgcttcaggaagccgtcgactccctgttcgataacggccgtcgtggtcgcccggtcaccggtgcctccaaccgtccgctgaagtccctgtccgacatgctcaagggtaagcagggtcgtttccgtcagaacctgctcggtaagcgagtcgactactccggccgttccgtgatcgtggtcggcccgtccctgcgcatgcaccagtgcggtctgccgaagccgatggccctcgagctgttcaagccgttcgtcatcaagcgcctcgtggacctgaactacgcgcagaacatgaagtccgccaagcgtctcgtggaccgcggcgacgccgaagtgtggggcgtgctcgaggaggtcatctccgagcaccccgtgctgctcaaccgtgcacctacgctgcaccgtctgggtattcaggcattcgagccgatcctggtggaaggcaaggccatccacctgccgccgctggcctgcgccgccttcaacgccgacttcgatggtgaccagatggcagtccacctgcccctgtccgccgaagcccaggccgaggcccgctcgctgatgatggcttccgacaacatcctgaagccggctgacggtcacaccgtgaccatgccgagccaggacatgatcctcggtctgtactacctgtccaccgtgctggaaggcgccaagggccagggccgcgtgttctcctcgctggaagaggccgaaatggccctcgaccgccacgagatcgacatgcaggccaaggtgctcatccgcctgcccgagagcttcgtactgccgaagaactgggagcccggcgaggtcaaggtgctcgacccgcgcgaaggcgaggacgaggtcgtcaaggaagagcgcttccacgacggcaccgtgctgttcgccacctcctacggccgcatcctgttcaacgagaccctgccgaccgactacccgttcgtcaacgagcaggtggccaagggccgtctgtccaagatcgtcgacgacatcgccatgcgttactccacccagcaggtggccgccacgctggatgccctgaaggatcttggcttcacccgcgcaccgtggtccggtgtgtccttcgcgttctccgacgtgaacgagccgcccgagcgcgacgagaagatcgccgagtacgaggccaaggccgacaaggtcaacgccaactacgagatgggtctgttgaccgaggaagctcgccgtcaggaactcatcgacctgtggaccgagtgcaccgccgaggtgtccaaggaagtcgaggagaagttcgacccgacctccaacctggccatcatcgtgcagtccggtgcacgaggcaacatgatgcagatcaaccagatcgcaggtatgcgaggcctcgtggctaacccgaagggtgagatcattcctcgtcctgtgaagtccaactaccgcgacggcctgtccgtgctggagtacttcatctcccagcacggtgcccgcaagggtctggccgataccgcactgcgtaccgcagaatccggttacctgacccgtcgtctggtcgacgtctcccaggacgtcatcgtgcgcgaagaggactgcggcaccaaggccggtctgcccatccgcgtcgccgagcgcgacaacgacggcaacctggtgctcgtcaaggccgccgacggtggcccgtactcccgtctgctcgccgccgacgtcatcgacccggccgacggacagaccgtgctgtacaagcgcgacgacgccctgtccatggacgtgctcaacgacctcgtggcccacggtgtcgaggaagtcaagtgccgttccgtgctgacctgcgagtccaagcgcggtgtgtgcgccaagtgctatggctggtccctggccaccaacaagctggtcgatgtcggcgagaccgtcggtatcgtcgccgcccagtccatcggtgagcctggtacccagctgacgctgcgttccttccactccggtggtgtggccgcggcatccgatatcacccagggtcttccccgtgtcaccgagcttttcgaggcccgcaccccgaagggtgaggccccgatcaccgagttcgccggcagcatcaagatcgtggagaacgatcgcggtcgccagatcatcctgaccccggacgccgattccggcgcgccgaaggaagacggcgtgatcaagccgatcacctaccaggtctccaagcgcgtgccgctcaaggtcgccgacggcgaccacatcaaggtcggcacccagctggtcgaaggttccgtggatcccaagaagatcctcaccatcctcggcaagcgcgccgcccaggtcaacatcgtggaggaagtgcacaccgtgtaccgctcccagggtgtggatatccacgacaagcacatcgaggtcatcgtgcaccagatgacccgccgcgtgaccatcatcgactccggcgacaccgacctgctgccgggtgagctggtggacaatgcccgcttccgcgagatcaaccgcaacatcgtcaagaacggtggccgtccggccgtcggtcgtccggcgcttatgggcatcaccaaggcgtcgctggccaccgactcctggctgtccgccgcatccttccaggagaccacccgcgtgctcaccgaagccgccctctccgagaaggtcgacgacctcaagggcctcaaggagaacgtcatcatcggtaagctcatcccggccggtacgggcctcgcccgctaccgcaacgccgtggtcgagcccgacaaggccatccgcgacaccatctacccgaacttcggtctgggcggcgatggcgatctcggcgacgcgagcttctccgacgccgacctgtccgacctgaacttctcgaatctcgagttcggcgatctgaagctcggcgacgacttcaacccggatgatttctactccgatcagggcggtcagcctgacatcgaggagtaaccctcctcacccccgataagatggcccggaactcgtgtggttccgggccatctcgcattttcagacagcagtattgttcttgtcgatttacgggggtagtgtgtcaacttaggagtgtgggtatcgttcccagtggtttgtggctcggtacgtgcacggaagtcgtaagagaagagacaagtgttggagggccacctatggtggggttaaacacattggtcggcaagcggtacaagatccttgcccagatcggcaagggtggtatgtccaccgtctatctggcaatggattcctcgctgaacaagcaatgggccatcaaggaaattcgcagtgcctctgatccggtgcagcgcgacttggtcattaagagcctgaccgtcgaagccaatatgattaagcgcttcgatcacccggcgattccacgtatcgtcgacctgatcgaagaaaagggcagcctgttcgtcgttatggattacgtcgaaggccagaccttggcgagcctgctcaagaaggaaggcccgcagtccgaagaagacgtggtcgattggggcatccagctgtgcgatgtgctcgactatctgcaccgccgcaagcatccggtgatcttccgcgatatgaagccctcgaatgtgatgctgacccctgagggcgcaatcaagcttatcgacttcggcattgcactggagaccggcaaggatgcggacagcaagccgctggtcggtgacgaccgccagctcggtacgccgggcttcggcgctcccgaacagttcgccgataacggcaccgtggacgcacgtaccgatatctacgcgctcggtgccaccctgttctacctgctgactggctcacacccgcgcaagaacggcattgtgccgattcgtgagatcaacccggagctttcgcagggcttggaactggtgattgccaaggccaccagcaagaatccggacgatcgcttccagacctgcgccgacttcgcgtatgcgctgaaacactacaagcaggaagacgccgcataccgcaaggcgctgaattccaagtggtggggcttcctcggcacggcgatcgcctccgtggtctgcctggccctcgccggcggcagcctggtgctagccaaccacgcgcagaacaccgattacgactactggatgaaccaggcggcgcagaccaccgacgcatccgccgcagaagccgcctacgtgcgcgcagtggaaatcaagaccaatgccattgaaccgtacgagcagctgatcaagcgttacaccgctgacagtgatttcagcgacgacgaagagcagatctacaacacgctgatcaaccagcacgccgactcgttgcgcaaggactccaccaagtgggccgagctgagcttcgacaccggccgcatgtattggtactactactccggctccaagatggccggccaaagcgcgtccgccgccaacaccgatccacagcgatacgcccgcatccgcgccgcttcgcagtggatgcacaacgcggcacaagagagtagcttcagcaacgtcaagctcgccaagatctacgccgacatcgccgacttcaacacggagatcgtgccgctgatcaacgaaggatccgattcgggcaagtacaagccgtacttcagcaagctgaacgaactggtgaagtccgccgctcaggaagataacggtgtgatcagcctcgaatccgcgaacctgaccttggacgcgttgcgcgtgtacccgcgcaagttccgcgcggacggcatcacgcaacagcagatgagcgatttggccgatgccgccgcatcgcttgccgacaagaccgaaaccaccaccgatgagctggatgccagcaagaaagccgcgcaacaggccgaaaagcccaccaaggacgccatcgccaacgctttcgttgatatcaagggggacgccaagtgaacgccgatatctataggactctggcagtcgtattcctggctttggccgtgattcttgcggtcgtggccgtagtgctgttccgcaagttcaacattcccgccgtgcgtgacgccctgaccggcaagcgcgcggaacgtgagatcgccgaactgcgtggagtgcgcgccggttcgtgggccaacgccgagaatctgggcgaaggctcgcgccgcaagcgcaagaagggtgccctttccgataccaccaccggtacgcatgacaccagcgacatcgaattccgcccggtgaccggtaccggttccggctctctgggttccgccagcaccaagggtggcattactcgccccggcgaagacaagccgtccgcagtgcccggtgccaagcaaaaggcttccgccgctccggccgtggtggacgaggaagacgaaagcacccgtctgggtaccaaggccgcactcgaatctgtggttgagattccggtgtccatggcttccgccgccgaattggcggacgagggcgagacctcgctgatgcaattccgcaagacgaatgaagcatcgtccgacgacgatgaatcccgtaccatcctggttcgtggagggaagaacaagtaatgagcttcgtaactaattccagtttctggcgcaagtcgttgatcggtgcggccgtggctgtggcggctcttgccatgggtgctaccgccgtggtagccagcgccgattcgacttccgacctcaagcccgagcagaccaccggctccgtggtgtccgcacgctccttcaaggccgtcaaggcacagccggctgccgccactacgccgaagatggatctggcttggtatgccgccgataaggacggcaaggtggccgataatgcccagccgctgaccgatggccgcaccaatgcctcgaatgttcgtctgggcgtgacgattactgggtttgatggtttccccgcgggccaatttgaccgtaacggacaatacgtaggtgcggataaagacaaggttgcctttaccgtgaccgtgggcaacttgggcgtcaaggaagtcaagtatggcgacttccaccgtacgggcaatgtgcaggacggctacacctacaccgttgagccgaatgatggtccggcgttcgctctgagcggtgaaccggttacgctcgatgtgacggttgccgcgccggctgattctacagcggcagatgccgccattgacctgaatcagttcaaggatggcgacggcacgagcaccatcacggctcctcaattgtcttatgacagcaccaagcccgccgccgtggatacggcggtgttcggcggcgttgctgatactgattggctgaaaggcaaagacacgaccgacggtacctggttcacgaccacgtcgccgtccgtaacctttactccggttgcggctgaggcagccaatgtcgtgtcttatgaggtgacgtatccgaatggcaacggcaccaagaccgatacggtcaaggcagatgaagcatggaccgtgcctaacggcaagaccgacctgaccaagaccacggttacggtcaccaattggttcggcagcgcttccgatgcgaagccgttgagcgatttgctcgacgcgaagaccgttattgttgacccgaatgccggcactggtctgtccctgaatctgaccggtaccaccccggataagggtgctgtcaacaacggcaccacgtattacagcaaggtcggcggcttctcggtgagcagcacgagcgcatacttcgccgatgaactcgccctgctcaaggcgaacggtatcaagttgctgaccgttccggctgctgacggcaccggtgccccaaccccggtgtgcgatgccgctgatcttacgaatggtgccgtggactgcggcgatgccggactggacctgaagcccggtaaccacaccgtaagcctgaactccgcgctgccgggcgcgccgactgtaacgcagtcgttcgccatcgacaccaccgctcctaccgttgcgtggaagggctactccaagaacggcggcattgatattccgttcggaaagacactcttcgcagtcggccgtaaagaacgtgccctgaccttcaccgttacggatgatggtgccggtgtgggcaaggtgattgcaagcggtatcgatcctgagacgggcaagcaggccacggtcacgttgaccaacaacggtgacggcacctacacattcccgctcaccaaggccggaacctatgatttgacggacttcaccatccaagccacggacaatgcaggtacgcagtccaaggctgaaaaggtaaacgcaattgccggcgataagttcacctacacgaagattcgtatcggcaagaatgtccagccgaagaccacggtatcggtaagcggcaccgactacatcaacggcactcccaaggtcacactgaccgtcaagaacaacccgtggctggcggacgaactgaagggtctgcaagaaggtgacggtaccaaggacctgaacctgctcaccagcacattgaccgctggcggcaagaccgtgtacgggggcgcgttcccggtggccggtgccacggtgaacggcgccggtgacgagatcgtcatcgcagcggatgccgccaagccgttgattgacgccaagaacacaaacggccagtatgccattacggtaaccgataaccccacattgctggcagtgttgggtgacgtgaccaataacgccaagaccttcggcgtggatacgcaggctccgagcttcaccggtgccgcctaccaggcaggcagagatgaactgacctccaccaaggacgattccatcagtgtcgtgtcccgttctgccgccaccatcactttggacgcgcgcgatctgctgcccgattccacggcaacaggtgccggcaaagacgatgcacaaacctctggtctggcaaaggtcgaagccaaggtcgattacaccacgtggaatggcgataaggtcaccggcaagtggaccgaacttcagcgtgtgaacaacgaccccaacaaggtccaactgacgctcggcgaccaggacggcaagtacacgctggccggcgtatccctcagagccaccgataaggcgaccacgaagcccaatgtcagcgatgccgaaaccacattggccacggtgaaggccgcactggccaagtccactgataccaccgtggccgctgcggccaagcagctgccggatacgctgggcgtgagcaagcagaccgcgaaggcgactctgcagctcaacgatgctgacccgcagaatacctacaaggaagatctcaccaacatctccctcaaggtcgccggtgaccccgcgttcgcctaccgctgggatgtggtcaaggccggctatgccgatgccaacttgctgaccggtgcggtgcaatacggcgacgccggttcgaagtccttcacgttcaagatcagtgacgccacctataaggacggcgtcatcacgctgggcaccgcaaacctgcccaagcggaccaaaaccgacaaggatgccaccggcaagcagttcaacggcgactaccagctgacgctccagaagaacttcggcaacaatgtcgagctgttcaacgctcaaagcaccggcactaccaactacctgttggacaccaagcgcccagtgctgaccaagatcagcggtccggccggtgccaagggcgagaccatcgtcgataccaccgtgcaaggcaagagctacacggtcttcgccaaggccggtgcacagacgttcacggtctggatcaaggacttgctgcccaacggccagtcctcgaacgactccgccaagaagaacgaagcccatacgtccggcatcaaggatgactccgttaagctgaccattcctgacggcactgatctgaagggcaagacgcttgccgagggcaagacggtgaatgtcacactcgacaacgaaggcaagggacagttgacccttgatcaggaaggcttctacgacctgagcaagatcacggtaagtgtcaatgacaacctcggcaacgcgctggacaaggaaagcttcaagaaagctccggttcaggacaatgtcaaggattacgacgccgtcgttgccgatgtgaatggtgacgataccaaggcatccttcgcggtcaccaagtccgacaactccgtgcccgactccagtgataacaacaacaagtacttccgtggcaaggtcaaggtggcctacaccatcaccgaccactggttcccgatttacgccaagctcaacgccggcaagacgaacctgctcgctggtagtacttcgaacaccacgccgttgaccggtggccagaacgagcagaacatcaagccgttggatgccagcgatgcacagtggactgaaggcgatggctacacgtggacgctctccggccagaagctgttgatcaacggcaagaccaacgaagtggaaggcaattacacgctgcacctcgcctatgccggtctacaggcaaaggccaatgaggcatccacccagtccaaagacgtggtgctcgactggaccgctccgaagctgggcgacctgaccgcttccagtgaagcaccgaagaagtgggattggatcttctccactgatgtcttcacggccacgctgaacggcatcagcgataatgtgtccggtgtgactgcggactccaccgcgttctccaccaagcacttcgacaactgggtttccggcaagaacgacccggctcccgtctatgcgggcgacgcggccgccggcagcatcagcttcacgatggatggcgacagccagcgcgtctacctcggcgagaccagcctcaccattcgcgatgaggccggcaatccggtcgacaccggcaagctgaatgcctacgaaggcgtgaacggcaaccaagccgccaacgcactgaagggattgaacggcgtggccatcgacaccgtggcgcccaccatcgcagtctcctacgacaacaacgatgtgcgcaacggcaagtactacaaggcccaccgtaccggtaccgtgacactgaccgaatcgaacttcgatttctccaagaagtatgagggcgatcgtgtggtcgtcaccacgtcgatcgacggcaagaaggccaccattccggtctcctccttcaagaacgcgagtggtgacctgaagacgtacgtggccaccttcgccgccgacagcgacggcgactggactgtggacgccgcctacaccgatccgggcgatcacccgtcgaatacgattcacgaggagttcacggtcgacaccgtggctccgaagctgaccctcaccttcgacaacaacaacgtgaagaacggcaagtactacgcggccgatcgcaacgctaccattcgcgaagtcgagcgcaacttctccaaggacgaatcggtcatcaccgtcaccgccaaggacgataacggcgcggacaccgcagcccccggcccggcgggctggcagcgcaccggcggcacgcgcgaatccaccgagtggacgaactccgtggcattcacgggcgaggcgcacttcaccatcaaggccaccgccaccgatctggccggcaacaaggccgaagaggtgagcgaacccgagttcgtggttgacaagaccaagccgcagatcaagatcgaccgcgtggaagacaagaccgcgtacgccggtaccgtggcaccgttgatcgacttcaacgatgtcaacatcgacatgaagaacgtgagctacacgctggtcggcgaccatcgcggcgaactcaagggcgacaagatgcccaagaacgtcaccaccgatgcggccaacgaccgcaccgtggacttcacggacttcgaacgcaaggtcgacttcgatgacgtgtacaccatcaaggcgcacggcaccgatctggctggcaacacgttcgagaccaagaagaccttctccgtgaaccgcttcggctccacctacacgttcgatgcggacaccacgaacctgcgcggcacctacctgaagaaggcacaggacgtgcagataacggagatcaacgtctccggtcttgacctgagcaagcgccagatcgtgatcgccaaggacgacaaggcgaccacgctcaccaacaacgactacaaggtcgcgacctctgacgacaagggatggagccgtacggtgtacaccgtgccggcatcccgctttaactccgacggcttctaccgtgtgcaggtgcagtccatggacgaggcgggcaacctctcgcagaacaccatggacaagaagaacgccgaccgtaagggcactgccgaagtgaacttcgccgtcgactcgaccgcgccgactgcttcgctgctcggcatcaagtccggcaccgtgtactacagccagcagggacagcccgcatcggtggacgccaaagacaacctcggcatcaagtccaccgaagtgtatgtcgacggccagctcaaagacagctggaagggcgatgccacgctcaagtccacgccgagtctgacgttcgacgccgacgccaagagccacgagatcgtgatccacacgatcgacaaggcaggcaacgaggcgacgtccacctacgacaacatctacgtggcctccaactggtggcagtacgccacccacaccccgtggctgcgcaacacgatgatcttcggtgcactggtggtcttggccgccatcgccggagcgattgtcgcggtgaaccagcgcagaaagcagtttgcgtaccgcaagaacccgttcgagcggtgaggtgactgcactcgtttcccgttaacgagggttgtttgcggggcgttgcggtgagtaattgctgatgccatagtgggccagtccaattgattctgggctggcccactaccgttgatgagggattgcgtgatgtggtgttggctgggtatgggttgtctggtcaccggctgtggtgttgaacggcatcgcttgtcgtgcgtagacgttggagcaaaggccatgggtggtccatcggcaacacaattatgaatgcccgaaccgggtataccgattttcggggtatccacgacatgaagaatatcgcggctgtcgacacccgtcggacggtgtgggacaccatgaatattggccagcattttttggcgtatgccaacgcgacgtatgacacgttgaatacggcgaaagtggtgaagccgtttgtgaatccgactgcggatggtggtctgcagtggaagcattcgccacaggattatttcaagacgctcgttccggatccagatcagttatggaatttcaagaccatatatcaggcaccgggaaagttgtccgatggggcggct

SEQ ID NO: 1073 - DNA, 6766 bp, Unknown
  R13_10m  MAG No. k141_5044
ccaggtggctctgctgtccaagcgtatcgccgacctgaccgagcacctcaaggagcacaagcacgaccaccactcccgtcgtggtatgcagctgatgatcggtgaccgtcgtcgcctgcttgactacctcaagcgcgttgatatcaaccgttaccgttccctcatcgagcgtctgggtctgcgtcgataattgaagacttccgcccgagtacctaggatggtgctcgggcgttttacatatcgccagccaacggcaacaacggcaagagggttagaggataggccagcaggtaaggccgacaagagaacccgaatgaaggggttgacacgaggaacgacggccaaggggccagtcgaaacaaggtatgtgacgtccgctgaagaggacagttgcggttcaagcgagtcgccaaaccgcagcacagtatgtaggaataattagaaaattaaagaaggaggaaccctatggagggtcccgaaatcaaggccgttgaggccgtaatcgacaatggatcgttcggcaagcgcacgctgcgcttcgagaccggccgcctcgcccagcaggccgatggcgccgtggccgcctacctcgacgacgattccatgattctgtccaccaccaccgccggttccagcccgaaggagaactacgacttcttcccgctgaccgtcgatgtcgaagagaagatgtacgctgccggcaagattccgggctcgttcttccgccgtgaaggccgcccgagctccgaggccatcctcgcctgccgcatcatcgaccgcccgctgcgcccgctgttcccgcacaccctgcgcaacgaagtgcaggtcgtcgagaccgtgctcgccgtgaaccctgatgacgcttacgacgtcatcgccctgaacgccgcttccgcctccaccatgatctccggcctgccgttcgaaggcccggtctccggtgtgcgtctggcgctgatcgacggccagtgggtcgccttcccgcgttggagtgagcgtgagcgcgccgtgttcgagattgtggtcgccggccgcgtgatcgagaacggtgatgtcgccatcgccatgatcgaggccggtgccggcaagaacgcctggcacctcatctatgacgagggtcagaccaagcccgatgaggaggtcgtggccggtggtcttgaagccgccaagccgttcatcaaggtgatctgcgaggctcaggacgagctcaagaagatcgccgccaaggagaccaaggagttccagctcttcccggagtacaccgacgaactgtacgcccgcatcgacgagatcgcccatcaggatctggacgaggcgctctccatcgccgagaagctgccgcgccaggaccgcatccacgagatcaaggagcacgtgcgcgaggtgctcgcggacgagttcaccgacatggacgacgccgagaaggacaaggaactgggcaacgccttcaaggaactgcagcgccagatcgtgcgtcgccgcatcctgaccgaggactaccgcatcgacggccgtggcctgcgcgacatccgcaccctgtccgccgaggtggacattgtgcctcgcgtgcacggttccgccctgttccagcgtggcgagacccagattctgggcgtcaccaccctgaacatgctcaagatggagcagcagatcgacgcgctgtccggtccgcagtccaagcgctacatgcacaactacgagatgccgccgtactccactggtgagaccggccgcgtcggctccccgaagcgccgcgaaatcggccacggcgccctcgctgagaaggctctcgtgccggtgctgccgagccgtgaagagttcccctacgccatccgccaggtctccgaggccatcggttccaacggttccacttcgatgggttccgtgtgcgcctccacgctgagccttttggctgccggcgtgccgctgaaggccccggttgccggcatcgccatgggcctcgtgtccggcgacgttgatggcaagcacatcttcaagaccctcaccgatatcctgggtgccgaggatgccttcggcgacatggacttcaaggtggccggtacttccgagttcatcactgccctgcagctcgacaccaagctcgacggcatccccgccgacatcctggccgccgctttgcagcaggccaaggaagcccgcgccacgattctcgaggtcattaacgagtgcatcgacggcccggctgagatgagcgagttcgctccgcgcatcatcaccaccaccgttccggtcgagaagatcggcgaggtcatcggcccgaagggcaagatgatcaaccagattcaggaagataccggcgctgaaattgccatcgaggatgacggtaccgtcttcatctcctccgagggtggcgaggccgctaagaaggccaagtccatcatcgattccatcgccaacccgcacgtgcccgaggccggcgaaacctacaacggcaaggtcgtcaagaccacgtcgttcggcgctttcgtgaacctcacccccggcaccgacggcctgctgcacatctcccagatccgcaacctggccaacggcgagcgtattgacgccgtcgaagacgtgctcaaggaaggcgacaccgttgaggtgatcgttcagggtgtcgatgatcgcggcaagatctccctggccatccctggtttcgaggatcaggagaacaacgcccgcccgagccgtggcgatcgcgatgaccgccgtggcggccgtggccgtggtgaccgtgacgatcgccgtggcagccgtggccgtcgctccgatcgcgatgaccgtgacttcgacgatcgtgacgaccgtccgcgtcgccgtcgctccgatgacttcgaggatgattacgacgaccgtccgcgtcgccgtcgctccgatgaccgtgacttcgatcgcgatgatcgcgatgatgatcgtccgcgtcgccgtcgttctgccgaccgtgacttcgacgatcgcgatgaccgtgatgctcgcgactcccgagatgatgatcgtccgcgtcgccgtcgctcttccgatcgcgatgaccgtggcgatcgtgatgaccgccgtggcggtttccgtggcggccgtggccgtggctcggaccgcaacccgcgctatgccaccgacgacaactacgacgactaccgcgccgaccgcgaagagcgcactgagcgcccgcgtcgccgcgtccgtcgcgactttgatccgttcgaggactaaagccctctcacggatcggtcgcggcatagccgcccccctcacctacgggaagcccgcagggcttcccgcttaacggttcggcattcgaggactgatcgttctctagcttctctcgggtgagaagagcttaatcgcaaaccaaaaggcttctataccgtttcattcggtatagaagccttttggtttttcggcttcttcgcgctacatatttcgatgttgaatagggcactcgtgctgctgccatgtacattcagttgtcagttgacaactattctcatgcatcaagaatggcggaaaacagccattaagatgattggagccacgctaaaaagcgttgacaactgacaacagtttgtacacggcaccgcatggcacctatcctgttgctcacgaccggatctattctctcgtctgttgttatgcccaacagcaaaatccgcttgccgtgccgcgccatgtccgagtcatggccagccgttgattgaatggcggatgatcatcgaaggtactcatgggcgttgatcactgtggcaacaacaaaggccgggcccttgtgagagcccggcctttatgccgtatggcggcggattaatccttaaaggctaatccgttgtcaatcagcgttacagaatcgccatgcacacgaagtccagaatgaacagcgcggccacaatccagatgatcgggtgaacctccttggccttgcccttgcaggtcttcacgatgcagtacatgatgaagccgccggcgatgccgtaggagatggagtaggagaaggccatgaacacggctgcgaagaacgccgggatggcttcggcgatgtcgtcccacttgacttccttcagggaagcggccatcatgcagccgacgatcaccagcacgccggcggttgcggcggacggcacggcggagacgaccggggccaggaacgcggacagggcgaagcagatcgccacaaccacggaggtcaggccggtgcggccgcctgcggcgatgccggcggaagactcgacgtaggtggtggtgttcgaggtgccgcagatagcgccaatggaggtggcgatggagtcggcgaacagggccttgtccatcttggaggagaagccgtggccgttctccagagccttctcatcctcggcggagaagatgccggtgcgacggccggtgccgatgaaagtgcccagggtgtcgaacgtatcggacatggagaaggcgaagatggtcacgatgaccagaggcagcttggagacgtcggagaacagcgccgggaagccctcagcggagaagatcgcgccgaaggtctgcggcagctgggagaaggtttcgctgatggactgcgagttggaccaggtggtaacgccgaacgggatgccgatcacggtggtgatggcgatggccagcagcatgccgcccttaaccttcatcacggtgaacacaatggccagtacgaggccgatcaggaagacccacagcaccttgtcgttgaagtcggccagactcggggtcgccgccacggcgcctcccttggccgcggctttcgggtcgccgggggtgaacttgatcagtccgacgttcagcatgcccacataggccacgaacaggccgatgccgccgccgatagcgtgttgcagggactccgggatggccatgatgatcatcttgcggatcttggtgacggtgatgaggatgttgatcaggccgcacaggaacaccatgcacatggtctgctgccagctgaagccgaggccgaagcacacggtgtaggtgaagaatgcgttgaggcccatgccggcggcctgggcgtacggcacattggcgaacaggcccatgaccagggtgccgatgatggccgcgatgatggtggccaggaacacgccgccccacggcatacccgtctgcgacaggatctgcgggttgacgacgatgatgtaggccatcgcgaagaacgtggtcaggccggccagaatctcagtcgagacggtcgtgccgttttccttcaaatggaagaacttctccatttactctctacttccttggttttatgcggggctgcgcaccgcgcgcataatgctgcggctggccccggcgagaattgcgactcgccctgatcggcctgcccaacgcgcgtcaggcgctgcgcatccaatcagaaccgtggccgattatagcttgtggaggtaacgtgaacggatccgggagtagactgactgccagaataattcggaacaactcagggacacgcagggcacacccgtggaaggaaggcgcgcgatgaaaccggccgtcgaagtcagcatcacctcttggaagaagaatgtcgtcaagcccggtcaggagtacggccgcgtactgctgatgcctggcaccggctacaactgcgaccgtccgctgctctactggtcggcccaggctctggtcgaggccggctggcgaatcgaccgcatgaacgtacgcaacgcttccgacgacctgtccacggtgattccggtcctcaatcaggcgattgacggctggatggccgccgcgcgcgagtccggcgcgggtaaagccggtgattccggggatggcgttgccgccgatgattctgctaccgtgctggccgatggcgcagctggctcgccgaaccgtgattccgacaccccgtccggccctcgcctgttgctgatcggcaagtcgctgacgacgatgacctacccacatgtggcctcacactacggtctgccgttcgtgctgctgaccccggtgctgcatcacgccgacttcgatccatccgcccgggtgattccggtgccggctgtcggcgatgatatcgtcgccgaatccgaggcaccgagcgtggccgaagcaagggcgatcatccgcgcagaactggccgaccagtcgcacgccgccagctcccgatactccggcccggcaccgctgatctgcgccggcaccgccgacccgttctacgatcgagcccgcgccaacgtgctcaccccgcacgtgcacgaatacccggatgccaaccattcgatcgaggtgcccggccactggcgtcgctcgctcgactatctgaaggaagtcaccgcgtccgtagcccagtacgccgccacgttgtaatgccttgcgacacgcccgaattctgcaatgtcgctgaccatccgtaatctaatcatccgtaaaccacagaccgttggttgaagtgcgcgcgagtgcatttccgaagtttggttcgccaagccagcgcaggttgagagatataagcccgtcaggggccggcgaaggtcacttcgcgagattatattgctctgcctgtgcgcagggcttttttgttgcccggccgaaagttccgaactccaagtcaacggccgacttaggaaggaacgccatgaagaggcccgaaaaggaagcggtagtcgctcagcttacggaagaattccgtaacgctgacgccgtctacctgaccgagtaccgcgggcttaccgttccgcagatttccgatctgcgtgaaaagctaggccgcgatacttcctacaccgtggcaaagaacacgctggcacgcatcgccgccaag

SEQ ID NO: 1074 - DNA, 14612 bp, Unknown
  R13_10m  MAG No. k141_5093
ctcggtggtgcgtatcgccggttccgcccacgctaacctgtattcggcggtggccgctggcgtcaatgccctgtccggaccgttgcacggtggcgcgaatgaggccgtactacgccaattgaaggcgattcgtgattccggtaagtctgtggccgagttcgtgcgtgatgccaaggaggatggccagaagatttccggccttggccaccgtgtatacaagtcgtatgatccgcgtgcggcgattgccaagaagtatcttgagaagatcatggagcgcgaggatacgcagaaactgccgtccgacgagcgtgcgttgttcgatgtggccaccgagcttgaggatattgcgttgaacgacgagtatttcgtatcgcgcaacctgtatccgaacgtcgatttctacacgggcttgatttatcgggcgatcggcttcgatccggccatgttcaccacgctgttcgcactgggccgcattcccggttggattgcgcagtaccgtgagatgctggccgacccgaacaccaagatcggccgcccacgccaggtctacaccggtccggtcgagcgcgatttcatgccgatggacgagcggtgattgttggtttgagaaagcgcctcgctggagatccagtgaggcgctttctatatgtacagcgcaaaccggctatgctgcgacggctgcataagaacgagcagggctagttctgaaattgaaataatgtgtgcggtatcgaagcgtaccgagggaaggcgtacggaagtacgtcgaccgaggagcaacgaagataacgctccattatttcaatttcagttcttgtgcagcttggcgttgagctcaattcccaccttgcggtagcgggcttcgatacgtccattcaccgagttgcggatgaacaggatgttgtctttgccggagagctcagcacccttgacgacttcgagcggctcgccggctgcggccttggccttgtcccagatgctgatcttggtgccggcggtgatgtacagaccggcttcgacggtgcagttatcgccgagggagatgccgataccggcgttggcgccgagcagcgagtgctcgccgatggagttgcgcagcttgccgccgccggagagggtgcccatgatggaggcaccgccgccgatatcggaaccgtcgcccacgaccacaccttgcgaaacgcggccttcgaccatggagacgccgagcgtgccggcattgaagttcacgaatccggcgtgcatcacggtggtgccggaagacaagtaagcgccgaggcgcacgcggtcggcgtcgccgatacgcacgccggtgggcactacgtaatcgatcatgcgcgggaatttatccacaccgaacacgttgacggtggtggcaggagctgcggcaggcagtccggcctgagcagcgaaagcgagagcggcttcggtggaggcgcgttcgacatcggccttgcgtagtgtgaagtcctcaacggcgaaaggaccgtagttggtccacaccacattggcgagttgggcgaagatgccgtcaaggttcagcgtgttcggcttggccatgcgcatgctcatcagatggagtttcaggtaagcgtccgcggcgttgctgatcggctcgtccaactggctgacgacgaataccggcacgcggcggatgccacgggcgtcggcttcatcgtgagccagagtgccgaaattgtggtttggacgatcggcctcggccggtgcctcaccgagattcagttcggggtaccagacgtccagggtggtgccggcggcgtctacgctggccagaccccatccccatgcggtacgctcttcgctcatagttgctccttacatatcgttgcgtttgcgttgcatgtgcatcgcggcatgtgatggttccaccttagcgtcaagtacggctaggcgggggccatagttcgtggaatggcttgaaatcgagttgttcggtaaaaaattaccgaacgtgattggcgatgggatgataggttctccggtgaaattcgctggtgaacaactcggcaaggaggtgtgcgatgtgatgctgcatcattcgggagcataggctgtggccatgcgacgcccggcatcatagagtttgcgcttgagcgaatcgggctcaagaatcactacgcggccatcccaggaatactgcaatgcccaccagaacacggcgcgttcgggagcatcgacgatgacttcgaactgtgtgccgtccggcgaatgtttgatctgagggtcgtcgaaccattcgaacacattgttgagcatggattcgtctcgtacggccatgcggatgcgaatcggggcatcggctacgggatacgggcggtgacgcatgaagttcactgcgtcaaaatcagccggcgctggtttttccagtggaactgtgccgttcctgcctttggcgctgacgttggcgattcggttgaccacgaaaatgcggagattatcctcgccatgtagatggcagatgaggtaataccgtccgttcttgtacaccatctggtaagggtcggcggtgtaggtaattcgacctgcgcccgtacggcttttatgcggtatcagggtgccgtccgggccgtaatcacggtattggaaggttacgccgtggccttcttcaatggcctgattcagttggtcgatggtggataggaactcgccgttgatatgcgtgtaggtggccacgtgctcaaggtaacctactgcttgcccagcggcacctgcgagttcgcggattttaccgatgagatcgtccatggtgtcgaggctgatgcgagacaaggtgaggctgtcgagtagcagtcgcatttcggcggtggataggaatgcgtcaagataccagccgggttgtggattcttgcattcgatgccggcaaggtcgctttcggtgagatgcccgatatgtctgccgagaaattccgtggcggtaagctttttgagctgatttcgtatggttttctcggtcggcagctcgcttggatcttccagctggtgtttacgggcaagttcatcgagtatttgccgcacggtcaggccatgtccaaagtagctgtgacgccacagcacctcgaagatttcgagggtggtgttccctgcataggatttgcgttgcgccggcttgtctgcatccatacattaaggctaccgcgcgcctcgtctaggatagaagtgttggactgaaatgcattcgctggaaaggaggctcgcccatgagcaaagggtatggtgtatttggccatgttcccgataatgcggatgacgatgacctcctgccttatgaggatgatgattccggcgtttcctggggccatgcgttgcgccgtcgcaatccttggaaaaggggaggcgacgaaggtgccgattacgacgatgatcggtatggcgcagatgacacagatgacactaatgaggacaggggtctctttgccggcaagagcagcggtataggcggtatctctggcgaggcagatggaatgcttggtggcgcaggcgctgccggcagtagagccgtaacgtttggtggaacggacagtttgtccgccgccgatgcggttatgccctatcgtttcaggcaaggacgttccgtatggttcgaagatgaggacgaaggccatttcgccggggctgcgaagcgtgccgaagcccatgccgtccctatccttgcgttacgcaacgatgtggaatcgtcatcgtcgaatgccgtgctcgctcgtgcccgtagcattgcgcgcaaagcggccaccatggttatcaatccggtatacagcgaaaatcatcgaaccgggtatgccgagcttgacggtattctacgtggcaccaccagcccatcgagtaggtatcgtaccagcgtgcaattcgacctcgatacgggagaagccgtcggtggcaagtgctcatgcccggcttacggccgtggctatggcatgtgcaagcacatgattgcgctcgccttcatattctgcgatgatccgcagcgttttgaagggtaccgtgccggggctgtgaggccgtctcggacgctgatcgactatatggagcacgtcgataggcaagatgctcaagccaaagcgcgtcgccgcaatgcgctcatgcgccgattcgatactgcaaaaagacgaaatggcgcaggtggacgacgtacgaatagcggatacggctctcgtgccggcacccgaggcggcgggtatcagggcgatagtgagactgtgggcttggggcaggtgcagcttgttccgatattgagtttcatcgatggcgtgtggagcgtggagttcaagatcggatcgacttccaatgggtccagctatgtactgaaatcgattccgcaatttgtgcttaccatggcgaacggcgactatacggattatgggcagaagcttgcctttacccatacgccggatatgttcgacgatgattcgcgcccactgctgggcttccttgacgacgcgatggccgtgcgtcgtgcggccgagcagcaggaccggtattacgggcatatcgccatcgatcgtcacctgacactttcagcaccggaagtggcccggttgctgtccgtacgtgagggcagaggcgtacagctcgtgttgaacacatggttctccgggcagcctgcatcggtgccggttgatggtggcgagccagattttcttatgcgcattgcgcggcgtgatttcaatacgtatggtccggatgccggatacctgcttgccggagtgccggcggtggaaaccgtgattgatggtggcaaggatgtatggctgttgctcgcctccactaatccggccggtgcggtatccgccatgatggcgggctctcagcgtaaaagcgcagcgggatgccgattcgtccgttgcccgaaacgattgattccgttgcgaggactattgggagacctgtttgaacccgatggcgaggggcaggtcattgccggtgatgacatcgccctgttcgcacgcacgctattgcctcagctggttggtgccggactgttggaggccagtgagattcctcgcgagctggctgaattaagtcctacggaatgcagcctccagttttatctggatcgtgatgagcatggtgtgcaatgcgaggtcaaggcacactacggcgatgccattgtcccgttgctacccgatggcccgacggtgcatgctagggatgagcgttccgtccccttgtctcggggcgtgattgggcgtgatttcgacgctgagcatcttgcgattgatgtagtgcgtgaattctttaccatgcctgaccagcgcaagcgcgttgcggccgccactcatcagacggtgaatgggttccgaacgccggccgcgcgaaagaccgccaaacaattcgtgtctgatgcggccactatcgatcgcgatgacaccacgcagattgttcgtctttttgacgagggattgcccgcactgaaggaagtaggggaggtcttcaccacaccggcttttgaccggctgatcgcgcccaagccgccaagcgtcaaagtcggattgtccatcaaaggcaatttggtggagatatcacccctcgctgatgaagtaccgccggacgaagtgggtgccttgctgtcttcgtatcgtcggcgtcaacgattccatcatttgaaggacggcacgctggtcaaactcagcggcgcgaatctcagcacgttggaccgattggccagcgaccttgatctgagcgagcagcagctcaactccgggctgatcgagttgccgggcggtcgagcattcctactggatggtgagttgccggatgacggctccgatgtagtcaaggacgcttcgttcaccgaatacatcgacgatctcaagatcatcgaccctaagtcgtatgaagtgccggatagtctcaagcatattctgcgcccttatcaggtcgaaggcttccaatggctgaacacgttgtgcgacaagggttttggcggcattttggccgacgagatgggtttgggcaaatccgtgcagcttatcgccctgttgctgtcgcgataccacaacgaatctagtggcatgccgaccgctcaaggcatggatgccggtaatgctgttaatagtgaatcagccgtaaccggtcatattactttcgattccgaagatggcgggccgcatccatcattgatcgtgtgcccggcgtccttggtgtacaactggggtgccgaattcgccaagttcgccccgagcttcaacgccgtggtggtggccggtaccaaagccgagcgccgcaccgccatcggccgcgcgttccgggcggatgaccccaccgtgctcatcacctcatacgacctgctgcgccgggatgtcgatgattacaccgccaatgagcaacgtttcaatgtcatggcgctggatgaagcccagtacatcaagaatcacaccacgaagatagccaaagcggtcaaggccgtggccgccgaccatcgtttcgccttgaccggcacgccgatcgagaaccgactctccgaactgtggagcatcttcgacttcctgatgccgggactattgggctcatacaagcgattccatgagcgctacgagttgcccatctccaacgcccgggctgcagatggcagcacggccgaaggtcgggccgccgcacaggtcaatcctgaggccgcccgggtgtctcgccaattgcagtcgttggtgggcgtgttcatcaagcgcaggttgaagtcccaagtgctgaccgatttgccggacaagttggagaccacgctgaccgtgcagcttgccggcgaacagcgcaaactgtatgcggcccacgagcagcggctcagaatgcagctcgaacacagcgaagaagccgatttcaacacgtcgaagattcgcatcctcgccgagctgaccaagttgcgccagatctgctgtgatccaaggctgctgtatgccgatgccaaggatcagtcggccaagcttgccgccatcaccgaactggtggaaacctgcgtgaatgaaggcaagaaggcgctgatcttctcccagttcaccagcttccttgatctgatcgccgaacgtttcgacgcgcaaggactacgctactacaccatcaccggatccacgcctaaaaagaagcgtctcgaactcgtcgaccagttcaatgcggacgatacgcccgccttcctgatttcattgaaggccggcaacaccggactgaacctgaccggtgccagcgtggtcatccacgccgatccatggtggaacgctgccgcgcaggatcaggccaccgaccgagcacatcgtatcggccagaccgaagacgtcaacgtgtatcaggtggtggccaaggacaccatcgaagaacgcatcttggagcttcagcataccaagagcgagctcgcccgccagttcaccgatgcttccttgcttgccgacgaagccggcaccggcgccagcgccctcaccgaagcccccgcctccatcgccaccctcaccaaggacgatctcctcaatctgctgggatgagaagatcctgctcggtgctcttgagcttggtgatggaaacagtctgggctttgtggacccgttcgctaagccgagaccggagtcgatagcggtgtggcatggtgcgtgcgtggggagcgtgattcagttgttggctgaggcgattcggacgctgtcgttttgtgctttgttttgccgttgaccaattgaaatgctcgttggtaggagacccccaataaagctccgatttgtcgatacgtgagtccctcgttgcgtagggcccgtgcggcgagtcgggattcggcagccgcttgtgcgttggctttttttgctatttcgcgctgccggaacatttctgttacgtgttgtttggcttgtttcggcaacacaaacgtcaccttgagctccggattgtcgtcgtcgttcatgacagtgatgagatctttagccattggctcgatatcgtcaagtcctttggcctgggtcgaccgtttgatagctggtacctgaacgtaccaatatcggccatcgggttgcacaagcacgtcatagttgctcattgccaccacccctttccgagtttctgctcgctctcgttgatgatatccagcgtggttcgttctgagacttcattatggcgggggatgggtatcctcaacccgtccaggcagtaaacctcatgtctgctgccttgccgtaacaaatagaaatcgagccctcgctgctttgccgcttgccgaagtttcttgatgatgagttttcttcgtgtcatcataactctcaatctcgcactagacaaaatgcgtatgccgaattgccgggtgggagttgtgggtaaacgtagagatgttcattggtccttctttctgttgtctgacgcgtcgttgcgtgcgggtgcatctgacggtatgggatgaggtttctgattggcaagctgaacgggggtatgtggttctagcttccgagttatccacattgataaagtgcttttttaaagtgactttcccgtgttggtcgtggatgctgcgagcaaggcaagaacggtcgatcacgtcgcgatgtgtgtgggtgaatggtgaaagtgattttcgatatttttatattgatattcgatatattatgatggtgacatacggggcagtgcaggttcatccattgatattggattaaggagcatagccatgaacgctggtatcgcattcatctctcgcaaatctcgcaaagcagacgtcgcttggcgctatgccattgcacttggtcggtggcggggggtcggcgttatgttcgacgtcggtgccgtcattggcagatggcgcaaccgccacgaacacaggggtctgatcgttggccagaatcgccttcaattcctcgtccgtgtatttcttgacaccgcctttgaacagatccggtcggccggcatgatgcacttcgagcacctgccgcagcagttcgtcgatttggggaatatcggccgccgtggccctacgaatcatcatgtcatccatttgattcggtctaatcgtgcagtctcgaccggcagatgatcattgcccgcgataagagacacggacgggcaagatgggtgattgttcgttcaggctttcatcctcgccgcaacgtcacggtagtctggagtgcgtgaatcgcaagaaacagccagtggagaagtatgagcggggcacccgttcgtacacgatgtcgcatattcgtggcaaagacaccaaaatcgaggtgctggtacgcagctatctgtttcgcaagggtttgcgattccgcaagaacgacaagcgttaccccggccacccggatgtagtactgccgaaataccacaccatcgtgttcatcaacggctgtttctggcacatgcatgaaggctgttccaaacattcgatgccgaaatcgaatgtggaattctggcagacgaagctactgcgcaatcacaatcgagacatcgcgcagcgggctgaactggaggccgccggctggcgtgtaattaccgtatgggagtgcgaattaacgaaagccgtgcgtgacgaacgcctcgcacggctgtatgagcagattgttgaaggagatgcagattcagcggaataatttcagctcccctctggaggggagctgaaatcagacctcaaacgggaacttcaggccccaacggtcgcgaatcgcatccatcagctccatgatgcggatggtgtcggcgtgcggcatcgcctcgcattcgatcttgccatccagcagcgcgttggctgcatcggccacctcatactcataaccggtcaactgcgacggcaccgcaacactgcgcacgggcttgtgatcgttgttgtagatatcgatggactcgggattgttgatattggtgaccaccaaatacccttcggtgccccacacgtagccgccgcgatcggaggaaaccagcatcgaactggtggacacggccatcgtgccatcatcgtaatacaacgtggtggaattctgtgcatccacaccggtttcggcggccatcatcgacgtatcgaaatgatccagcgtgcggccatggtcggcaccgatcgccatatccaggaagttcagcggatacacgcccacatcgagcagcgcgccaccggcacaggccggatcggtcatacgtgccttgccggacaccggatagcacaggttggcgctcgccgctttcacctcgccgatctcgccggactcgataacttcgttgatgagcttgcggctgggcatgtagcgcgtccagatggcctccgtgcacagcatgccggtttcctcggccacggccagcgcctcacgtgcctgcccggcgttcgcggtgaacgacttctccaccagcacgttcttgccggctttcatacacaggatcgcctgttcggcgtgcagactgtgcggggtggcgatatacaccagatccacatccgggtccgccgtcaactcctcatacgatccataagccttgtcaaaatgccattggtcggcaaaagcctgcgcgcgcgtaatatcacgggccgctaccgcatacgggtgaatccatgaggaatacagtgaaccttcagccatctgggtcagggtgtcggccatggtgtgagctatgcggcccgcacccagaatcgcgacgttgatcttttcgccgctggcctcgaactcggcgcgtttgccattgaatcgactcattattcctccttgaatacgggttggtacactcaatcgacctacagtgattatagaagaagaaaccttgtcccgtgaggcggatagaaccgaaatatggaaaacgaagcagcgcagcagccccaatctccggccgcgtctccagtcatgtcccgccgagcgcgtgaggtcaatcccttccgtgccatggtattcggcgaacaagcagacaagatgatcgcccaaggtatcagcgtcatcaaattaagccttggcgagcccgatttcggcgcgccgcccgccgtacgcgacgccatgcgcgaacagtacgacggccgggccctgccgtacaccgccgccatgggcctacctgaactgcgccaagccatcgccgacttctaccgcgagcgtcatgaccttgacatcgaccccaagcgtatctgcgtgaccgccggcggttcggccgccctgctgttggccaccgcgctgaccgtggaccccggtgacgatgtgattgtggccgacccctcctacccgtgcaaccgcgaacttgtgcgctcctttgaggggcgggtcatcgacgttccgacctcggccgccacccgcttccacctgaccgccgacctgtgcagccagtactggacaagcaagaccaaggccgtaatgatcacgtcgccgtccaaccccaccggcaccaccatcgacttcaacgtattggacgaggtgtgcaagctggccgccagccgcggcgcatggcgcatcgtggacgaaacctaccttgatttggccgaccgtgagccggacggcaccgaagtcaagtccgtactggcctgcgatcccggtgccatcgtgtgcaacagcttctccaagttcttcggcatgaccggctggcgtctcggctgggctattctgcccgacgaccccaccgtgctggaagcggtcgacgacctggccaccaactactacctgtgcgcccacacgcccacccagcatgcggcgctcgcctgttttacgccggagagtttggccgaatgtgaagctcgtcgtcaggaattgcttgcccgtcgtcgcattgtgattgacgggctcaagcgcatcggtttgccggttgaggtggagccgaatggcgcgttctacgcctacttcaacatttcccgtactggtctggatgcctggacgttctgcgaacgcgcgctggatgaagcccatgtggctctgactcctggccgcgacttcggtgcggccacagcggatacgcatgtgcgcctgagctatgccgcctcacgtgaggccctgaccgaggggctggaacgtctcggaacgttcgtcgaatcgttgtgaacggcgcggcatccggtgtgattgttgtacggtagtcgagtttgtgtgatgttcggctggcctcgcggtgttggttgccggccgaacgactcgccatggtggcgcacggctggctgattgcgatggtcggcccgttgttcggccatcacgggttgggtaaggtcaggaatagggatcatggtcaatctgcgttcgcgcaccacgcgacttggtgtgcttgatatcggttcgaacactatccacatgcttatcgtcgacgccgctcccggcgctcgccctgaccccgaggccagcaccaaatccacagtgcgcctgatgaagtatttaaaggatgacggctcaatcaagaagtccggcatcgaggcgattctggaagccgtgtcccagtgtatgcggctggccgaggaatacgaaatcacccaaccgccacggtagccaacaacgccgcatgatcggagccctcgactttgaccaccttgcattgcccggccttcatgccctgatcaagcaccacgtggtcaataccggcgaacatcggcatatacacgcggttcgtaggccacgaaaacgtaaacccatgtccggattcacgtgcggcatccacgaaccggtcgccaagaaaatcacggaatggcgtgtgatcgtaagtggcattgaaatcgcccatgaaaatataccgtgtatccgtatgcccgcgcatcggacccaactcatccagcgatcgcttccactgccgccaatagccgggtacgggagcggtggtgtgcacggatacgaatcgaatctgctgaccacccatatccaccgtgccgccgggcatgaatgaggcgctggaattcacgtcatcgtcggccggatcggcaagtggcgtggccgaccagaggccgttaccgaatacgccgtcagacgatgagacctgcgcatacggcagatagtgctcaatgccagcctcgttgagttttttgacgaaatcctcggtggtctcctgcaaagcgagcacttcgacgcgctgatcgcggactagttcgacgatggcttgtgggtcggcctgccccttgtatacattgaaggtcatgacgcgcgcgtaggcatcgctggtgttgggggaggccgcagccacggcgttctgcgcggcttgggggagcgggtcggtcgagtagaagaacggatattgccaatagccattgcatgcgattgcggcgatggcgattagtgcggcaaggatacgccgcgacacgatggccaacagtagggcaatcaggccaagcaacgtgaaccagggcgttgccgataccacaatcggcacaaatggcagttcctgtaaatcggcaggcagcgcgcgggcggcagtgccggcaagggcaagaagcgcgaacatcgtggcgagaaaaccaagcagacgatgccgtttgtgtggcttcacggcagacttggatactgggcgtgccgtggctttggcagagcgtggcttggcagcggcgcgagctcgtacgcttgcacctgtggtagtactccgtgcctttgccatgctgccctttcctccggcttgtttactgttaccttgcttttcgtgcgatttgccactgtaccgtgtgcggcttgtctttcggtgtcttttcgccgtgcgcaagagcagttcgcaccaaaccagcacgaaaaccggccatgccttggtggcgggttctgccaggtagcttacacagactgccatgcgtcttatgtaggctgccacgcgaacatgatgcgactgggcgtgcggccgtgtacaatgaaacgtcgttgcccgagtagctcagtggatagagcaccgctctcctaaagcgggtgtcgtcggttcgaatccgatctcgggcacttggcttcggaaacatgacggtatctcagcctctattcatcggtgatgagccataggcattaggcatgtgtaaacgtataggttccaccatccatcatcccgtcatgtgaaactatgcaaagacatgtggggcttcacggttatcgtgagggtccatggctatcgaatacacggaagagaagcggtttactgtcgaacaggttgaggcgctgttcaagtcggttggttgggaatcggcgcagtggcccgaacggttgttcaaggcattgcagcattcggatacggtaatcagcgcatgggatggcggctatttggtcggcttggttcgcgtgctcgacgatacgggagggggcgaaagtggcggagtgtgctgatcgggggcaacgtacgtagtcattgacggttatcccgtagtaatgttcacgatacgaccccttgtccatacagtgaaaataacggctggcgtccgacgcggctgcgctatgactagagaccatgagtgaagacaaacagtatgacttctatgtggccggtccgttcttcgatcctgaacaaacggcaagtatggaacgtttggaaaagatattggaagaccatggcaaggtactgttcaagccgcggtttgtcagccagatcgaagaagtaggccctgaaggatgctttgcggacgatatccatggcattaatgctgctaaagccgtggtcgccaatcttatggacgaggacccgggcacgatgttcgaaatcggatatgcgcatgcgctgggaatcccggtgtacggctatttcgaaaaccttac

SEQ ID NO: 1075 - DNA, 2599 bp, Unknown
  R13_10m  MAG No. k141_5413
accccgtaatgacaccaatggaaaacgacgcgaccgtttacgggggtgtcccggacggcccgttgtgcgtcattcgctgttgtggttgtcccgtgtcatcgccggcgccttggtcctacgcaaaagcaccttgcggattattccatatcccgtctacacgatgcaatggggttctggcgggcgggaattagcgattcggtcatcgggaggagacgtggaaggtggcggcgatgccgtcattgccgacgccggtaaatgggcgctgggcatgccctgtttcctgagcgagagcccggccctgtatcgtctggcgatttgtcgatcgttgcgattccggcgttctgccgggctttcatttcgaaatgacgcatctggaatagtgcggccgtctttggtgctcctctcttcagtgatccgccgaggttacgcccatggctgaacgcccggaatatcccgcgaaatccggcgagacggtctaggccgcggatgtaccgtgaatggcgcataggcgtgtcggtcgccgcaatcatggcaatgagaggaaaccccgttatggatcatgcatcccgatctcagcatcagactcaggccgatgcgtcttcgatctcttcaacgaatccgacggcctcgtcgccgctgcccacccaggcgccgccgtggggcgcgctgtgggtgatggccctgggattggccatgatcgtgctcgacagctcgatcgtcaacgtctccatccccaccatcatcgatgatatcggcattaacctgaccgacgcccagtgggtcacctcgctctacaacatcgtgcttgccgcgttgttgctgcctttcggcaagttgggcgacgccagggggcgcaaactggtgtttcaagtcggtaccgtgatcttcgtggcgagttcgatgctcgccgccgcctcgcagggtgcggggatgctgcttgccgcccgtgtgctgcagggcatcggaggcgcgatgatcatgccgaacaccctgtccacggtgtccgccctgttccgtggcaaataccgtgccgcggcgttcggtgtctggggtgcggtgatgagttcggccgccgcgctcggtccgctgctcggtggcgcgttcaccgagactctgggatggcgttggattttcctggtgaacttgccgttgggtatcgcggtctttgtgtcagccatcttcctggtgccgcgaaccggtgggaacgcctcggtcgccggcgccgcggatgccgcacgggacgcccgatcccatcgtgtcggtgtggatattccgggcgtggtgctgtctgccctgacctcggccctgctggtgttcggtcttattgaaggcgagacctacggctggtggaagcagacctcaacgcagttgaagctgggcgggttgagctggaaccgtgactggttgtcgccggtgccgatctgcctgatcgtcggtgcgcttctgatggctgccttcattgtcttcgagtcggcgcggggtaaagccggtcggccggtcatgctggacatgaccctgtttcgcatcaggacgttctcgtggggcaatctggcagctgcggccatcgccgccggtgaattcgcgctggtgttcatgatgccgctgtacctcatcaacgcccgcgggctcaacacgctgcaggccggtgcgatgctggccgtgatgggtctggggtccatcgtcgcaggtgcgcaggcccatgtcatggccgccaagctcaccccggccggcgtgattcaactcggtcttgtgatcgagatcatcgccgtcgccctggtcgcggtccttatgcctgtgggattgtcggtgtggtggcagcttattcccatggccgcatacggtctgggtctgggcttcgcctccgcgcagctgaccagcgtggtgctctccgaagtgccgatcatgcagtccggcgaagggtcggccacccagtccacggttcgacagctcggcaccgccgtcggttcggccatctccggcgcgtcgttggccatggccgtcaacggaacattgccggcgcggctcgaatccctcgggctgcccgccaaggtcggcgacggtctggcccaagcggtcagtggttcggcgggtggagtgatcggcgtgttccgcagcggtgatggaccggcggcccgattcggcgacgaggcgccgaagattgctgatgcgatgacttcagggttcatcgaaggaggtcagtggacgcttctggtcgccggcatcatgctgttcatcggtttactggcctcggtggccgtgcgtcgtgccgcatcgtcgcacaacgtgcgttgacgcatgacggctactgtcttatggggagtgcggtcgtgcgcggtcgaacgatatggtccgcataccgtccactgcacctgcggtcggttcgccggtggaaggaacgacgtatcagacggcgtgtcgtgatccgatgatgctgtaacatgtcctttgtgcctcatcgaggcgcgcatggccccgtagctcagttggttagagcgccgccctgtcacggcggaggtcaccggttcaagtccggccggggtcgccaccaaactcccgatgcatgtcgggagttttttgtttcctgccgttcttcgatgcc

SEQ ID NO: 1076 - DNA, 41378 bp, Unknown
  R13_10m  MAG No. k141_5536
atttcgacgtgaacggttcccgccgcgtagactgttttctccggaccaggcgaacctcctgcgtcgcaccccgaatccgtccgcaacggctggcatcgccatgccggaccttgatccaatcacacccgcacggcatggcgcacgggcccttccggggcgcgcttgcgccggcggaccgccgcaatgccgccccaaccgcacagcagcaccgtcatgcacgcccatgcgccggcggtccgaccgtcatgcagatcggtcggatcgggggcgggaacgggcatgctcacacgatggccggagaccaggagccggtgggagttgatgccgtatggcgtacaggtcatcaacgtcagccgatcctgcccgggaacaacgcgcagctgcgaggtatcggtcggttcgattacggtgatgcgatcgacttcgtaggccagggtcctgttcatcgttgagatgtagatgaaatcaccttcgcgcatttcatccaatctggtgaacatctgcgcctgcaccatgccgcgatggccggtgatgaccgcatgggtgtcgttgccgccgaccggcaggctcgtgccatacagatgcccggagccaagggacaattgcttgtctccggtgccgtggtagatgggaagatccactgagatcttcggtatggacacgcggcccatgatgccgtgaccttcgttgagcagcctgccgtagcgttgatcctgtgctgactgggaggacaggtgttccccgttactgaacgggtcgacctgggctcccagcaccggctgcccggaccggacgagatcgcggttgtaggcacgcgccgcccgcagttcgtcgtcgatccggctttccggccacagtcgcacctgctgttcgacggaagacgccgacgcggacatggacgtctgcgacgcatactgcatcagcagcggaaccaccgtgcataccaccgccacggcgatcaaaatccccgcgacggcgtacatcacgcgcaatcgccgccgcatacgggcatgcgcccggtattctttggcaacgtcgaccagctgctcgaacgaaggtgccaccggcgtcattcggcccttactcaggctgcgaaactacgcttcgttttgcgggcacgaacgatgacgatcgaggcaccgccgatgcacagtaccgccacgacgccgaggatggccatgcccatggcaccggtcagcggcagctgggtgatgcttttgatgttgcggtacacgtaaccgttaccgccatcgctgagcagcccactggcgggaacgctcatgtcggtgatcgactccagcttaatcgtcccgttgtcgttcttcatcttgacctgcagtttggccgcggagccggaccaatagccattcggcaccttggtctccttgaggtaataggtgccggtattcagcttgaagctactaaaatcgacgagaccggcaccgccggatgtggctgtgacattcttaccattggcgtcctgcagaaccgttgtgaagtctttgtcagagtacacggtgaattcggcacccgacaagccggtcctgtcgttttctacacctaccttggtgaactggaagccgccgcgattggtcgtcgtggaaccggtcttggcgtttgcattggacgtcagatccacggtgcccgtgctgttcgacacgttgcagccggcggtaagcggagtgccgacgagcatattgttgaagcctgcatactcaacggtggtatcgcccgtgtccttggtctgcttcttgggctgtgtagcatcgaagatcacatacaggccgggttcggtcatagtgagcgtcatggtattgttcgtgtcgtcgacactcaccttattcgcttcaagcacggtgccgatgactcccggattatccgcgtacttacggattaacgaatcctgcccagtgttggcaagccagttcattggatcaccttgaagatccttattttgatacagtggcgtaccatcattggatttcagttcttgcatcgcctgaagaatgctcgtctccgaggccgccaccgtctcaagatgcaccgagccgccggacgtgtcatcaccgatcttgtagttggcgactttcgccactttgaacgtgcggttgctcgaagaggtctttccgttccatgtcttgaacgcgtccgcatccgtgcccttcaccgtgatggtgttgccgttggtcgcgcaagtcgtggaagtttgcgagactcccggcgcacccgactcttcggccatggcgctggccggtgcggtcatagccgcgaacagtgtggccgccgcagcgactcccgccatccatgattttgctttcattgttctcctccttatggaatatatggatgaatccatgttggtcatacggaacggttcccgtatgaacgttttctgatatgcgcggcgattgccaacaccgccaacgcccctccggacgccaccatgccgacaatcgtcaccacccacgcggcacgacgccccgcggagggcagcgcggaaaccggttgcggccgattggtcagacgattgtccgtaacgccggcccaatcaccccgtccgtgcagtacggctttcgccttggggtcctcccggcgaatcgtgaattcggcccaggtacggtcgctgtcgggcaaccggtatccgccgggcgcggtgacctccgtcagccggtaggtgccccagtcgagattgtcgatggtcagtttgccgacggctggatccttgtctccggtgccggcacaggcggcattaccgtcgcccacgcaatcggcgaagttatagagggaatcgttgaccttgttccacgtaccgtcatcgttgcgtcgttcaagccgccacgtggtgccggacaggtattcctcgtgatgatcggcgtccaccttgctccacgacaccgagccggtgatcttcttgtctcgaatcgtcaccgtatagccaccggtccattgatgcaccgacgcatgcggactgccatccgcgttcgtcgggccgaaatacgcgcctccgccgcaattcgtcagatagaaatcggtctgctcgtcgttgatctcatagccgagcggcgcttggagctctttgatccgatacgccgtgccgcactgcaacccttgggttttgccgacgacgatcatgcctttctcgtccgtcaccgctgtaatgggcgtgggcttgctcgacgcatagtcatggccgtcccattcgagcagttcgaatttggcgccggccagatcccggtagccggacgcatcatcatcggttttatgcaacagcatcgtcgatgtctgcacgatgacgccgctactgctgatggccgcgccgttcgtattggccgcgccggcatcggaccatggcgagttggcgaattgcgcggtgttcgccacgtcgaatccggcggagcctttgaacccgtactggtagctgatggtcaccggcgtggaatcgggaacgtacaccgtcaatacgccgccgagtttggcatcgttttcctgatatacgatcgcatccgaggatggttggtacgttttgccggccgggcaggactgtccgttgcctatccaggcgaggcacacggtcacgttgcccaggaacgtgacctgcggattgctgccttccggtatggcgggcacggtcagcgtgtctttgatgggcagcatgtcggtatcggggacatcatcctgtttcgcatgcgtggcatcgatgttcagtccataccggttggcgcgcacataataggttcgggtgaagcttttgccgtcggaggaccagccgctgtcgacgttctgcttgtcttcgacgccggtattggttttctggaaattatcgacgaaggtttccgacgtggacacggaaggtatgctgccggagcccatggaaaccgtattacggtatttggccgtcaggcaatcgccggcaccgtttttcagcgcgggatcggcgacgcaaccccgtttgccgtcgtatttgccttccgcccagtacttgccgtcgttgatgtcaggagtgcgtgcggccacatacagatacacgttgccgtcgttcatgagatcggtcgcctgttgggggatggtgatctggtacgtgcggtcgccggtctgcttgacggtaacgacatattgcacaccctgggtattggtgaaccgcgtctcccccacggtaagccactgtttgcggtcgccatgatcggagaacgcgaacttcacgtcgtgcaggccctccggcagggtttccgtgaagacgagcggcgcgcgacgccaattgtcggtcacgtgcgcgctgatacgccatcccacttgcctcacggacaccggatcgggggtggcggtacgtgtgtagtcggcaccgttggccgagcaggaggtgaatttggggttcccctgtccgtcgaccggatcgccgcaaccgtctttgaccaaagaggcgacttgcacactggaggtgacgggtttgacgaacgctccaccgacgccggttcccgcggtggctgaattcttacgcacgatcgtttcactggaatcgaacaggctttgataggtgatcgccgcggttttgccggtggcaagcgcgttgtcggccacgaaccggaaggacgtgtatcgctgtgattcctgcgccttgttaaggtctatccaggtcctgccgttgtcggaggacacttgcgtcgctccggccagctgcttaccgtcgacggtcacgcgcagactgtcctgcagcagttgcttcgtgtaccagacgccgctgccggtgtcctgcatgacccatcccgccggcagttggcccttgccgtcattgcgcaccgagacattccacgacgcaaggccgcaatggccttccgccacgcccatggtctggcactgctccgccgagggggtctgctgcccgcccgccgttttggtgagtgagatccttggccgcagcggattccaagcgactgcgttgttggtgaaatagtcgcctccgttattggaacggacgaaccgcgaaatgtttttcgaagcgggatacagcacgtcattggcgaacgtcgaatcgtattgcaacgtcaacgtctgccctgcgggaatcgaatacgaatccggctggaaaacccatttccaataggttcccgtggccaatcctccggccggccatgtgacggcgggtccgcccttgtagctcggcagcgtgaccgtatataccgtcaacgtgccgtgccccatcgttgtggtcaacgtttggtacagatcgttgatgttctcagccgtgtaccatcctcggcttgacgaggtggaaccgttctgttccgcaacgttctcatacgccatccaatcctcgatcttcacgattggctggtcgatggttcccgtgttgacgtattgcgcctgccatctggtactgagcgttccgtccggttgcagcgtcggcgtgccgacgacctgcttggaggtgctgccgcttctgcggtacatggtgatggtggtggtatggccgttgccgaaatccaatacggtctgccctggattattgccggtcaccttgttgcgatcggcttcgatgtacaatcggccattgtccagtggggcggcggcgttcttgctgatggcgtgctcactgaagacgatggtcaccaatccgtctggagcgatcgtgtacgtgccgagatcgtcgttgagcgtgcccgacatggcggtaccggtgccgttgaatcccgcgatgtggtatcggaacacgtggttgtcttcggtgatgcttcctttgggtatgacgaattgcgcgtcaaaacggaattgggctattttcgtgctgtaatcgaacgagacattgccgtgttcatccacgggaacgttctgccattgcgtcgaattctgcaatcgatattgcactgcggcattgctgatgcagccgaccaatcggccggaaggctggctagaatcaacgacggtgccttgttcgtcctgattccaaggacgtccgcacgccggcgtctgttgcgcggcatcgacaacccccccccgtcgacggcggcggccgtggcgaccggtacgatcatgccgacgaccagcgcgacagccgtcgccaaccgcgttaaacgtgtgaccataccagaactccgcacatactgacggttcatcgcttcgcgcgaaccatcgtgagatagtgaccgcaagggatgcgcttgtttgaatgcgcgccgaagcacacgtccctaaacgcgaaaacgtaaccctttattcaacaaatgttatcacttgtatcatatgtcggcatatctttgtgccgggatatggaaccggtatacggccgcgcctccggccgcgcgcgtatacgaatacttcgcgccgctttccgcttctatcaggaacagttacctgaataaaccgggttacctgaataaaccggacagttggctccatagcgacggcttgcgcagcaaatcatcaccctcgccctcgccaggcgcggtttggttcaccgcataggtgtaggcgcgtttggaactgggcttgcccaccagttcgccaaactccagcaattgcgtacgcggctcgtaagggtgacggatatcaaattcgatcaatcgcgtggcacgtttggccggagccggtccgtacgtattgaatccgcaggttggcgtagcgataagcaacagaccctcatgttcgccgacgaaaccgttgcgatgatcatgaccagctacgacgccgaaatacccctcgcgcagcgcctcaaactcgtccgactcatccgggcaggaaatgccttcccccagatacccgccggcttgagtgcgatcctcgtccagcacataataggtatccgcatgcttgcggtagccctgcatggcgaaagccgcattggcggccaccggtttgagtacctggtaatactccggcagcggcatgtgctggaacaccattgatttggctccgatatgttcgggcaaagccttgaggaaggccaatgtctcgggcgaaggcgtgccgaaaccgcctccatgcgcatagtcaccggaattcaccagtaccagtcccagtacgttgcgcgtgcaatccacatccatcaccggcaatgcaaaagtgccgggaatggtggacgcggaaatcggcgcatcggtttcttcaccattggttgccgcaggcgagccgtccttatgacacatatatacggtctgcttggccagcgcatcgctcggcggattgatgcaaccgggaaactcgcggtagattccgtcgagttcggcattgctcaaaccgcactggaaatcgtggttgccgtaggtcaccgcccacggtatgccccgtgacgccaaaggagaggtaaattgaccgatggccttgcgcaccaattcacgcgtatggttcaacgcagattcaggaatcgcctcttcgcaccaacggcgtttgcggaagctcttggcaaaggccggatcgtagccggcgatctggttgccggagaaaatcaccagatcaggccgtgtggcatcaaggctggcctcaatcagggcgatggtgtctttggagactttcggcccatcctgaatgtcggcaatctgcagcacgcggaacttgccggaatagtggaattgcagtcgtccgagacgcgcagagatagagaccgggcggccgtcttcggcatcggccggcttgatacggggtttcgacgacatcccctctggcgtacgctgtgtttccgtcatgccctccactgtacacacaaacgaaaaggcccgccggagcgggccttttctacaagttcaactactggagcagaatctctgcacaacatcatcgtcgtaacggtaagtctttccaatgcccgtccaacgtaacagtcctcgtgaccatacactatttgtgggctctgctctgttcagttgttcttgtacctcataatctattcatcactcccgtttctcgcaacctgcagagagtcgttgtgcgttttttatcacaactgttcaatcgcactttctgactatcggaaaacgagctgaaccgttcacatcgaacccgtctgatgttcggtttcgttcgtttcaccgccgctcacggcgtgtcgcgagcacgctagcacactcaaaaccaaccaacaccgaactaacatgaacacccgttgaattctggcgcgttcagtcgttttccggccacgccagagcttacgatataagctatggcacagatatttgacgcaccctcgaaggcaattctgcgcagccaaatcgcagagcatattgccgaaaacgacaacaacgaccgccgcgtcgatcaggaaggcgaggcaccgctgcccaaggaccgtttcttcgaccgcgagctcagctggctcaagttcaaccagcgcgtgctcgaatgcgcggagaacgaagacatgcccctgctcgagcgcgccaacttcgccgcgatcttcgcctcgaaccttgacgagttcttcatggtccgcgtcgccggcctgaagcgccgtatcgactcgggcatcgccgtgccgtctgccgccggcctgagcccgcgtcagcagctgcgcgcgatcagcgagaccgcacaccgtctgcaagacgagcacgcacattacgcgatcgacaccattctgccggaattggagaaggagcgcatcgtcctgctgacgtgggacaagctcacctcctccgagcaggagcgtctctcgcgttactaccgccagcaggtgttcccggtcctgacgccgctcgccgtggatccggcccacccgttcccctacatttccggcggttccatcaacctggccgtgattgtggagaacccggcctccggcaagtcgcacttcgcccgtgtcaagatcccgggcaacctgccgcgcctggtgccggtggacgacatgaccgacgaggagtccaaggacgagcgttacggcttcatcgccatggaaaagctcatcgccgcgcatctggaatccctgttcccgggcatgatcatcaaggaagcccgctccttccgcgtgactcgtaacgaggacatcgacgtggaagaggatgacgccgagaacctgctcaacgccatggagaaggagctgctgcgccgccgcttcggaccgccgatccgtctggagatcacggacaccactagcccgttcctctcccagctgctcgccgaccagctcggcgtaagccaggacgaggtataccgtctgcccagcccgctggacctgaccgtgctctttgagctcggcagcgtggaccgcccggacctgaagaaccgtccgttcgtgccgaccacgaaccgtcagatcgccgaggtcgagtcctcccgcgcacaggacattttcgccgccatccgcgagcgcgacatcctgctgcatcacccctatgactccttctccacttccgtgcaggccttccttgcgcaggccgccgcggacccgaaggtgctggccatcaagcagaccctgtaccgcaccagctccaactcgccgatcatcgacgccctgatcgacgccgctcatgccggcaagcaggtgctggctttggtggaaatcaaggctcgtttcgacgaggacgccaacatcgcgtgggcccgcaagctcgaacgcgccggcgtgcacgtggtgtacggcatcgtgggcttgaagacccactgcaagctcatcgaagtcgtgcgtcaggaagcggacggtctacgccgctactgccacgtaggcaccggtaactacaacccgaagaccgcgcgactgtacaccgatctgggtctgctgacctgcgacccggtggtcggccaggatctgactcgtctgttcaaccagctctccggttacgcgccaaagtccagcttccaccgtctgctggtggccccgcgcaccgtgcgcaccggtctaatccagcgcatccgccgcgaggaggacgccgcccgcgccggcaaggaggcctggatcaagatcaaggtcaactccatcgtggacgagaagaccatcgacgccctgtaccgtgcctctcaggccggcgtgaagatcgacatcgtcgaacgcggcatctgcgctctgaagcccggcgttcccggcctgtccgagaacatccgcgtacgttcgattctcggccgcttcctggagcactcccgcatctacgccttctgcaatgcggacggcccgcagatcggcgagggtccggcttccggcccggaggtctacatcggttcggctgacctcatgcaccgtaaccttgaccgccgtgtggaggctctggtgcgtgtcaccgccccggagcagattgacgggctcatcaagtacgtggacctgcagatggccgactccaccatgagctggcacatgcagcccgacggcacgtatgtgctgcacaccaaggacgacgagggccgcccgctggtcgacagtcaggaatatctgattcgcaagcaccagcgccgccccaattcgcacaactgatttcactcgatgctccctgtcaacgcaagctgactgagggtggttacgatgcccggctcctctttcgagaggatgccgggcatcgttgttcagcgcgcaaaactacgtagcagcggtccaacgtgacctacaatacaagagatgggtacgaacagtatgagacgaatcgtggaagccgccggcggtattctgtaccggtggaaggatgatgccgagccgacgcaggcatcatctccatcagcgaaatccaatattgccaccgatggcaccatcatcgcgaacaccacggattctgacggcaaggccacggcagcacacggcgcatcggacgcggctcccaccccggacctggcgcaggccgacagcccggccgcggcggacaacgtactcaaccgcatcgaactgtgcgtcgtgcatcgcccgaaatacgacgactggagctggccgaaaggcaaggtcgacccgaacgaatcgcaccggcatgccgccgtacgcgagatcggcgaggaatcgggcctgtccgtggaacttggcccttatctgggcgacatcgagtacccgctgtccgaagaaggcagcaaacagcgccataccaaggatcggtcggcggataccaagcatatccagttctggatggccacgccgatcagcgccatcgacaacctgcggcgcacccatgcgtttggcccggtgcatcgggcggacatcggcgaaatcgacgaagttttgtggctgacgccggccgaggcccgcaagaagctcagccattccaccgataaggacatcctcgcgctattcgttgatcgggtcgaagaaggtgcactggacgcggtgccggtgattatcgtgcgccacggcaaagcggaagcgcgcaagctgtggaagggttcggacgcgaaccgtccgatcacgccgcgcggcgcggctgcggcatacgcgctgaaccgcgagctggcgtgtttcaatccgacccgactggccacgtcgccttgggtgcgctgccaggagacgttggagatgttcgcgtggcagaccggacgagacatggttcatctcgatccgctcaccgaagatgcatacgccgctgcgccggacaccgcatgggagtgtctactcagcgaaatcgagttcgcacttgagcgccgtcagcccatagcgatatgcatgcaccggccggtgattgggggtatgttcggacacctgcgcagcatgtgcgttgcgccgtctctgagcaaacgcctgatcgccaagacaccgttcatgccgaccggcacggcggtggcgctgttcgtcactccgacgcctcatggtcccaaaatcatcgatattcagaaggttcaaccgcttgtctactagacccgcatttcctgattcatccaactcctcggccgctgccgccgcggctcatgccgcgcacaatggtgccgccggcagtctgggcccgggcttcggctcgttgcgtgcggtcggagcggcattcggacctgctcgcatgggttcttcacgcccctcgcgcccggctcagctcgacccggctgtggccgatggattggccggtggcatggacccgcaggcgttgaacgagatgagtcatctgtctgctgccgcattgctggatcgtgtgcgccatagcgaagacccggcggttgttgagcgggtgctcacgttggtggagacggtcggcgtggatgaaatcgccgaactatggagcgatgccgagccggattcgctgcctggtgtgctgtggcgactgtatatgttgcgtacgtggatgcgatcgaatcgcgactcgatcgcgcatctgtggcgcttgggtgagccggtggccactaccgcctccgccatcgccggcgtggatcaggctcccagtgaagatgacatcgtgcgattggccgattcgattctctccggtgcttttgtgggcgattttgccgtggcgcttgagcgtgcggcggcgtttaccgatgtggtggcgttgggcttgcgcgtggaggcgcggcgcatggtgacccgggccgaggccaacggcgccttctcctcggatgccgatgagaaggccgtgcgcaccaaagccgcccgccttatgcacaccgccggcagcctcatggccaccgccaaggatttccagcacggtgccaacctctggcgtcgcggacggttggagtagccctgctccaggctccctctgatgagggagctgtcacgggcgatgcccgtgactgagggagagacccaccaaccgcaccccaacaatcagctaccagccaacaccacacctcccccggcgcggcgagccccatcgcaagctatactaagtatccgcgtcggaccgtgcttaagccccgggctccattttttgccgccgcgagcggcccttgcgccgacaggcgctttcgcggttcggcgcttcttttcttttacccgattcacgccccgaacgttgcgatgggcacgaccagtatgccgtcattgcggcgataggccttcccacctcggccggtaaggaacatcatgaactctggttcgcgaacttgggccatggggttgccacagattttgtcgcggaaggatttgagcttatccgcattgtcatcgttcaccttaaggtcactgagttttatttcgatagcaccccacctgccgtcagacaactcgataatgacatcaacttcaagccccttgtcatcgcggtagtaggcgatgcgattgttcgcacccggcatggccgacagatatacattcaaatcacgaatgcacagcgtttcaaacagatcgccgagcgtctgtgtatcgcgcatcagagtattcggcgcggcacctaaaaccgcagcaggcaacgaaggatccacgaaatatcgcttgggcttggttcgcacacgactctttgcgcggagtggcggctcccaaccctccaaatccgtcagaaggtacaagtccttgagcattcccaaatagctctttactgtctgcgtatccggttcacggcgctcatcgccataggccatatccgcagccagcgtcgcatattttggtgcctgcgatacgttcacggcgagcgcacgcatgagtgcacgcgcggtttcagggttcttgttcatcttgggcacgctgatatcaagcacactcttgatatattcactcggaatttccagagcaaactcgtcatccaaatcaagatttgcgggccacccacctcgacagcaccatctggcaatatcttcaatgttggttgcacattcggcaggctcgaattgtccatcaaacaaaccagacaagctcactacaccggtagattgccctgactcgcacagactcataggccacatacgcaagcgagaaattcgacctgtgccactgtggtgaattgtttctcggtccttcggaatggccgagcccgtaagaatcagctgccccttgcgattcgcattgtcatccacatgacgacgagcggcatcccaaatttgcggcacatcttgccactcatccaccaaatgcggttcattacccatgagtaccaatgccggatcagtctgtgcggccgcaaaggtagcggcatcatccagacgatccatacttcgcgagcgggaaagcgccgtccatgtctttccacaccattttggcccgacgatttccaccgcaccgaatgctttaagtaacttacctaacctgccatcgaccacgcgagcacgataatcaggttgagtcaaggtatcactacgattgttcaaatcgttcattttccggcctttctcagctacccaatcacctcaatatagattttacacctttctcattcccgattttacactatttccattcccggttttacaccattccgattcccggttttacaccgcaaggtgtctagtttcttcctatgacttaatccaccgagaatcaatccaacgaatcttcgcgcacgactgcgagcactaggccaaacttgacccattccgatgagacatatttcacaataccgtagctttttcagctggtttccagaaaccgttgacttactgtccggttcggcctagatacgctctttttcgaatctcatgaaatcaacgtcaacaccttggggaaactctcatgaaggcaaccatcaccaaagcgactatcgcagttctcgccggactcgcgatcctcgccgatgcctttctgcttttttcgatgaagatatccaatagacgccacgtgaatgtcattgccatagtgacggatgcacgcgcacgatgcgagcgtcgagccgctccacgatgtcgtggtgatgcgtggagaacagtacagtcttgccggcatcagtgaaggcgcgcaatacctcaaccactacgtcagtattgcgctcgtccaagccgtcggtcggttcgtccagaacaagcaggtccggattcatcgacatgcagcaggcaatcgccacacgctttttttcaccgccagacagacggtatggcgcccgctcccgcatccgatccaagccgaacaacgtcaccatgtcatcgactctgcgctgtacttcggcatccggcaaccccatctgcaacggaccgaacgcaatctcctcttccaccgacgggcagaacagctgggtgtcggagctttggaacacgaatccgatgcgctgatgcagcgctttggcgaacaggctgttcttcgcctcgacttcctcgcgaaccaccggagtaccgccaaaccgatactcgcctgagtccggaaattccagcgcattgatgatgcgcatcagcgtggtcttgccgctgccgttcggcccgagcagcgccacgcgctcaccgcgttcgacggtcagcgaaaaatcacgtagcacggcgtgcgacgaggtttcatcgtcggcgtcgccgtaatctttataggaaaagtcgatgtgattcagttcgaccagcgggtcgccgcggaaccatgagttatctggctgcatggctgcagtttgtttatgattacgctttaatccgaacattattgggctccattcattcgaaccaccctcatcccgaatacaccgccagcgcaatcattgcagcaatgcacacggcatacaccccgttgcgccacgtcagcagacgctcgtggtggatatgatacgtaccgtcaaacccccggcacaccatcgattcagccatttgccgtgcctgcgtattcgcacgcagaaacagcgcgcccatcaactggccggcggacgtcagcttggtccggtcgcggcccacgctgcgcaaccgcagcgcatccagcaactccaccatcgaacgaccgagaatatcgatgaactgaatcgtcacgtcgcagatataaatcaccgaatcagggtagccaactgcgcgcagtccggcaatcaggcgattccacggcaccgtacgcgccagtgcgatcaccagcgacaccgccacgaacgcacgcaccaccagccggaccggcgcactgtactgcccaatcagcaggctcggcaccgccacgaccaggctcaggatgcatacggccagcaccgggccgagcaacgccctcatcaggcgcgccggccgggtcgccatcatcagcagcaccaccgccagcatgatgtacgagaacagcatgttgcatgtgatgttgacgcagacaatcgcggccagtatgcccagcagccgcacgcccggattgaccgagcccagcaccttgtcgaccgggctcgactcaatcggcaacgcatgaccaacctgctcgagtacgctgccgaaatgccccaggttgtgttcgatgaaggatgacttgtcagccggaggatcgtaatcctccgactcacgcatccatgcaggtatcgtcaacgcgcggatgtcttgccgttgccgctcaccgcgagcgccagcagacggaacacgatagtgagcacggcgatgccaatcactgcggagagaatgtagccggcgatgtccggcagaccctgcagcgagtagtcaggcaacagcgcatcccacgagaagccatgggcgatgtactgcggcacgtagttgagccccgtggcactcatgaagtcctcggcgccccactcgccccaggcgtcgccggtggcgagcaggccgatcggggaaagcaccgccaccacggccagcgcaatccacgcagacttgcgcagtccggcgtgcgcgacctgtttgccgtcagcaccggcggtctcggcgaagttcacacgggcattgtcttcgataatctccggtgcggtacggcgcacgaattcgacaaccaccacggtcaccagaccctcgaccacgctggctacggccaggtgcgggatcagcatggcgggaatcgtcacgttaaaggtgaacgggaagtagagcgcctggccgtcagcggctttgaacagcagcggctgcacgccgagttccagcgccacgcagaatgcggcgagcgtgatgccgatatagccggacacgaattcggccacgcgttccttccagccgtcgggcagcaccttgcgtagcaacacgtacagtccgtaagccacaaacggcagcacgaacgccatgttgaagcagttggcgccgagcgtgatcaggccgccgtcgccgaagagcagcgcctgcagcagcagggccaccgacacggcgaccgtcgcgtactggggaccgagcagcagagcgatcagcgcgccgccgacaccgtgcgcggtggtgccgccgggcgtgggcacgttgaacatcatgatgaggaacgagaacgccgcgccggcgcccaggtaggccatcttctccggcgtgctgttgcggatcacgtagcgtaggcacagcacccacaccggaatcatgatgacgtagaacaacgccccggtggacggcgaaatgaaattatccggaatgtgcatcgccaatgtgacggtgtcaggtacttcgattatatccaacttccctctttttgttgatttcggagctcgaccacaacctcccgctccaggaacgtgatatgtaatatcacaactgtgattcgtctaatgcacaaccatgcaaaatagcttgcaattactagcgacacaccgtgtaccatatatccggtttccgtgttttcggatatttttccgctatattttttgcatatttcgatcattcgttacaaagtgacgcaacaggctctctacactgtggcatgaaggacgtggggattctcacgccacaagcaattttctccaaggagaacggatgatcgccaaagaaatcaccggcaacatcatcagtcagcagtacagcgacggcaaacttaatgtgtcgattgccttcgactggttcgaaaccgataagaagcgcatgcgcaaggtggccgaggacggcaccgagttcggcatcatggttggcaagaccatcaaggatggcgatgtgctcgccgaaaccgaagacaagcgctatttcgcacgcattaaaaccgcacagctgattgagattccggttaactcgatgaaggaaatgggacgcctgtgcttcgaactgggcaaccgccacctgagtctcaaggtcgagaacgaccgcgtgctggtgccgtacgaccatccgaccatggaatacacgaagaagatcggttatgaaccgcatatcatcgagggtgggtttgacggcttcctgatcgtcaaggcccacgccggcaccggcacactgattccgggcaccaacaagaccacgggcgacgtggccgaggaggagcaggaagccgaggccgacaaggaattcccggccgaggaggccgccggccatctggatgtgcatacacacgacgcaggtgagggtgagcccgccgaatatgagatgaacggcgtgctgcaccgcccggacggctcccacagccacgacggcggccgcacctggcacacccactgatagccccatgaacatcaacgaaaccgaatcgcgacgtctggccatgctgcaggtgtgcgacagcgtcttccccgtgggcgcgttcgcgctgtccaacggcatggagaccttcgtacagcgcgacttcttgcgccgtggcgccgatttcgaggagtatatgaagaactacctcgaagtcgcaccgtacaaggaaatcgggcagatggtgctggccggcaagtacgccaccgattcgcgagtctcccgcaaagggctggccgagcgactcatcgaacttgacgagctgacctcggccctgcaatccgcacgtgaaatccgtgaaggcagcgagcgcatgtgtacccgcctggtcaagctggccgagcagatggatgccggccaggcgcagacctcggatgggcatcgtgggttcgccaagccaagtcctgccgacaatgccaccgcatccgctgcggattcgcgcgaaaacagcatcatcgccgtgcacgagcatcacaccgaacgccaccagctgcacgatgccgccgacggcctgtacggctcgccgtcgctcgacctgtatgccgggctgattcgcgagcgccgctgccgtggcctgcattcgatcgcgatgggcctgtacgcggctgaccatgcgaacgacgtgcgcgacgcggccatcatgtatggatattcgctgttgagcgcgcttaccatgtgcgccgcgaaggcgattccgctcagccagtacgctggccaagtcgccctgcatgattcgttcccgcgcctcgtgcgcgcggtgaatatcgcgatgacgttgaagcccgaggatctcggcatctccggagcttacctcgacatcgccgccatgcagcatgaaatcttgtactcgaggctctacatgagctaattatcctggctcccctcaaggaggggagccaggataacctcacccgcaaaccacatacctaaccaattcccacataaaggagaaaccccatgtcatacgtacgcatcggcgtcgccggaccggtcggttccggcaaaaccgcgcttatcgaacgcctgacccgcaagatggctgacgaatacagcatctgcgtggtcaccaacgatatctacaccaaggaagacgccgagttccttatcgagcactcacgcctcgcgccggaccgtatcgtcggcgtggagaccggtggctgcccccacaccgccatccgcgaggactgctcgatgaacctcgaggcctgtgaggaaatgacccgcacccacccggacgtgcagatcatgttcgtggagtccggcggcgacaatctgtccgccacgttcagcccggacctggccgacgccacaatctacgtcatcgccaccgatgagggcgacaagatcccacgcaagggcggccccggcgtcacccgctccgacctgctggtgatcaacaaggccgacctggccccgttggttcacgccgatctggacgtgatggcccgcgactccaagaagatgcgcggcgaccgcccgttcatcttcaccgacctgatgggcggtgccggagtggacgacgtcatcgcatggatcaagaagagcgtgctgttcgaggacatgtgatgttttggcccgcccgtatccaaaaacggacgggccgaaacataccgttgcaccaagtgcggcataattgcccatgtcatcgtcaggcaccaatcataagaaggcagcgattcgtccatgggcagtagcacttttcgtctatccactgcattccgccacggacgtaccaaaatcgacgatatttatttcgaggcgccgttcaaactgatgaccccgttcaccaacggacgtcattcggatttcgtcgtgatgctcgcctcccctggcttcctgaggggcgatgaagcccatatcgatatcgacttcggcccaggcaccgattcgaccatcaaaacgcaaagctacgagaaggtgttcgacaccgcggacggctcggccgaacgcaccatcgaactcagggcgcgtggcaatgccaaagccgtgttcctgccgttcccagtgattccgttcaagaacagctcattcatgaacctgaccaccgcgcatatttccgccgagtcagcattcgtgtatgcggatgtggcgacatgtggccgtgttgggatggatgagcgttgggccatgaaacgttttacgaatcgtatgcgcgtatatgtggccgaacccgaagccgtgaccaaggccgccgcagccgaattggcgcaacagcacgcacatcgccgaggccggccttccaaggcggaagccgccgctgcccaaccgcgcgaacatctggcctttgctgaccgcatgctgttggaacctgatgcttttgactacaccgaactcggcatgtggcgcgaattcacccactgcggcgttctctacgctcacctgcccgaactcgaccctagcgacgctgtacaagatgccgcaactaaagaagcatcctccgccgccatccgcgagcgcatcgagactgcccgcatcgccgccgaagacgcgctcatcactcgcatccacgaacacgcagacgccatcggcttcaccggcgagctcggcgtgagccgcgtaatcaatggcatctgcttgcgtgtactgaccacccgaggcgacgacgccttcgacctcattcgagatgtggccgatttcgtgaccgatttcgtggccgaaggctaaaaccaagtggctctcccctttgaggagagccaccagttctctcagaacaggaagtaccgctgggtaagcggcaactcgtacgccgggtcagagtggaccggttcgccgtccaccgtcacttggaaggtttcgggattgacctgaatgtcggcgagcacgtcgttgaacttcagatccttcttgcctaccgtgcggcagccatgcactggtaacacctggcgctgcagctccagcttgcccttgatatcgtcatccacggcggcctgcgaaacaaacgtggcgcaggacttgccaagcgcacggccgagcgcgccgaacatatcgcggtagtagacaggttccggggtcgggatagaagcattcgcgtcacccatacgagagtaggcgatggagccacccttgatgaccatttccggcttcgcgccgaacatggacggctgccaaagcacgagatccgccatcttaccgacttcgatggagcccacgtattcggaaatgccgtgggtgatggccgggttgatggtgaacttggagacgtagcgcttgacacggaagttgtcgttgcggttgttgtcgtgttcgtcttcggggagcggaccgcgctgcttcttcattttgtcggcggtctggatggtgcgggtgatgacctcgcccacgcggcccatggcctgcgagtcggagctcatcatggagatgatgcccatgtcgtgtagcacgtcttcggcaccgatggtctcggggcggatgcgcgagtcggcgaaagagatgtcttcgggcacattgcggtcgaggtggtggcagaccatcatcatgtcgagatgctcgtcgatggtgttgcgcgtgaacggcatggtcgggttcgtggaactcggcagcacgtttgggaagccagcggcacgaatgatgtccggagcgtggccgcctccagcgccttcggtgtggtaggtgtggatggtgcggcccttgaacgcggcgatggtgtcttccacacaaccgccttcgttcagagtatcggtgtggatagccacctgcgtgtcggtttcgtcggccacgccgagtgcagtgttgatgacggccggggtggcaccccagtcctcgtggatcttcaggcctgcggcaccggcgcgaatctgctcacgcaacggttcggggctggagtcgttgcccttgccaaggtaggcgatgttgatgggcagcgcttcggcggcctcgatcatgcgggtcaggtggaaggctcccgggttgcaggtggtggcgttggtgccgtcggccggaccggtgccgccgccgaccatcgtggtcacgccaccggcgagggcagtgcgaatctgctgcggggagatgaagtggatgtgggtgtcgagtccgcctgcggtgacgatgaggccttcgccggcgagagcttcagtgccggagcccgcttcgagaccgggggtgataccgctcatggtctgcgggctgccggccttgccgatggcgctgattttgccgtctttgatgccgatgtccgccttgtagatgccggtgtagtccacgatgagggcgttggtgatgatggtatccggcgattcaacgtcgagctgcacggagctttggcccatgccgtcgcggaatgatttgcctccaccgaacttcagttcatcaccgtagtgcgtgtagtccttttccacctcgatgatgaggttcgtgtcaccgagtcgcacgcggtctcccgtggtcggcccgaacattcccgcataatccttgcgcgtaataatcttcatgtcaaaagtccttgctgtttttcagctccccttgtcaggggagctggctcgcgaagcgagactgagaggtagtccgctccccgctggcgggagctgtcagcgaagctgactgagggtggcccttagctcagattcccgagaatccaagctcatgcgccttcttaaacgcggcctcccgcacctcagggtcatccaacttcccctcaaccagtgcgctgaagccgtgaatctcacgcgtgccaccaatatcaatcaaccgcactcgatgcgtttcacccggctcgaacctcacagccgtaccagccgcgatatccaaccgcttgccatacgccgccttacggtcgaacttcaggtacttattaacttcaaagaagtggaagtgcgaaccaatctgaatcggtcgatccgcagtgttcaccacgtccagctcgatgtcttcggaaccttcattgagttccaaatcatcgtcagccagcagatattcccccggcaccaacttctcggtggattcgatggggttatgaatagagacgagcttggtgccgtccgggaacgtggcctcgacctccaccacttccagcatctcggccacgccatccatcacatcttcaggcttgagcagcgtgcgaccgtatgccatgagctccgccacagtgcttccctcacgcgcccgctcaacgcattcggcggaaatcaacgcaatcgcctccacatagttgagcttcacgcctctggctttgcggtctttggcaagctgccccgccaagtacagcatcaacttgtcagtctctcgtggtgtaagtctcataacatcctctgttgttgactggagtttttcaggcacaccaatgtgagccctaacatcgcccaataataagagcgttataagaacgggacgtttctcataacgctctatggccataaacgggggtcgaattaatcacactctcatggattccttggcggcttctacttggtcggggccgccttcgccggtggcgatgaaacggccggaggccaggacgtagtagcggtcggcgcgctcgacggcgaattggaccttctgctcaaccaagaccacaccgatacccttgtcttcggccatcatgcgaatggccttctggatttcggcgacgatattgggctggatgccttcggtcggctcatcgagaatcatgagcttggggcgggtgatcagcgcgcgggcaatcgaaagctgctgacgctggccaccggacagcagaccggcacgtcggccagcaaattccttcaagaccgggaacatttccacggcttcgtcgtaacgggccttggcctctgaaccgtagcggtcggcgaccacgtgcaggttttcgtccacggtcatggtgccaaaggactgctggccctgcggcacgaacgccatgcccttgcggatgcgttggttcggtgcagccttggtaatgtccttgccctcgaaactaatcgaaccggacgaaacgggcagcaagcccagaatcgccttcaacagcgtggtcttaccggcaccgttgttgccgacgatgctcacccattcgccggcggccacgtcgaaactgatgtcgttgacgacggtcactttgccgtaaccggtgttcaaatcctttacttcaagcattgccatgattattcactttctacggcgtcgtgcatattgatgttgaggcgcgttgtatcaccctcaatatgcactgaaaaagcgcattccgggatgcgatggttgttgtcagtgcggtccatattgcgcttcttcctcttacctacccccctcagtcaccttcggtgacagctcgtccgcaattaaggacgggccttgcctgcaacctgctggttcgactatcgtctcgccttcggctacaaacagcccaccgggctgtttgcttaacgcctcggcctcagggaggggagacagggagttagttttctccgccgcccaggtagatgcggactacttcttcgttgttttggatgtcttcgaccgaaccctcggcaaggatttcgccctggttgagcaccgtgaccgaatcggcgaactgacgcatgaaatccatgtcgtgttccacgatgatgaccgtgcggttcttgctgcatcgcttgagcagctcaccggtctgcacacgctcggccggagtcatgccggccaccggctcgtcgagcagcagcaggtgcgcgtcctgcacgagcagcataccgatttccagccactgtttcttgccgtgcggcaggatgcctgcgggcttgtttgcatccacagtcagattgcacacgtccatcatgtattcgatgttctgcgaaacgccgcccatcggctggaacagctcacgacccttcttgcggaagccctcggccagctgcagattctccaacacggacagctcttcaaccaccgatgcggtctggaaggtacgcccgacgcccagcttgacgatgtcgttcggcttgcggcccaacagctgctcgccacggaattccgcggaaccagtggccggcaccagtccggtaatcgcgtcgatgatggtcgttttaccagcaccgttcgggccgatcaggaatcgcaaatcgccgtgctgcacagtcaaatcaagattcttgacggccacgaatccatcgaactcaacgtgcagtccacgaacttccagataatcgctccactggccgccgcgatcatccagcaccgcaagctgatcgtgcagcttcgtacgctcttcaacgatttcggccttcatctgggccgcttcgtcgcgcatacgcttggcttcgtcgcgcatctcaatcatttcggcgcgcagctgctccaaatcggcctgcgatgcaggtgcgggagccgatggattcgagctcatgttcttctcctcactcatgcgttcaccgcctttgcagtagcagtaccggtaccggcaacggcaccagcaccagccgaagctccaaccgaactctttccgagcccgatcttctccttaatccaaggccatacgcccttgaactgtcccaagcccttcggcacaaaggcaatcaccagaatgaagatcaggccttcgatgtacgtccacgcggacggatacgcctcagacagctgcgtttccgcaaagcgcaccagcagcgtgccgaccaccgggccgagcaaagtggcacgtccgccgatcaccacgccggcgagcatcaggatggacggcgtcacgccgatatcggacggcgaaatgatgccgaccactggcacgaacattgcgccaccaatgccggcgaacattgcagccaccgagaaggcgaacaccttgatggaggcggggttatagcccaagaacttcatgcggttctcttggtcgcgcacgccgataatcaggtcgcccataaacgatttgcgaatccagtagacgataagcaccatggccagcgtcaggaacgcgcagatgtagaagatcatctgcttgttggcgttatcagtcaagtcgtaaccaaagaatcccttgaaatcgttgagaccgttggtgccaccggtggttttcgactggccgataagcagcacggcgaacgcggcaaccagcgcctgcgaaagaattgcgaagtaggcgccacgcacgccacggccgaacacagccagaccgaggattgcggcgataatgcccggtaccgcagccacgccaatcacggcgatgaccggattgcggaagagttcccagaatccaggaaccttggtgatgccgtactgggacatgaagtccggcacttggcccacgccaatgtcctcaagcttcatgtggatagccatcacgtacgcgccgagaccaaagaacaggccttggcccagcgtcagcataccgccttggccccaagccaggccgatgccgaccgcgaccatcgcgtagcacaggtatttggacagcaggccgaggttgtacacgctcagcacagtcggagaaaggaagatcagcgccacggcaatgaccacaccgatcaaagccttatatttcgtggcgtattcgctcaaagtcatcttcattgtcgtttccttacccttctgaagcactcacgcgaggttcctggagcggatggagaccaagccctgcggcctgaactgcaggaacaccaccacaatcaggaacacggcaacctgaccaatcgaggcagaggtcggcagttcgatggacgactggcacaagcccagcacgaacgaggcgataaccgcgcccttgagctggccaacgccgccggccacaacaaccaggaaggcctgcacgatgaaggtcgtaccgaagttgaagctaatcgagttcagcaggctcagcgccacgccagcgataccggcgatgccggagcccaggaagaacgtcacatggtcgaccatcttggtggagatgccggaaacctcagcgaggtcgcggttctcggaagtggcgcgaatctggcgacccagcggcgtgagcttcaggatcgcgtacagcgcagccacgcagataatcgacagaataaagatgaacagtcggcctgcagagaagctgtagccaaagatggtcaccggattggtcagcgcttcaggagccgaagcgtagaccggagtggcaccgaaaatatcgcgtgcgagctgctgcaataccagcgatacaccgaaggtaaccagcagcgtatcaagcggacgattgcgcatacgctccagcagcaacacgtccagcagtaaaccaagcaaaccggctactacgaaaccgaccaccagcgccacggccagggacactgttttattgccgatgaccatgctcatgacgtatgcggtgtatgcgccggccatcatgaattcgccgtgggcgttgttgataacgcccatctggccgaaggtcaacgacaacccgagggctgcgagcagcagaatcgatccgttggacagacctgccacaatttgtggaaataacatacccatgttgttgtgtcctcttctctcagttgctctcgacgctggcgctcaggctcttggcccagctgtaggtcttcaggtacgggtccggcttgatgggaccgtccgacttccagacggtgtggatgagcttgtctgagccgatcttgccgatgtatgaggtcttgtagatgtggtggttttcgccgtccaccttgaccttgccttccggtgcattgaaggtgacaccgtctgctgcagccttgaccttgtccacatcgaacgacttggccttctcgaccatgcccttccacaggtacacagatgtgtacgccgattccatcgggtcggaggtggggcgattggctccgtagcgcgccttgaagttcttcacgaacgtcttgttttgcgcattgttcagcgtctggtagtagttccaagcagtgagctggtccttgacgttgtcaacgccgatagcggaaacctcttcctcggcgatagacatggaaatcaccggcgtggtggcggctttcaggccggaagccttgtattccttgaagaatgcgacgttggaatcaccgttcagcgtgttcaccaccgcatccgcaccggagaacttgagcttgttgacgatggtggtgaagtcggtggagcccattggggtatattcctcgccgaccacttccatgccattgccctcggcgtacgccttgaccacgcgatttgcggtctgcgggaacacataatcggagccaaccaagaacagcttcttgtagccttgctccttaaggtaatcaagcgcaggcacaatctgctggttcggtgcagcacccgagtagaagatgttcgggctggcttccatgccctcgtattgcagcgggtagaacagcagcgcgttatccgcctcgaacacaggcagcatggccttacgcgaagaggacgtccagccgccgaacaccgcggccacgcattccttttcgatgagggtcttggctttttcggcgaacacagccggctcggacttgccgtcctgctgcactaccttgagccgcttgcccagcacgccgccctttgcgttaatctcatcaacggccatgtgcagcgaatcactcaccgtctgttcggaaatggccatcgtgccagacagcgaattcacgaaaccgattttgatggtgttgcctgaggtgtccacacatgatgaggtgtcgcttgccgcagtcgcgttgttctcttgggcctctttctcggccacggtgcgaccccagccacaaccgctggtggcaagcactgcggcaacaatgcacaccgcagcacccatcttcagtctttgcaatcgagtcatatgactcttcctccccacatacgactacattccgcgaacgttgcccgcccgcggaatgtctacgctgattgccgtaccgtgccctgatgcctgatatcgtgctgaaccacttgccgtatatcgacggctggcttccggccgactgcactatacgatggcagtgcctgcgtgaatttccgttgcctgaatatttcatatgcgtctcatacataacgctcacgttacaaaatcaacggtgttacgcggcccgccgtcgaacgctgtttacattggtgtgcgatacgcgcgcgactgccgcccaagtgacttccccgcgaactacgggtaggctggggagtatggaacttcacgttttgaatcatccgctggtcgagcacaagctcaccgtgctgcgcgacaagaacactccttcctccactttccgcgagctcgtctcggagcttgtgatgctcgaggcctatgaggccacccgcaacctgtccgtagttgccgcaccaatcgaaacaccggtcgctccgatgaccggtaagaagctggccaaaccgcgtccgatcattgtgccggtgctgcgtgcaggtctgggtatgctcgacggcatgacccgtcttatgccgaccgccgaagtcggcttccttggtatgaagcgcgacgaggaacaccccactcagcaggtcacctatgcgaaccgtctaccggaggatctgtccggtcgtcagtgcttcctgatcgacccgatgctcgccaccggtggcacgctggttgctgccacgcactatctggccgagcgcggtgccaaggacgtgaccgcgatcaacatcatcgcggcgcctgaaggcatcaagttcgtggaagagcacatcgatccgtccatcgacttcaaggtcgtagtgtgcgcggtcgacgagaagctcaacgacaagtgctacatcgtgccggggttgggcgatgccggcgaccgtctctatggcgtaattgactgattttcctggctcccctcagagaggggagccaatgtgatgggctttttatgcaaatcgacattattgcgccgggacgcgtgaaggaacaatatcttcgcgacgccatcgacgagtattccaagcgactttcgcgctactgcaggctcaacatcattgaagtggcagatgagaaaacgcctgaccacgcctccgaaggcgttgaccgacagatcaaggccaaagaaggcgaacgcatcgccaagcatctgaaggacggcgcgtttgttattgcccttgccatcaatggcaagcagctgtccagcgaagaattggccgccaaaatcaacgaccttggattgcgtggcaccagccatattcagctggtcatcggcggctcaatcggccttgacgacgcgattctgcgtcgtgctgattttctgctgagtttctcgaagatgacgttcccgcatcagctcatgcgcgtgattctgctggagcagatttatcgcgcttataagatcaacgctggcgagccgtatcacaagtaaaacaccatacctcatggggcggtaaaaccctcatggggcggtatgccaaaatggcttaattccgcggtttcacatattcttcaaaccgccccatgggcaagttaccgccccatgggcacatcaataacgccctcaacctcacactgcgtcggggacgaacgcttcgaagatgtggcggtcgaagtagggcgcgcactgggcgagttcatcgctgctgcgcacggtccatgaaaccggcatcgcacccatcgaacgagcgagcctgacttgcggcgaagcgccaccggtccagtcataggccacgaaatcaggacgagacagccagtcgaacgccagtaagccggcggcccattcagccgcaccattcttgctcagcttcgccggccagctcagctgaccgcggcacacctcagggtgatgctccttgtaccaattcaccgcgcccggatggaaggattcgatcacgtacgggccgtcatacgcctcaagcaaggcgtggcccttttccatgagctcttcgctacgctcatcccaagccttgttgtcgctgaacttgtattccacaatcagcggagcctggccggccaccacgtccagcacatcggagaacagcggcacatgctggtagtagccagcgggggcggtggaaggcgtgaccaccagcggcggattcgcgtcggcaccgggcagcggcttggccttcagatcgccgggcttgctgccggggaacagcgggatgcgggtgagctcgtcatatgtcaggtcttcgacgcgacgaggatcgccggccacgcgcagcaggtcggcgtcatgcaccacgaccacttggccgtcaagcgtcagctgcagatcgagttcgatgccatagccagcctcgcaggcggcggcgaaggctgccagcgagttttcaggagcgatcgggccgatcatatccgcactgccgtagccggccttgacagccatgcgacgggcaagcgacacataatcatcgttttcggcgatggatcgctcagtggtatcggcttgggcgctgaccgaattatccccaccataatcagcgatatcggtatagccgaccaaaccagaacccgcatcgtgcaagccacgatgggcataccataccttcggaatggagggcacgaaattacgacgcttgtcattgaacgtgcgcggggccacggcccacacggcagcaccggcggcggccacgcctgccagcgccacgtttctccagagcttcgacgacattggaatccttcctgttgggctgcctctagcctaacgcttctgccagccattgtggagtggttggatcgtccggtttcagcgcgcggtccaggtggttggcacgcagcggctcccagctgaaatctgccagcagatcggcgggtttgcaagggattggagtgggttgcagacgcagcaaccaggcgcagtatccgatgatttgctcgggggttacgttgcgggcgcgcaaggctcccatatccagcgaacgttcgcgcttggctaaacgccgaccggccgcattgtcgatgagcggcaggtgcgcatactcggggtgctcggcgagaggcttttccgtgttgccgcattccggctcaaagccgccagccaacagacactggcgaatccacatttgcagcgcggtggagcgcagcagatcacggccgcgcacgatatcatcaacatccatatcgaggtcatccacgaccacgaccagttgatagccgaacagtccatcggctcggcgaatcacggaatcgcctacctcgcgggccaaatcgtagtgctgtggactatagacacggtcgttaaagcatgcgacaccatcaacgattccggcatcgccctgctgttccggcggcacggctcccgacagcgcagcggaatcgtcaggcactgtacgttgcttttctcccgctgccggtttcggcatggcgatacggatggaatgctggtcgccgcgagacagacgggcacggacctcgtcgggatggtcgtgcagcaggcggcggcacgcgccggggtacaccatgaagccgtcgccctcgttgggggccgaggcggcgcgaatgtcggcgcgcgaacagaagcagggatacagcacgccctgcgagcgcaagcattcgagagcgtattcatatcgttcggtgcgctgggactggaacatcggctcaccatcccagtcgagcccgagccaatgcagatcgtccatcatgagccggtcggcgccggcaaccacgcgcggcttgtccacgtcttcgatacgcatcagcatgcggtcgccacgcgaacgggccgaaagccatgcacccaacatggcgtacacgttgccgatatgcatgcgccccgacggcgtcggcgcgaatcgtccggtcaccagcgtctctccttctgcgaaaactcagcaccatggtaacgaaaaggctcttctcctcagaggagagccgatacagtgaagctcgccggcccgaactcccctcagtcagcttcgctcagagaggggagccagtgattgtcacttatcttcggtgacgttgtccacgctcacatccgggtcgtcggagacgatctggtcgctggcccaggcggaaagctcaagatgctcaccaccggtctggtcgacgagcacggtgtcgccatcgtggaccttgccggccagcagcatacgggccaactggtcgcccacttcggtctgtaccaggcggcgcagcggacgagcgccataagccgggtcgtaaccggtgttggccagccattcgcgagccgagtcggtgacgtccagcgtgatgcggcgatcggtcagacgctgggccacgccagccacctggatatccacgatgccgccaagctcctcacgcgtgagcgggtggaacatgacgatgtcgtccagacggttcaggaactccggcttgaagttcatgtggacggcgtccatcacggccttcttcttggcgtcggcgtccatgtcctcgttcacgaggaactgcgagccgaggttggaggtcatgatcaggatcgtgtttttgaagtccacggtcctgccctggccatcggtcaggcggccatcgtcgagcacctgcagcagcacgtcgaagatctccggattggccttctcgacctcgtcgaacagcaccacggaatacgggcggcggcgcacggcctcggtcagctggccgccctgctcgtagcccacgtagcccggagccgcaccgatcaggcgcgagactgaagccttctccatgtattcggacatgtcgatgcggaccatggccttctcgtcgtcgaacaggaagtcggcgagcgccttggccagttcggtcttgcccacaccggtgggaccgaggaacaggaacgatccggtcggacggttcgggtcggagatgccggcacgcgaacggcgcaccgcgtcggacacggcggcgatggcttccttctggccgatcacacgcttgcccaggtagtcctccatatgcagcagcttctcgttctcgccctgcatcaggcggccaacgggaatgccggtccagtcggagacgatctcggccaccgagtcggcgtccacacggtccgggaccatcggctcatcggccgggttggccgcgccggcatcggcagattcggcatccgcgctttccgcggcggcgagttccttctgaatagccggaatctctccgtacagaatcttcgaggcctcagccagatttccctcacgggtgaacttgtccgcctgcacacgcaggtcatcgagcttggcacgcaggtcaccgaccttgttgtggccggcctgctccgcatcccaacgcgccttgaggccgctgagcttctcacgggtgtccgcgagttcggcttgcagcttgcccagacgctccttggatgcaggatcctcagccttcttgagctgcatttcctccatttcaagacgggtcaccttgcgctgcagttcatcgatctcctcaggcgaggagtcgagctccatacgcaggtgggcagccgcctcatcgaccaggtcgatggccttgtccggcagctgacggcccggaatataacggttcgagagggtcgcggcggcaaccagcgcgtcatcgccgattgtcaccttgtggtgcgcctcgtaacgctgcttcaggccacgcaggatggcgatggtgtcttccacgctcggctcgcccacgaacacctgttggaaacggcgttccaatgccggatccttttcgatgttctcgcggtactcgtccagcgtggtcgcgccgatcaggcgcagctcgccacgggccagcataggcttcagcatattgccggcgtccatcgagccttcggccgcacccgcgccgacgatggtgtgaatctcgtcgatgaaggtgatgatctggccgtccgcgttcttgatttcgttgaggacgctcttcaggcgctcctcgaactcgccacggtacttcgagccggccaccatggagcctaggtcaagggagatgagcttcttgccttgcagggtggtgggcacgtcgcccgccacgatacgctgggccaggccttccacgacggcagtcttgccgacgccgggctcgccgatcagcaccgggttgttcttggtacgacgggagaggatctgaatcacgcggcggatttcctgatcacggccgatcaccggatcgagcttgccttccttggcggcggccgtcaggtcggtggagtacttctccagggccttgtacgagccttccgcgtccgggctggtgaccttcgcgccgccacgcacgccgggtacggccttgcgcagggaggctgcggtgacgccgttcttctccaggatttcggccgactggttcggcttgctggccgcgatgccgataagcaggtgctcggtggagacgtattcgtcgcccatctgctgcatttccttctcagcctgggcgatggcggcggtcagctggcggctggcttgcggctgcgaagtgctggagccggatgcgctcggcagtgcgaccaaagcgttacgcacggcggcgccgatggcctgtgggtttccgcccgcggcctcgatgagggagcgcaccacgccgttttcctgacgcagcaacgcatccatgacgtgcagggtctcaacctgcgcgtttcctgcggcggacgcactctgaatcgcgtcgccgacggcctcctgggccatggtggtgaacttctgttccatatcgtattcctccatatcatgcggcccgcgcggagcggctcgcgggcttcgaaagccccgcaagcgccaccgcagaccgcaacttgtcgttgtctgatatggtcaaccgacctggaacccattctattcccaaaacttgagtgcaagtgactcaagttttggattttggtggggagggtgaacagtagccccctctgatgagggagctcacatctatttcaggaggccgacggcagcttcggcggcggataggatttcgccggagaggatggcgttggctacgccttcgatttgcggggtggtccaggtatcgcgtacgtcggggccgatttcgttggcgtactggcgcaccacgcggtatacggcggcgcccgccgcacccggacggtacggcttgcggaagtcgaaggagcggcaggagcacagcagttccacggccagcacgcgcgcaaaggccggaatcgaccggcgcagcttgcgggcggcggcccagcccatcgacacgtgatcttcctgcatggcggagctcggaatcgaatcgaccgaggcgggcacggcgttgcgcttcatttcggagacgatgccggcggcggtgtactgggcgatcatgaaaccggagtccacgcccgggtcaccagccaggaacgccggcaggccgcggttgcgcgccacgtcaaggaagcggtcggtacgacgctcggagatagaggctacgtcggcagtcggaatcgccaggaaatcgagcacataggccagcggcgcgccatggaagttgccgttggactccacacggccgtccagcgtgacgcacgggttgtcgatggcggaggcgagttccacgcccgccacggaggccgcgtattccacggtgtcgcgggcggcgccgtgcacctgcggggtgcagcgcagcgagtaggcgtcctgcacacgcacggtggagcccgggcggccggcctcgatcagaccggagcccttgagcatgcggacgatgttcgcggcggaatcgccttggccgcgatgcggacgcagcgcctgcaagtcggcggcgaacacgcggtcgttgccgagcatgccttccacgctcatcgcggcggcgatgtccgccgtcttgagtagcaggcgcagatcggtgatggccatacacaacatgccgagcatgccgtcggtgccgttgaccagcgccaagccttccttctctttcaaatcgacgggcgtgatgccggccgcacgcagcgcttcgccgccgccgatcttgcggccgtcagcgttgcgggcctcgccttcgcccatcgccaccaaagcgcaggcggcgagcggcgccaaatcaccggagcatccgagcgaaccgtattcgtagaccaccggggtgatgccggcgttcagcatatcggcgtagacctgcgcggtttccgggcgcacaccggtgcgtccggtgcacagggtgctcaggcgcagcaccagcaggccgcgcaccacctcacgctccacttccggtccggcaccggcggcatgtgagcggatcagacttttctgcagctgcgcgcgctgttccttggggatggaagtggaggcgagcgcgccgaatccggtggagataccgtaatgcggcacggtgtcgtcggccaaatgatcgataaccgcgcgacttagcgccatctcatgcttcgattcgtccgaaatcgccactttggcaccgccgcgcgctacggcgataacgtcctcgatgctcaatgccccaacgcctacggtgaccgtctgctctgccatgttttcctacctctctatcgtgccgagctccacttggtattggatatattcatctcgccagcatggcatatcaacgttacgggactgtccacaatatgcaccgccccgcgccagcgccgcgcgaacgctcctatactcacggctggtttgttatgcgcctgaccgccgccggtgctgcggcgggtgcttgtgggataagagaagaacatgatttttcaggccggttcgctgctgctcgttatcatcggtgtctacatactcaaacatgtccacattttcggcgagcgtgattacaaaatcgtgcagggtctggtattcaatctgacgcttccttgtgcgattatcctgtcgttcgccacgaacaagcacgacatgcgcatgctgtggatcgtgttgttcggcttcttcgcctgcgcgattccgctgttcatcgtgtatttcggttctcgcggcgacgagaagaactaccgcgccttccagatgctcaacgcctcgggcctgaacctgggcgcgttctgcctgcctgtggttcagacgttcatgggcccgtccgccggtctgccgatcatcatgctcgatatcggcaacgccaccgtggccacggccgggtcactgaccatcacacgcacgctgctgcatatggatgacaatttcaagtcgctaccgctcatcctgcgtctgcgcaatattgccagggacttcctaagctcgatttccttcgacatctacatgctgatgctggtgttcatgttcctgcacatcacgatcccacagcccatcgttacgctcatcaccccgttcgccaatgcgaacgccttctgcgcgatggccatgatcggactgatgatggagattccgaacaatcgcaaggacaaggtggagttgggcaaggtgattgtctggcgcatggtattcggcgcgattatcgccgtggccgcctggttcctactgccattcgacatgaggattcgcgagatcatcgtgttgggctcgttcgcccctatcacgatcttctcaaccaagttcaccgattcgctaaccggcaacgccaagctcgccggcttctcgctgacagtgacggccatcatcagcttggtggtgatgaccgccctgcacgcggtattgccgggagcgtaaggcgcgttcttggttcccctcagtcagcttctccgcctggacggctcccctcagagaggggatccagaacgagtcacgcccgaacgattacgttgcgcagatcgccgatgccctcgacgtgcacgatggtctcgtcgcctgggtcgaggtggccggaggcgttcggggtgccggtcatgatgacgtcaccaggcagcagcgtggagaacgacgaaatcgcggcaatctgctcggggatgccgtgaatcaggttcgcggtggtgccagacgccatcggcacatcctcgccgttcagcgtgaaggaaatcttggcgtccttccagtcgaggtcgtcacgcatcacaatccacgggccaagcgggcaggaggtatcgaagcccttggcgcgcgtccacgtggggtcgatgccctgcagatcgcgcaacgtcacgtcgttcacgcaggtgaagccgagcacgtaatccattgcgttctcgacggtcacgttcttggcgatgcgtcccatcaccacggccacttccggctcgaagttcatgtccttggagcaggccgggtacacgatcggatcgtcggggccgatcaccgaggtggacggcttggtgaagatcaccatgtcctccggcgcgtgggcgatttcggagtggccggcctcgtgcatgaactgggcgtgcgcctcatagttcttggccaggccgtagaccttggaggggatgaccggggagagcaggcggatgccgtcgccgtcgaccgggtaccggttgccggtgggcttgacctggtcgccggccagcggatgaccgtcaagttcgatgaggtagtccttgccgtccgtttcgtccttctgcacgaaggcgtagcgcggcgaatcattcaaagaaaaacgtgcgagtctcatgcctgtaagcctactccttggcagttccttccgcagaagcatccgtccaaggagcaagcagaccggccttcaatcgaccaaaacgcacgttcgctgggattgctacttttcggtccaggttttgtcgtacagcgactggccgctttgcgtgtgcatgatgacgcgcaacgatgccttgccgctggaggtcttgcacatcgagcccagcagattcgcggtggattgataggtgctgttcatagcatccagtgaggaagcgacggtatcgcctagcgaggcatagcggtcgtcgagcacgtactcgtacaccaaggtgtcaccgtcgacacggtagttgaaggtgatgccggtatctgcaaacgtatccgcttcggattcaatggagtccttgaattccgaatagtcgacgaaatcctgaatcgaatcgtacagcccataatcgccgtcggttagatcgtcatgggtttcgcccaacgtgtcgtccagcgcatcgtcaagattatcttgagctttgctcttatcgctgctatcaccgttgcccgaagaggactgactatagaaggaatcggttttcgcctcatctacagccttgctggtgtacgagacaccgccgacgatcagcgcgatgaccagtattacctgtatcaccatgcccgccgcactgatgatgatgccggcgatggccaagcccttgcccttgccgccctgtttcttaatctggttgaggcccacgatgctcaggatcagaccggggagtgagacaaggaacgagcagataaaaccggcaatagccaggccgttgtacttctggttcgcttcaggcggcacactgccgtaagaaccagaccatcccggctggccgttcggttggccgccttgcatatacgggttatagggcgtttgcggaggcacggccccgccgcccggataccgagcactgacgctgccgtagaccggaggaaccgatccgcctgccggagccgtccccggatagggcgaattgggtgctgctggtgcgggcgcaggcgcgggcgctgtcggtgcgggcgcgggcgcagcggcaggagtcactggtggcaaagcctgcgtaggcggtaccggctgattgaccggcgcaagaggctgggtggactgctcggcaggtgtaaacgcctgcgtaggctgctcaacaggagtgaacgcctgagtgggctgttcgcccgctgcgagtgcttgggttggagcattgttggcggcggttcctgcttcccccgtcatcgcatttaacggctcagtcggattggcgtcagcttgctgccccggcacctggccattcggattggcattcggatcagtcatgacatgcactccttcaactgcatcgcaccccacttgcgagatacgcccctcgtcttacgcgccacattgtgcgttacagacaactgtactcctcgtggcgagccttaagtaccccaggaaatttggcttcccaaaaaacacagaagcctgaaaccggctattgcctcagcaatattcagtcggtttcaagctaaatcgttaatcctctggtgaaacgacggtctacttcttcagcagcggcgcgacctgttcctcgtaggcggtcagggcggtgtcgatcacctggtgcatgtcatagtacttgtaggtgcccaagcggccgccgaacacggtgttcggctcggccgcggccttggcctcgtaccgcgcgtacagggccttgtccgcgtccgtgttcaccgggtagtacggttcgtcgccgcgctcggcgaaacggctgtactcctcccacaccacggtcttgtccgggttctgggcatcgcggcgctccgggttgaagttcttgaactcgatcgcgcgcgtgtacggcacgtcagcgtcggagaagttcatcaccgggcaaccgaagtggtcgccctcgtcgtaacggacctccttgaagtccaccgtgcgccacttcagg

SEQ ID NO: 1077 - DNA, 7427 bp, Unknown
  R13_10m  MAG No. k141_5758
agctcccggagcaacgcctataattcctggcgaaccgtcatagccagctccattacccacaatacgagccaccatctcggtgccatgggtcgcatatataccacgctcccccgccttcagcgaagaatccgacgccttcaagatgcctgttccccgtttagtctgagcagtgcacgatgcaagcccgtttttcagcaccgctttatacgagatgttcgcatcggcgaaccccggataatcggacaccacctggctgtcactaaccgcgaccttcacacctttgccggtgatatcttgcttccatgcgtcacgcacgcccatgtcatccacataccaatagctggcagacgaatcagcatcatcggccatcgcaaccggcgtacacaccgtaccagccatcaccacagtcacggcagcaccaatcaaacgccgcgtgtaccgcttcacagaccagcccttcaccataaaaacatctcccagccgcaggaaaattagactcgtgccggaggcaacgggaccgaccccgactgctgaggcggcatcggcacctcggtgagtggcatggtatccggcaccgtgcctgccaaatccgtgccaagcaagtcgtcaagcggctgcagtacctcacgcaacatatccttggttttctcatccgcgaattgcacatccgaagcggcttcgacttgtgccttcacaccggccatagtctcttcttgggactgctcgcccttttcgatttcggcaacggatcgcactagcgaatcggaatactgacgaatggaagcctcaagattcgcgcgcgattcctggaacaccttggccgcctgctgaagatacttctccatacccttctcgaaatcattagggttgctgcgcgtgctgccatcccaatgtgcgccgacaccatccttgatgtctttgccggcagtcaacaggttagcggcctcggcacgcacccgatcgccatcgacatgaatgtcattcgccatgtgtttcccctcacaccaatttcaccatacacaaccattggccaatccggccaatgcaaacaatacaacccccgatacgttcgggcgccgcgtggattacccatgcggcacccgaactggtaagagagtcagaagcgcgcagccgaacggttgtcggactccacatactgctgggcgatttcagcggtggcctgagaaatctggccaagaatctggttcatctcctgcagcttggtggtccaatcgttctgggcgcggtggtatgcctcttgcgcggcaccatcccactggtcgataagggtgcggacctcggcgtcgaggttctccagctcctggccgatgcccttggcatcgttggcaatgtcggtggacagcgagtccaccatttgcggacgaacggaaatagaagacatgatgatgataatccttaaactctaagcgttcctatattggttatcgaatccggctcagctcagcaacgactggagtcgggaagtacgagactggttatcttcctcgttcgcggcctggtccttggcggttccgcgcaggttgtcacgcaaatcgttaaggatgttgttcagcttattggccttctcctgccagttcgccatcaacgtgttgtaggaggtggcagcgtcgccgctccagaacgaccccaactcggccatcttgctatcgatgtccttgattcggctatcaatgccggtcctggcgttttctacagccgtggcgcccttctcaagcgcgccttcgcctgccctgatcttctcagccatttcgcatcccttcttatgagtgcttgcttatatcgcgttgcgactgctgatgatcaagccggatgacattgggccaccgggaaggtacaactttgattttcccgccaacgagtacatcacccttgactctctcttcaccatatacaacagcacggcccatcatacccggcattcagctcttgtccaacaatttttccggtattcgcaagcaacactgtgaacacgtcgagtaagaccgtatgatgaatggagacggagagcacgccggagcacttggggccggtgagtctccatcagagaagagtgcgcgcggcagcgccgcatgctcacatgaagggaagtctatggcagcgagaacccccataccaccacgacgcatgcattcgagccagaacaagccgccgctccccacaccaggccccgcgccccttgcccataccccctatcaaggcatcgctgcaccttccgcaccattccagccgggtgccgttccggcacccatgtctacggcacctgcggctcccgcagcgcctacggcatcgcaggccgcgccattggacccggaagcaacccggcagctccatatcaccattgcatacaaggcaagaaccatcgaactctccgttggccccacaccgattgtggccgatctgctacccgacatagcccgccgactgggcgtgcttgacccggcaatagtctatggcggttaccgtctgctcaacagcgagggcgagaccctctccccttcccaaacgcttgacgaacaacacgtggaagaaggcagcacccttactctcgaacccggggcgttgaacgaaacggacatcatgtatgacgatgtcgttgaagcggtgggcgcaagcgtgcagcgtgtgtacaaaccatggaccaacgaccacaccacgctgacctcccttatcatcagcgccggaatgcttgccatcagcgccggcttgctcgcggtattcccaccatccattgtcaatgcggcattgggattcggcttcgcattggtgctgattgcactctgctcggtattaagcggcaagaatatgattccgcaggcattggccatgggactcatctctagcgtgttcgccgcgatcggcggctaccagctcatctccacgctgttcccggggcatcctttccatgggttgcctctgctgggagctgcggcagggcttatcgtcgatggcggactgatggccgctgccgcatcacgaaccaggccgtactctctcatccccatcgtcatcggcgtgattgcggtgatacccagcggattggcattcatgttccccatcaatgagccccagatatggattttcaccgccacagccgttgcactcgccgccaacgcactgccctctatgtgcctatcgctggcacgtatcagcgtgaacagcccacacagcgaatctgatatcttcaaactgcctgaagacattgattatgaagacatcaaacagcggtatattttcggttccaccatgttgttcatcgggcgtatcgccgtcgcctccctgctgctcattgccacgccgctgctggtttcgctgagcacaccgttgggagcggccatctgcctgttggcattcatgggcatgctgctcgattcccgccaaatctatacgcttagggagatgatcgtcaccgtgggagccgccggaatcggtattatcgccaccggcctgctcgccagccaggctcaccccgaactgaacataccgcttattctcatcatgctggcgagcgctttggcgaccatcattctcacgaacgttacacgtcagcagtcattgtttgccaccagaatggcggacgccgccgagatgctgtgcctcgtgctgctgccgccacttgcctatctcgccatcaccatgtgagcgtggatggttgccagataaatccgatggggaatcgtcacaagaacttttcagggaaacggaaaacataggtcatggctgataaaaaggatctttccgaagcgcaaagctactcacgtaggaggctggtcactgcatttaccagcggcattccttccggcgtggagctcacgccgaagaagaaccagacgccggtgattgtgggactgggattggtggtcatcaccatactcatcagcgtgttctacggcatcatgagcccgtctctgccctcggattggaaaaacaacaagctcatcgtggccaagaattccgcagcacgatatgtcagtgtcaacggcacgcttcacccggttatcaatgccatcagtgcgcgactgctcatcccctcctcggatttcgacgtattgaccgtggacgacgaccagttggcgggaattcccatcggttcgactcttggcattctgggagcccccgattcactccctgcacaaaaccagctgatatccggttcgctgaccagctgcatggacaatatgaagctcagcaacaccattagcaataccgccttagctactggtgccgatagtcgtacggccatcgtcgccactgtggacaacaccagttaccttgtttccggttccaagcgttacgaactgccatcggaatcttcaattcgagacagtttcctgcgtatgttcggagtaccacagaccagaaccatcaaggcaaccgcacagtggatcaacctgttcgaagccggaagcccaatcaaacccatcactgttcccggagcgggctcgttcgtcaacgttaatggcaccgaagtggcggtcggcggcatcgtcacccagcagggcgagacgaagtcaacaaaataccttgtgcaggagggcggcaagatcaccgcactagatgacttctcctacaacctgtacatcatcggcaaaccagaatccatcgcacgccccacagcgctgtctgcccacgacttccaaagcctagccaacgccacatcatcagttattccgacgaattggcccaccagtgcgttgcagcaggtgagcggcacgccgaccatatgcgccacattccccctgtctgcatcgggccacgaacgacttacttcacgcgtgcggcttgcggtcagatcctccgccgagtcaggggcggatactgcatcgggagtcgatgccagcgaaaaaagcactgtttccaccacgattactggtggcaccggggcgctgttgcgttcggcgatcggagataccgacaagggaacggtattcgccatcgattccaccggtaccgcatatccgattccccacgcaacacaagagatactgaaccgtttaggctacaccggtcaggatgttcgttccgtgccgcgttcatgggtagacatcttcccctcaggagtgcagctcaccaccgaagccgcaggcaatgcgcccaacccgcaagctgtgctcgaacagaccgggaagaactgattatgaatcgtatgccgtttcccgctatgccgcgtctgcgttcagtagcgcgcgccaccgtagccaaaactctgagcgccatgcttgcagttggtctggccacaagtatggcgggcatatgcgcggcggcgccacaagccgcatacgccgactcatctgactcttctgactcatcatcccaaacctcatcggggcaagcacaatgccaggcaggcatcgaaaattacgtcacacagcagccctggaccaataatctattcgagctcgatactctgcatcagcgtgccaccgggcaaaacgtgattgtcgccgtcatcgattccggcgtggacactgataatccgcatctgaacggtgccgtgataccgggcaccagcatggttaagggcgacccatccaacggaaccatcgatacctacaatcacggcaccgcggttgccggcatcatcgccgcgcgtccagtagacggttcatccgttcagggtattgcccctggtgccaccatcatgccgattcgcgtgttcgataccattcgggaggagaacggcagacaagtgggtgccccctccatggaaacaatcggggcggcggtcacttacgcggtcgatcacggtgcgaaaatcatcaacatctccctgagcgacacccgcaatattcccgagatgcagcaggcagtgtcctatgccgaaacgcacggcagcctcatcatcgccagcgcaggcaatcgtcttacctcggccagcaccaaagacggcgaacgatacccagccgcctatcctgaagtcatcggcgtgacggcgttgaacactgacctacagcccaccaacgactccgtacatggagatcaagtcgatatcgcggctcctggtatgcagacggccggaacgattccgggaggagtggactgtgtgttcgccaccgatgcagcctcctcaagcttcgccacggcatacgtgagcggagaggccgcgctggtggcctcgatgtatcctgatgagtcgccggcacaatggcggcaacgtattcttgccaccgccaaccgtgccgacccagacaatcgcgaccagctgaccggctggggcatcatggaccctatgaacgctgtatctgtcaccctgtcaggcaatttgcgcggcccgcagttggatggcttatccaagcccttccaatccagctcctaccaagacaccatcgtgttgcaccccactcaagaccgcaatgcccggaccaaacagatcgtggccattgctgcaatctgcgtactgtgcttgtggagcatcgcatggattgttggtttgcgtgggaaaaggcaacggacttcggtataacgcgaaaactgatggattttgtcggttgactgatggctcatcgtcggttttccgacaacaggccatcagccaaccgacaaaatccatcagtcaaacgaattggcatctcccgacaccgacttattcggtttatatgaattacatgaaacgttggggtgcaccacgcatcgcgccggaaaccacttgctgcaccagcatgcgtgggtagatgttcaccgtccgcattgcggtaccggctgcgacgaaccgcacctgaagctggttgacgccgccatcctcgctgatgtacacgtatggggtctccccggtctcggcgcggacagcacacgtactgtacgcgccacgcacggattgagccggtcggcgaacttcagaacgcgccgttcccgcacgcccggagcaacggccgaaggctcattggccggtaatgattcgttcagcgcctgcgaccatcggccgcgcgtggccacgctggccacaggcgagacgaactgcaccgcgtccacggccacatggcgcaacgacagtatgggccccgagcacagcctgctcacatacgccgggaccccggtcttgttgaagatatcgagaatgagctgcacattaccgctcggcgcgaccgccatatccacccaccgcaccgtggacatggggccgtccgacattggcgttttctcaaacacggtaggcgtgccggtgccggccgccttgatagggaacagccaccgcccttgcaccatgaattcctttttcgagcatcgcggttcctttcttcaagttaagtgaaacggtcttacggattcagtcggcgattcctaaccgaattctggggaggcatgccatcataggcgtgttcgccgtaggtcaagccacctgaatacagccacatcccgtaatgcgcgccacgcggatcggacgacaaaggaaaacgaggatcacactgatc

SEQ ID NO: 1078 - DNA, 12151 bp, Unknown
  R13_10m  MAG No. k141_5906
agaagatttgcggcggccatggcccaggagagacgcccggtcccattccgaacccggaagctaaggcctggcacggcgatggtactgcacccgacagggtgtgggagagtagcacgccgccgcaccacacgtacaggaagcccctcggagcacacgccccaaggggctttccctatatccgaaaccaacaagacataggctctcgcacctagggtgtggccgaatcgaaagcatatagaagagggaaccctcaaatgacggagagttccctctttgcgtatctggacctataaaggtctagaaattgaaattgtcaggatcagcaccgttgcgcttgccggtgttgatggcggagatggcggtcatatcatcgactgataggttgaagtcgaagacctcgaagttctgcttgatacgctcggcatgagtggatttcggcagcacgacgataccgcgctggatgtgccagcgaatcaccacttgggcaggtgacttgccgtacttggcactgatctcggccaatactgggttgctcagcaggttgccgccggtaccgccgagcggactccaagcctcggttgcgatgcccttggcacgcagctggccaatgagctcttgattggtgaattgtggggaagactcaatctggtctacggcaggtaccatatcgctgtgggtcagcagctcatcaatatgatgcttttggaagttactgacgccaatggccttggcacggccagaggcataaatctcctgcaagtcatcccaggcctgctgccagccgtctgccggccagtgaatcagatacagatccacataatccacgcccaagcggtcgaggctttcttggaatgcatccttgccgtggcgtgcgcgaatatcgtcattccacagcttggtggtcaagaagaaatcgctgcgcggcacaccagcacggcgaataccttcacctactgaggcttcgttgcggtaaatcattgcggtatcgatatggcggtagccattctccagagccgtctgcaccgcgttcactgtagtatcaccatccggtgtctggaatacgcccaagcccacctgcgggatgacagtgccgttgttcagcataattgtcgattgaattgccataatgcctcactattcgtagtgttcattcaatttcctattttagaaacaagacgatgcaatgagccgcgtttcgcgggcaaagaattgcgtaatgatggcgtgattctcgttcattaggtcattattgcattcattaggtcaatgggtccagggtcttcggcatcagaacccagtcattacgccattcctgaagagccgtcttacggcataccgacctaatgaacgtgaaatcgacctaatgaatgcaacgagtaagcggctacgataataaccagtagaatcacaacccagattgaaggggagagcacgtggcagaggaatatgtggctgcattcgatgcagggaccacggcgttgaagggtgccttggttgataggcaaggccgtatcgtagccagtgcgagtagtgagcttaaccttattatcaacggcgactatcgggaacagagccccgatcaatggtggcaagctttctgctcggcctccaggcacatgattgagcaggcgcggcaatccgagtcagaattcaatgtgactcgcattcgtggcatcattttcagcggtcagatgcaggatgttattgctttgaacggcgagctcaatcccgtccgcaatgccattctgtattcggatggccgagccgaggaacaggccaagcaactcgccaagacatatcagggtggagtagaacgtttcctgaacaccgttggcaaccggctcgaaggctgcctgccgttgcccaagttgatgtggctgcgtgaacacgagccggaaacgtacgcgcgcattcgtcatgtattgatcagttccaaggactacttgatcgcccaattgaccggcgaatgcgtgggcgatgtggcggcttgttccacagccggtgccatgaatatccgtaatggccaatgggatgccgaattgtgcgaggccgcaggaatcgacatggccatgttgccacacctgcacaatccgcaagacaacattggcacagtgacggaatccgctgcacaacgcaccggtttctccgccggaactgcggtatacgcgggcattggcgatgcgggtgccaccacgctggccagcggtgtcagccgccctggtcaatacaacatcaatatcggcacctcaggttggatcgccaccgtttcgcccgaaccgttcaccggcaagcccggtgctgcgaatctggcatttggtgtggaagaagtcttcgtgaatgccgtgccattcctcaacgccggtgacgtgcataaatgggttaccggcgtattcgctgatggcgattacgcggaagcacatcagcttatcgaaacatccaaacccggctccaacggtgtgatgtgcctgccatatctggtgggggagcggttccccgtaatgaacccgaatattcgcggggcctatgtaggcctcgatccagacaccaccaaggcagacatgatgcgtgccgcgcttgagggcgtggccttctccattcgtcaaggtatggaaagttttgacgccaaacccagcgagatttccctgattggcggcggagccagagaaaatgcgtggtgccagattctggccgatgtgttggagcatcccatcgaagtgttcgccaatgccgatattctgccagcagtggcaatggcctcgttggtattcaatgtaccagacctgctgcaatcagtatgcgaatgcactgtataccagccgaatcctgacaccgcacgcacatatgccgacgcataccggcgattcctgagcctctacccgatgctgcgaacgatggattaggaactgagcatcatgaggcaatcagcgaatttggtccgcaaacatatagcggtcaccggactggtgcaaggcgtgggattccgttattttacggtgactcaggcacgtcgacttggtgtacagggctgggtgcgcaattgccgcgatggctcggttgagctggaagcacaaggcagtagcgacgcagtgcaagccttggttgagcaattagccattggtccgcgatggtccgaagtgagtcacgtcgccgtacatgacatgccgattatcgatgagaccgctcgggcatttggcgtgcgtcaataacctgcatcacgaatccacatcacgcacgataatctcacgatacgggtgaacatgggcgttcctcgccgcttaggccccgcacgttggtacgatggggcgttatgagtgagaacatcatgcaaatcattgacctgcgtggtcagaacctgtctcgtgccgaactgctcgccgcgatgccgcgtgctgcaatgggcacttccgaagccaccgatctggtgcgtccgattctggacgatgtcaaggaacgcggtgccgcggccctgcgcgacttcgaggagaagttcgatcacgtgcgcccgaaaaacctgcgcgtgccggtcgaggcgatcaaggacgccctgaccacgctcgactccgaagtgcgcgccgccatcgaggaatcggtgcgccgcgcccgcgccgtggccgccaaccaggtgccgaaggacttctacaccgacctcgccgaaggcgcccgcgtggccgaacgctggattccgattcagcgcgtcggcctgtatgtgcccggcggcaaggccgtctacccgagctccgtcatcatgaacgctgtgccggcccaggccgccggcgtcgaatcgttggccatcgccaccccgcccgcccgcgacaatgaggaaggcctgccgaacaagaccatcctcgccacctgcgccatcctcggtgttgacgaggtatacgcggtcggcggcgcccaggccatcgccatgttcgcatacggcgccaagggcagcgagccgcaggacggcgacatcctgtgcgatccggttgacaagatcaccggcccgggcaacatcttcgtggccaccgccaagtcactggtctccgcattcgtgggcatcgacgcggtcgccggccccactgaaatcggcatcatcgccgatgaaaccgccaacccgagcctgttggccgccgacctcatcggccaggccgagcatgatgagctcgccggttccgtgctgttcaccgactccaccgagattgccgacaaggtgcaggagaacctcaagtaccgcgtgccgcgtaccgagcacgccgagcgcgtccacacgtcgctgtccggcacccagtctgccatcgtgctgaccgacggtcttgaccagtccatcgacgcggccaacgcctacgccgccgaacaccttgagattcagaccaaggatgccgatgctgtcgtcaagcgcatcaagaacgccggtgccatcttccgcggcccgtactccccggtgccgctgggcgactacatgtccggttccaaccacgtgctgcccaccggcggcaccgcccgcttcgccgcaggcctcggcgtgcacacgttcatgaagccggtcgaagtcatcgaatacgacgaggaaggcctcaaggctctcgccgcccgcatcaacgccttcgcggtgtccgaggacctgcccgcccacggcgagtgcgtgctctcccgcttcgtcaaggatccgtatgacaaggccaccctgcgcgagcaggagaagggagccggtctgcgatgagctcgattcccgaaaacctgccgctgcgcaacgacctgatcggtgaggagccgtacggcgctccccagctggacgtgccggtgtgcctgaacgtcaacgagaacccgtatgcgccggacccggccgtatgcgacaccatcgccaagcgtgtgcgtgaaatcgcccccacactcaaccgatacccggaccgtgagcacattgaattgcgtcaggcattctccgattacctggcccgtgaatccggtacccgtctggacgtggacgagctgtggggcgcgaacggctccaacgagatcatgctccagctgttccaggctttcggcggcccgggccgcaccgcactcggtgccgacccgacgtactccatgtacccggagtacgctcgcgacaccttcaccggttggaagctcgcccaccgcaacgccgacttcacgttgaacgtcgacaaggtgcttgaggccatcgccgaggtcaagccctcgatggtgctgctcaccagtccgaacaacccgaccggcaccccgttgccgatggaggatatcgagcgtattctcgccgcctgcgaaaccgccgaagtggccggcgcgggtgagggcgtgcacccgattctcgtcatcgatgaagcgtacgtggaattccgcaagcccggcaccccgagcgccgtgagcctgatcaaggaccacccgaacctggccgtaagccgcaccatgagcaaggcctttgccttcgccggcgcgcgagtcggctacctagccgcatccaagggcatcatcgactgcgtgcgcatcgtacgtatgccgtaccacctgtccgccgtgacccaggccgccgcactggccgccttcgaacacaccgatgaacagctgagccgtgtcgagcatctgcgcgaaacccgcgaggccaccgccgcatggctcaaggaacagacctacaaggaccagccgcttgaagtggccgaatccggctcgaacttcctgctgttcggcgggcacttcgacaagcgcgaagccatcttcgacgagctcctgaagcgcggcgtactcatccgcgtggtcggaccggacggttggctgcgcgtgtgcatgggcaccgacgaggagatggaaaccttccgtaacgcccttgttgaagcgcttcgtatagtggaagcagcataagggacgtttctttccgattgcggcgagacccgaagcgattcgagtcccgccgcaatccaatatgacgaatcacacaggagacatgatggcaagaaccgcgcacatcgtccgcgaaaccagcgaatcacacatcgacctcgaactgaacctcgacggcaccggcaaaaccgatatcgatacatccgtgccgttctacaaccatatgatgaccgcgctcggcaagcattcgctgatcgacctgaccatccacgcccacggcgacaccgacatcgacgtgcaccacaccgtggaagatacggccatcgtgttcggcgaagccctgaagcaggccctcggcgacaagaaaggcatccgccgcttcgccgacgccaccgtgccgctcgacgaggcgctggccaaggccgtggtcgacatttccggccgcccgtactgcgtgtgcagcggcgagcccgaaggctacgaattctgcatgatcggcggccacttcaccggctctctggtccgccacgtcatggaatccatcgccttccacgccggcatctgcctgcacatgcaggtgctcgccggccgtgatccgcatcacatcgccgaagccgaattcaaggcgctggcccgtgcgctgcgcttcgccgtggaaatcgacccgcgtgtagacggcgtgcccagcaccaagggagccctgtgatggccgacgacaagttcgatccggacgaatcgcacttctccgacgaggagcttgaggccgcgctcgccggattcgagaaagaattcgcggacgattcggcatccggcgatgccggtgataccagtgatgccgataaaacggcggacgctgcttcagcgaagtccgattccgacgcgaatgatgatacggctgataaggctgccgctgattccggccagcctatgaccgacgacgtcaccgggtcggtcgctgatgcggtgaatgaggccatggccgacgtggtcgacccctcgctcggcttcgacaacgaactcgctggactgttgggtaacaaggcgaaggtggcgctgatcgtcacccgtcttgcctccgccgaactgttggccgcgttctgccagctgtcggacatctccgccgcatgcgtcggtgccaatcagggggccgtcgcggtgctgaagaatctggacggcgacggcccggaagccgcagccaaggacctgaccaccgtggtatccggcatggccgtgattcttgcagtcaatcgtgccgacaagctcgaagtggccatgtacgtgcagggagaggccggacagagtttcgcgccgcccgtgctgttcacctccacgccgcgcttcgtcgaggacctgatgctcggcatcgtaaccctgaaccaactcaagacccaagggttcgaagtggtggattccgctggactcgaccatgaccaggcgatgcagattctcgccaaccataccaagcgtgggcgtggcggacgcggctcccgcatcgaatagacgccaaccaaccagtaggggataggagagaatatgaccacagcggttgttttcgattacggtttcggcaatgtacgttccatggtgcgtgcgctcgccaatcttggcgtcgacaccaccctcacctccgactaccggcagtcgttggaggccgacggtctggtcgtgccgggcgtgggcgcgttcgccgcatgcatggaaggactgaagaaggtcgacggcgaccgtgtgatctatgatcgcatccgcgccggccgcccggtgcttggcgtgtgcgtgggcgagcagatcatgttcgaacacggtctggagcacggggcccatgccgcgggcatcgggctgatcggcggaacggtgaacctgctggacgccgacgtggtgcctcacatgggatgggacacgatcgaggccgcccccgattcggtgctgctcaacgacgtggagaatgaacggttttacttcgtgcactcctacgccgcgatggaagtgaagccggcggatacgtcccgcttcgacattgatctgagcggtgcgcccgaacgcgtgagctggtgctcgtacggccggtcgcgtttcgtggccgcctacgaacacggcccgctgtccgccacgcaattccacccggaaaagtccggggacgctggctcccagctcctcaagaactggatcgccacgctgtaaaaagcatgaagctcccctctgacgagagagctcaaattatgtataagtaactgaagaaaggctcttcttatgtcgttgactctgctgcccgccgtcgatgtacgcgatggcaaggccgtgcgcctgcgccaaggcgaatccggttccgaaaccgattacggttcgccgtttgaggccgcccgtacctgggttgaggccggtgccgaatggattcacctggtcgaccttgatgccgctttcggtacgggcaacaatcgcgatcagctgcgtgaaatcgttcatgagcttggcgaccgcgtgaacatcgaactgtccggcggcgtgcgcgatgacgcttcgttggacgcggcccttgaggccggtgccgcccgagtgaacatcggcaccgccgctttggagaacccggattggaccgcttcggtcatcaagaagtacggcgaccgtgtggctgttggtctggatgtgcgcggtcacacactggcggcgcgcggctggacgcgcgaaggcggcgacctgtttgagaccatgaagttccttgactccgtgggctgctcgcgttacgtggtcaccgacgtggccaaggacggcatgatgtccggcccgaacatacaactgctgcgtgaagtcgccgaacgcaccgacgccaaggtcacggcctccggtggtatctccaagctggacgatttgcgcgccatcaaggaactggccgagatcggcgtcgattccgccatcctcggcaagtcgttatacgcacgtgcgttcacgctccaggaagcgctcgcagtcgcgaagtaggcaaaggactcgccttagcgagactgttaagctacctttgctcagctatcgcttcactcaggcctcgcctacggacagcccattgggctgtccgcttaacggctcagcaaggaaggtcgccggatttgaggagctttttgaagacggtgtagtcttcatcattctgttcggcgtagctgacggcgaacgaggcaatggcctgatcgaattcgtcggtgccacccatgtaattggcgatcgcgatcgaatcgccggtgcgctcatagtcactaccatagtgccgtgccggcatgggcccgaaccatgcctgacatgcggaccggggcatgttgatgaaatctcgcgactcgcaggtgacaaacagtgagatgttaacgcccctcgtaacacggttatggaacgataggcgactatggataaacagcaggagtttgcgctgcgcacggtcgaagaacgcgacgtgcgctttattcgtctgtggttcacggacgtgttgggaacactgaagtccgtggcgattgctccggccgaactggaagccgcgtttgaggagggtctcggcttcgacggttccgccatcgagggcatgacccgcgtgtccgaagacgacatgatcgtccagcccgatcccgcgacgttccagatcctgccgtggcgcggtggcccgcaaggtaccgcccgcatgttctgcgacattctgaccccagacggcgagccttcgctcggcgatccacgtcacgtgttgaagcgtacgctcgccaaggccaaggacaagggcttcacgttctacgtgcatccggaaatcgagttctacctgttcgaaagccaggacgactggtccaaggccccgaccccgatcgacgagggcggctacttcgaccatgtgccgcgcagcccaggcatggacttccgccgcgccaccgtgaacatgctcgagcaaatgggcatctcggtggaatactcgcaccatgaggcggggccaggccagaacgagatcgatctgcgatacgcggacgcgctcaccatggccgacaacatcatgacattccgtacagtggtcaaggagatttccttggagcgcggcattcacgccagcttcatgcccaagcccctggccgacgcgcctggttccggcatgcacacgcacctgagcctgttcgaaggcgattccaacgccttctacgaggccggtcaggagttcaacatgtccctgaccgcccgccagttcgccgccggcatcctgtaccatgcggccgaaatctgcgcggtcaccgaccagtacgtcaactcgtacaagcgcctgtggggcggcaatgaggctccgagctacatctgctggggccacaacaaccgttccgcgctactgcgcatcccgcagtacaagccgggcaagggcaactccgcgcgcatggagttccgtgcgctcgacccggtgtccaacccataccttgcctactcggtgctgctggccgccggtctcgatggcatcgataagcagatgcagctgggcgaacccaccagtgatgacgtgtgggagctcaccgacggcgaacgtcaggccatgggcattcagccgctgccgcgctcgctggacgaggcgctgaagatcatggagaaatccgacttcgtggccgacgtgctcggcgaacacgccttcggctacttcctggacaacaagcaccaggaatgggaggagtacaaccagcaagtcacgccttacgagctgaagaagtatctgccgaagctgtaatcgcaagcgttgcacatgtgccgaaccccgtcgatgattggtcatcggcggggttttctataccgtgtcgtggtggtgggtagcgggcagaggtgggaatagtgttgtcgctgagttgatacgaaaaacgattgacgtaaccgacgaatcagcttgtagtacgagcgagagcactcaagagagcacccatgacgaacacacctgcgaacaccgcgcgcaccgaccgcttcttcaatctgccggtcaccatcctgatcttcgccagcttcatgctgggcatgagcgaattcgtggtagtgggcatcctgccggacatcgcatccggacttaaggtctccgaagtgaccgtgggtaatctggtggccatcttcgcattcgtgtacgcgccctgcacgccgctcggatccgcattatccgcccgattcccgcgctttctcacctatctgacgttgatgggcgtgttcctcgtcggcaatatcctgtgcgccttcgcgccgaactatccggtgctgctcatcgcccgactgctcatcgcctcggtgtccggcacgctggtggccatctccatgaccttcgcgcccgacgtgaccaccgacaaataccgcaccaagttcattgcctgggtattctcgggtttctccatcgcctctgtgatcggcgtaccggccggcacttgggtggccaatactttcggctggcgtgtcacctttgccttggtttcggtgctcaccgccgtgctgatggcatcgatggcagtgtctctgccacgcaactcacatccggcgaagatcggtttcctgaggcaattccgtctgttcttcgaccgccgcatccagctcggcgtggcggatgtggtctttggcgcagccgcctcctacgtcttctacacgtatctctcgccgatcatgcgcgacgaaatcggtgtgcccgaacgctatatcagcgtcggcttggtggtctacggctgtgcctgcctgtggagcaacctgtacggaggcaagctggccgatcggggcaggggggtcgagccgctgacccacattcgaccgatctactgcgtgcaggccgtctgcctgtgcctgctggctttcgcctcgctggtgccggccggcggcgcactgctgctggtggcgcttggcatgctcatgtatctgcagaattccgcttcccaggtgctgtatatggatgtggcctaccaatcccatcccggttcggtgaatctggccgcctccctgaattccatgtcgttcaacatcggcatcgccatcggctccgcggtcggcggcctggtcaacgacctccttggcctgacctggctcggcccggtcggcgcgattttcgcgctgctcgcggtcggcaccacgaccctgctgcgtccgtacgtcagcccggtcggggaatgacgggtggcgtgacgcgcgggaacgaagggtttttcccgcatgtccccgcggcatgccttatccgccgattgccgtccattgataacctgctatccaaataaccgataaggccacagcatgtcatcctgctgcgaaaccttaatgttaggacaccggctgcagggggacccggctcacgggc

SEQ ID NO: 1079 - DNA, 7838 bp, Unknown
  R13_10m  MAG No. k141_6465
cagcacggccgtctccggactcggtccatcgtcacgcggttcgggcgcatcgtccaacgcggtcacattcgggcgtacgcgccgcacgcgcatgtagatctgccgtttcgcgatgcccagcagccaggacagcaccttcgcatcaccacggaacgccctcgccgaccgccagcagcccagccagacgtcggcgcacacctcctcggccgtgccggcatccggcacgcgcacgcgcacgagcgcccgcaccgccgcagcgtgacgcccatacagggtctcgaaggcgcgttcgtccccggaggcgacccgcgcgagcagatcctcgtcgcgcatcaccgccccaccgggcgaggtcatgtcatcctgcgtatgcggctccttccacggcacatcgtaaacaaacgttcattgatgtatgtagctagaaacgaaccgacggttcacgacacgagcaacgacacgcccggaaggcatatcggattaagttgtgtagaagaacagaaactcacagaagaaatcgttgcgcgcgtgcattaccgagtcccaagcctggctagttcttggcaggaatgctgacatccagctgccagtgggcttgttcagtgtgggtttggaaggtgccgccgtgtgtttcgatgatggtccggtagcggtcgaggccgctgcccaggccgagtcccatgtcggcgggtgtggtggtgtcgctggcggagacgtggatggcgtccgtgtcgaaggtgacgcagatggcgtaccattcgccccggtcggcgtgttcggcgatgttcgcgtacagttccgccggcaagcccgacagcagtcgcatggtctccggcgtgagcggccggtgtggttcggcgagcaggttgtcgccggtgaatcccggggcttcgagcctggactcctcctcgtcgatcagcgattgcagaccggcacgctgcgaggcgatgccggcttctgcgggcacgggccgactgccgcactcaaatcgccatcggccggttcaaagcaggatgtaaacccgctatttgcccaacagttcgtcatggctgccggttcgcatgaacatggcggtaccatcatcgcgaatccatagaagcagccagtcgccggcattgccgatgtggcattccaatacgccgtttaaatcaccggtaagtgtgtgggcgcgatgtctacgcctcaatacttccttggagtccgccgtgtcctcaagaaccagacgaatgacttctttcagcgggcgtaaatcagtgtgcttgcgtttgagtttcttgatatctcgctggaatgccgctgtgtaatccggtttgagcattgatcagattcccaacgaatcgaacatctcatcggcactgttgaaacgaggtttgccgtcggcgagcctgttcttcgcctcgtcaagggcctccatggtttcaggcggcacggtcgtataggaaaggtttaggggaatgcgcctctcccggacaatctgcttgtagaaggcgcgggtgaccgaagacaagtccagaccgagatcctcggcaatgtttgcggctttctgcttggtgtccgcatccacgcggactgtgacggatgccatgctcacattaacctccaacatcattacgtaagacaatagtatgtatttgtatgctaatagtcaacattctgcggttgcggcatctcgaccatggtacacatcccgcaagcggattgtttaccggatgcaatcgatgatcggaatgccgaccatccagctgtcggcgggcttgtccagaatggcttctggttcatcgcaacgccagcgcgggttgcagccgtatggctttgatggccggggcaagagagccgacaagcgaggtgacgatggacgcacaggccgcaatcatcgccgccgtatatgggtatgcgggcggttccagcggcgagtcggcgggcatcatccacggaattgcccagaccagcaccgcggagatgagcaccgcggcgaaggcgatgatgaggccgagcagcacggacgagccgatgacctgtatggctatgctggctctggtcgcgcccagtgcgcggcggatgagcagctcgtgcgagcgttgctcgatgccggccaatccgatgttgatcatgccgatggcggataccgacaacagcaatatcgcggtgacggtgacgccgagttggagaaaaccgataacctgctcgtaatcatcggcattgtcggaacggttccatgacgatatgctgccggtcccgacgtcggacaacagatcgtccaacgcggttttggcgtgttgatcgtccacgccttcattgggatggacgaggatggtcagcccatccggttcccaggcttgcggccagtagcgttgcagtgtggtcgcgttgacgtagatggtgggtgtgtccgtcccgtcggcgatgacaccgttcacccgtgccggcacctgttgcggatttcctgtccgggcgagtgccacggtgccgtcatgcacgtattggcgggcgctttcgttgactgcggtttccagcgtggcgggttcgtccgctccggtcagccatgtgccctcgatgatgggggcgggcatgattcttgtccgttcggcgtcggtgatgatgatggtgacgcggcgtatctccgtgttgccgtcaccggacgacgcccatatggcgaggtcgttgaggtgatattgcgccgatgcgattcccggacggaaatacgcgaggcgttcctgcaaagccgtgacgacttgcatgttcgccgatgatggcacgtcgacgatggcgctataggtgggtgacttgcctcccagtcgcgcgttgaccgcttccagatagtcgcgtccgagcgtgccgacgagaacgccggcgatgagggcgatgatgccgatgaacatcgacagggcggtgaggctggtacgcaacgggttgatgcgcagatccttggcgatcatgcggatcacgacagtcgccccctgtcgatcgtcagtcggcgttcgcatcgggcggcgagctgcgggtcgtgcgtgacgaggatgagtgtgaccccgagttcacgaacatgtcggaacagtatgtcggcgaccatgtcgccggtttcggtgtcgagcgcgccggttggctcgtcgcagatcagcaggtcgggatctcccaccagcgctcgggcgatggccacgcgctgctgttcgcctcccgacaggcgcgacggcatgctgcacaccgtccggctcccgagcccgacggtgtgcagcatgcgcgaggctcgtcttctgatgacccgcagggggatgcctccccggtattgcaatgggagtgccacgttctcccatgcgctcagatgcggtatgagggagtagttctggaacacgaagccgacatgccggcagcggaagcgcgcccggtcggcgtcgttccacgcggcgcagtcccgcccgtcataggagagcgttccgtcatagtcgttgttgagcagcccgacgatggaggcgagactggttttgccggatcctgatttcccgatgatggcggtggacgttcccctctcgaacgatgcgctgacatcgtccaccgtcgtcagacgttcgccgtcgggcagccggacttcggcgctcagatgttccaactggatgagtgtgctcatgattgcgctcccggtgtgagattcggagctgtcgcggacaccatgtcaccttcctcgagaccgtcgaggatgatgatcgacgtgccgtccgatgcccccaacttcacgttcacggtggcgaacgaatctccgtcacgcctgctgacctggccggaggcgagcctgccggcgactgcggtgacaggcaggatcaaggcgtcctcgaccgccgtcgcggtcagtaccacggtggcgttctgcccgggacgcgcctgcacgtcttttgggaacaggcattgcagtgtgcgagtcgattccgtcccatgcgcagtcgtcgccgatccggccgtatcttccgctgatgagggcggagtggcgacgccgtcattcactaccgcggcacagtccgtgggcccctgcgcgtcggtgatctggaatcggcccgtcaacggctggtccgggtctatggtcgccagcagcgcggtcgcgtccacgctggcgctcatgccgccataccgtatcgagaacagcggatagtccgcggccatgtcgttgtcctgcgcgaccgtttcgatcacgccgtcgaccggagccgtgacctgctgatcgccgacggtacccaacacgtcgcccgcatgcacgtatgctccttgatcagtcgtggagtggaaccagcctttcgccggagtcgtaagcgagaacacaggagccacctgcacgccggtggaggaagaggataacggcgtgatgccgcccctacgtacctcgaccgtggatgctggccgcttcgccgtggaggaggcgtcggacgatggcgtccgcgacggcgagcaagccgtcatcatcgcgcacatcgtcgtggccgtcacgcacgccaacaggcatttgaacggtgcgatcgcattcatttcgtcagtccgttctcatgccggtaccatgtgcagtccgtggtgtagaagtcccgcatggtcgaatagtcgccgagttcggatttgccgatcacatcgttctcgtatatgccatccttgtcctcgtagtagttcttgaaccagtcggtatccagcagcttgcgcagctgctggagggcgcctcgggctgcttccgcgttggtctggctgttgtcgagaatgtcgcgttccaccgagcactgccagtagacatacgcctgtccttccccacttcccttggcatacagcgaggacgcggcctgcgccttgggtatattcgctggaaacgcatcgctgttcatcagttcaaaggggaaatcctcgacggtcgccttgtattcctcgttcgcttgctgccaggtcagcatgccgccacttcccgaggtgccgccgttcggagtcgtcccgcaaccggacagcagcatcactgcggtcagaatggcggccctgcgtcgtgttcccgatttcatcatcatgctccttcggacgattgcacaactgtcgccaaccattagcccacagacggcgatccgggagcaaaagactgtcatgcgcgcgcatgacaacgatacgtcgaggagcatgggatgcgcatacgatgggtggcatgacagacctatcggactcgcataccatctccatcggggtgctggacaacgattcgctcgccctcaacgccatagccgtgatgacgagccgtctctccccgcggttccacatcatctggagcaccacgtccccggcgatggcattgcagcgttgcatgacccacggcgcgcgacccgacgtgctggtcgtcgacatggccttgggaggcatcaccggcgcggacatatgcgccagaatccgtcggcgcactccgacgatcggcttggtgtgcgtcacctcctatgaccttgatccatatcggcaagacgcggtcgaggcgggcgcacaatgcctgatagccaaagatgacatcgtcaaagagctcccgcaggccatacgatgcgcggcacagggcgagcccgtccccggcaccggattccccaccgcacgggaagccaatcgcaaactcaacgaaggacacgcgaccgagggccggctgccggaaaacgacaagccatcgctgtcctccagggaacgggacgtactgcgcctctacgcgcatggatcatccaccgacgagatagccgcgctcctgaatgtcagcaagggcagcgtcttcacctacgtcaacagggcatgccgcaagctccatgccgccgaccgcaaggaggccctcgccatatgcgcccgatacgatctgctctgaaccgtatacaccacccagccatactggccgcggggctggtcctcgcagtggcgatccccgtagagatgggcgtgtactcatcccagaacctgctgtcatggtcgaccatacgcatatcgctgctcgtcgccgtcctgtgcgccatgctcggagcggcaccggtatgggccgcctgtctgctgttcgcggtctcaggatacgcgttgctgtggctgttctcgccgttgacgaccatcatgatcgccgcactgacctccatagcggtcctctcgttcgtcaaaccccgccttggagccgcttccgcactggcggccctcgccgccctcgccgcgaacaacatgcagaacaacctcacctcgtcgaacatcgtaggcatgatcatcatgtgcctatgcccattgtcgctggggttcagtctcaacctgctgttcgcccaacggcaggcgaccgcgacactcaggcaacgactcgaccgcgaacacacggcgcgtcacctgcacgacaccatcagcaacgacctcgcctacatgatcctgcgcatcgaccaggcaagccgcagtgattgccccgccgatcgggagcaatatcagcgccaactcaccgatctgcgcgccatcgccgaaacggcgctcgaccacacccaccaggtgatacgacaacttgaacgcaccgacaaaccagacgatcgcagccgcatcgtcaaaacaaataacgacgacaaaaccgacaggaaaatcgaacagcagcgtgaacggcttgacggcatcattcaatcgcaacgacgtcgccttggcggcctcggattccaaggtgacgacatcctcgggacgttcgaccatccactggcggacgacatcctcgaccttctcgaaggactgctcaacgaactgtacgcgaacatcgccaagcacgccgccccgcacgaatggtacgccgtcacgatctccttcgaccggcggcacgtcatcatttcggcaagcgacgtactaaaggacgaagcggtacggctcggactcggcagcggcctcaagagataccgaaccgttatcgaatccatgtccgggacgttcgacatcaccgatgattccgacaactggaacgcgaacatcaccattccattgtctgtaacacgccggtaaagggaatgacggcctcaagctgccagtgggcttgttcggtgtccggctggcttgcgctggtgtgtgttcttcgagcgagtcgatgacctcgtgcgtgtggcccatggcccggctggcggcgtcgcgcaattcgtcgagctgttgctggtattcgtgttcgtcggcgggcatgccgtcggtcccggcgtgaccatcgggacatccagcatgaggattacgcccgtgacaagcgccggccacaggaaccggtccgggcggaacatgccgccgaccaggccggcaagcacagccagagccaacatgatatcgcgcacggtcgcggtgccggggacccgtgccgccatcgagaacacgtactccgcgagcaccgccacggacaatacggcgcaggacgccgcgatcaccggatgcccggcatgccgcaggccaagccggtcggaaagccggggcagagcagatcgtatctggcgcatgcgtccagcacctccttgcggctggcgactcccagcttgtcggccacgcggtgcacgtacgtgaacacgctgcccgtcccgccgctcctgcgacggatgcgccggcacacgtcagcgcccgtgattttttccccaacgccatatccaacaccagcgcatccggcctggtatgcgggttatggcaatgctcgatcgccaccgcgggcgaacccgtgcccccgcatgacataaaagtccttggaaacggccgagatcatcgcgcacatcgcatccagggcgaacggatcattgtccaatacgggcgatacggatcgaccgcgccgcagccccggtcatgtcatcatgtcccatgccgctcatcgtggccacggtcgcagccggacg

SEQ ID NO: 1080 - DNA, 60038 bp, Unknown
  R13_10m  MAG No. k141_6697
tccaaaatcagcgccgtccgcttccgggcggagagttcgtgcggtcgctttgatgacacggccgccgtcccgtcgggacgttcggcatcacccgattaccggtccaaccctcacggcgggaccatgacccgtcgaacttcaatgaggaaagcgccggccgaccctttgccggaaaacgcgaaccgtcggcacgccccgctgaagcgacgccgacgatggtttcggatggtgggcggtcccgatcgcccgatccttctcgatccaccgcccggcgatcgccgaacgcccgtggcggctcacgatggttgcaggcccatgcccatccaaggcgttggccgcatcctgcaaaaaaccgggtccatcgtacgcccgaacatgcgaatctccgtacgccggcgtggatatcccgcataggcgggatatccgtcggggagattccactgacagcgtgaccagtcactcatgcgccggcgggagacgctaccatgaagacgcgaatcatgtgaatcatcacgcaaaggagcatgacgtgaactatctggaacatcgccgacagcacaaggacgcgctatgggaacagctacgggaaccacatcaagccccacataggaagcgtaccgataaagcggctgacggcatcgcaggtgcaggccgcgttcaagtcgtacgtaattcctgaagcggaatagccacatcgcacactggttttctctgaattccgagattctttctctgaattcagagataaatctcgggattcagagaaaaccgttcaagaatgatctgcgtatctcattcaacgtactgccgcataccgcacgttgcgtccactgccgaccttcttagcgcgtccttcaaggactagttttcgcaactggtagtacgcctgattcccctcaagatgcagcaattccatcacatcgtttttgctcactgatttctgttcatgcattaacttgatgatcagttcgggataccgtaccctatcgatgtctgattggcgaacgtaatccatcgccctaccgctgcgccgatacactttcgcacccaacatatacgtgcggcgagctccaacgccagcgctttcaacaagccccgcctccgtcagctgccccaatacggtgcgcagacgctggtcactcatgtccagggagcccgacaacacatcaaagccacaacgacgttcactcttgagcttgtccaaaataagcagaccatcgagagacatggacttgccgctgcgctcacgttcctcggccagcagttccacaaacgccttgtcgggcacactacgaggcaacagcaccgacactccacgcctgttggacctcgaataatcaggcagaggacgaccatagttcaaagcaccctcgaatatacggtcgatgccgcgtcccgtacgttcggcgagaccggttcgcttcaacgcatccatcaggcagggattgcgaccatgcggttcggcggtaagcagattatggatgttgatgccctccacgaacccgccgggattggcgatggtaagccccgcatcatccaactgcacgcgcacacgtcccagcagggtgtagtcacgatggccgaaggtgttcaccagcgcctctcggaacgcccgatggtcgaattccggcaccatcattgagaacagaccgacggatagctcgacgcttggattccaaggagagaacatgtcgttgatttgctcgatggtcttcagcaacggtccggcatagtcttggttgactttgatatccgtaccagacatgacttggaaagacgcccgatgagtcggaacgaagcgtttcaaagactcccccttgcccagcagcagcaaaccggtcagcgtcggcatggtcttgccatcgacggtcaccgtcaattgcagggatttctccagctcctcatcggtcagttccaacaaattacggtcactggattggtaggtgccgataatccggcgcagacggtcgcgttcaaggggatcgaaatcatcacgggtcgcatccggcaccggctgcgcggaaaagtccaaacgtcccaaatcggacaggcgcgtggcgatctcgtacgggtacatcggcacgctctccggcgtaccatccaccttcatacggcgtcgcaacaccttgcccgacttggtcgagaccacgctgcgggatttcggcacatcgatctgcatcaccggcgtcttctccgtcccgacgatctgcgcacgagcggaaaccggaggaaccgtacgggagtagagagtagagtggcggcgtcgaccgacgcatgttctcgccataatttcaatcccgaaaaggagcctcgtcgcaaccatgacatcacatcttgccgaagcaggacgcacgttggttccccgcaaggaagacagatacggtctgctctcccccgccttggtggtgctgacgttcgtcgccgggctggtggacgcgctgagctacctgtcgctggggcatgtgttcgtggccaacgtgaccggcaacatcgtgtttcttgggttttcgatcgcccatgcccaaggcttcgtctggtggacgtcggcgctgacgctcgtctccttcatggtcggcgcgcttatcggcgggcgcatcatccggcgattcgaggagaaccgggccaagcatctgttggtttctacctgcgtgcaggcgtcgttcgtactcgccgcgctaatcggcgtctatcttttgaaccagctcatcaccggccccgcagacgatgcgtccggcgtctcctcgattgcacggcttgcacagaccacccaggcctcacaggcctcacagccgagcctgaacttccccaccgcacggcacatcgacctgcacatcatcctgctgatcgtgctgctcgccccggcaatgggcatccagaactccaccgcccgcaagctgtcggtgccggacctgcccaccaccgtgctcacgatgacgctgaccggcgtcgtcgcagacgcttcagcacacggccaccagcagtcgaagctcgggcggcgtgcggtcgtaatgctggcgctggcgtctggcgcgctgaccggcgcgcttctgcaggcgcacggacacgagaacatcatcttgatggtgatgctcgggtgtctgctggcggtcatcgcgatgatgattccgcatgtccattcggatgcgccgtgggtcaccggccggcaatagcctctggcgcatactttcgccatatgagacaaaaacggccacgccacagcgcaaccagtaggaaacgcccggcaatctcggctctcctcgatatgttggatacccgttgtttgaaacaggccctccgcaagatacaaacaggggcagtgagaaggagaggtaaatatgactgacgcacagcaggcgaacggcaaccagcccgaatcccagaaccaagcagaagcgacggcacagccgcacaacaagcgagtgacgaagtgggtcgctatagtgattgccatcgtggcggtggcgattatcgccgcggtcgcggtgttcggcacccgcgcatacagcgcgtctcagtacgatagcgcagtggccgcctgcgccgccgcctcggaagacgtacgtaacgccaccaacgactacaacaacttggtcaatggcgatgctgcagaagccgccgctctggccaaggcagacgtctcggacgcctccgctctcgacgcgctgtccaaggaactgaccgtggaactgccgacgtacgaaggctgcgtggccgacgacaccaagggctaccaggccgcgaccaagaaactcgaacagcaggtcacgtggtaccacgagcacaccacgtcgctgcagaaggctgttgacgccgtcaacgcggtcaagaagtaagacgagggcggtctccctcacgttttcaggatcggacagcgctcaagtcgcggcaacgcgcgatgtcggccggtcctgcacggcccgaaacggcagaaatcccgcgccccttacgttcggacgcgggatttctgccgtttttgagtcacggattgggactatagcccagtctttgccccagagttgtctattcaggattaccctctcggccgtatctcatgagcaggacgtgtaaaaacaaaaaaccctcgcaaatccgcgagggttattggctggggtgcctggactcgaaccaagaatggctgaaccagaatcagctgtgttgccaattacaccacaccccaatttggcttggcgtagcaactccgaagagttgttcgtcgtacccccaaccggatttgaaccggtgttggcgccgtgagagggcgtagtcctagaccgctagacgatgggggcatattcagtttttcaaccggctacgtggcgaaccgcgcaacaggtagatatattacgcgctaccctgctctcacgcaaatcccggcgtgtcgcgccattttccgccgttctgcgggaacaccccatgcaacgcgaaagcgggcatccgtatgtacggatgcccgccatgcgtcacgctcccatcatccgccggcgtgcggtggacgacgcatcacagatgcgcccgcaggcccttgagacgggcgacggtgatcggcttgccgacgatctccatcgattcgaacagcggcggggagacgcggcggccggacatggccacacggaccgggccgaaggcgaggcgcggcttgtagccgccctcctcaaccagagccttgttcagggtctcatgcaggttgtcggtcttccagtcagcttcatccacagcctcaagtgcggcgatggccttgtccagcacctcgccggcagaatccttcagctgcttcttggcgtcgtccgcaggctccagatactcctcggtggacagcagggagccgaccatgccggcgacctcgcccagcaggcgcacacgcggctgaaccagcggagcggcggcggtcagcacctcacgctcacggtcggtcagggcatcccagttgtcggcggaaaccacaccatcgcggtgcaggtacggcaccgagcggcgcaggaagtcctcgggctcgagcatacggatgtgctcggcattgatggagatggccttgtcgatgtcgaagcgggccgggttggccttgacgtcgcgcacgtcgaacttctcgatcatctcgtccatggagaacacgtcgcggtccggtgcaatggaccagccgagcagggccaggtagttgagcaggccctcgcggatgaagccgttgtcgcggtggttgaacaggttggactccgggtcgcgcttggagagcttcttgttgccctggcccatcacgtacggcatgtggccgaacagcggcatctccttggcgatgccgagttccataaggtaacggtaaagcacgatctggcgcggggtggagctcaggaggtcctcgccacgcagcacgacattgacttccatcatcgcgtcgtcgaccgggttggtcagcgtgtacagcgggtcgccgttcgggcgcacgatcacgtagtccggcacggagccggccttgaactcgatggcgccacgaatcagatcgtcgaaggcgatgtcttcatcaggcatcttgatacgtagcgcaggcttgcggccctcggcgcggaaggcggccttctgctcatcggtcaggttgcggtcgtagccatcgtagccgaactcggccggacggccggcggcaaggttgcgctccttgatttcctcgggagtggagaaggactcgtaggcgtagccggcttcgagcagcttggcggcaacatccttgtagatggcggtacgctcggactggcggtacgggccgtgagggccacccacatcgatgccctcgtcccagtcgatacccagccaacgcagggattcgagaatctggttgtagctttcttcggagtcgcgcacggcgtcggtgtcttcgatacggaagatcagcgtgccgccggtggcgcgagcttccgcccagttgaacagggcggtacgaatcatgccgacgtgcggggtgccggtcggcgacgggcagaagcggacgcggacgttcgcggggagttcgggtttggtgttttcagcatcagtcataatcccctattgtgccgcgcgcgccggacgcggagagcagcgctcctcgctcttttgcttcgttattgacatttcgggccaacaccatcccaaaacggccattttccaacgaaatctcttttgcctgtctttggtagtgcccgatatcttgatgcctgtcttcacacctgttttgacacctactttggcgccatccacacgcccgcacgcaaggcttcgacaccatttggcgcaactgttgagttttttacccaaacgatggaagaataggagtcgacgcaatcgtcttatgaaaggggaatcaatgaccgatcccaacaacgtgccgttgccgcagatgcccgcgcccaacggtaccccggcccagcagaatcccagcacgccgcaatacggcgcacctgctccggcccccgcacagccagattatgggcaattcaacgctccggcccccgcacagccggcctacggccagcccgcatacgggcagcccgctcccgattcttccgcacccggcgcagcgcccggtgcaactcccgcctatggtcagcccgccgccgacccgtacgcggcgaatgcggctccgcaattccccgctcccggcgcggctcctacctacggccagcccggaccggacgccaacgcttacggtcaggtgccacccgcatacaaccagtacgccgctcccactgccacagcagccgtgccgttgaacaagccgtattacgactgccccttccctgaggcattcctccgtttctggaagaagtatgtggtcttcaagggacgtgcctcccgcagcgagttctggtggtggacgttggcctctgtcggcatcagcgtcctgctgagcctcctcagcagtgccacggacgacaagctcgggttcctttccagcatttggagtctggccatcctgattcccagtctggcgctcgccgttcgccgtctgcatgacacggacaagcccggctggtgggtcgccatcttctatggcgcgatggccctcggcatgatcatcatggttgccggcggtggcgcagcactgtatggcgccttcggcagccttagcaactccagctatggagccatggcaaccggcggcctcggtgccatggccattggcggactgattacgctcgctggttcaatcgtctacatcgtgttcatggctatgcccagcaagccggaaggcgcacgtttcgacgatgacgcagtagctgccccgatgcctcagggtgcttacggcgcaccgtacggcgctcccgcaaccccggacttcaaccaggccgctccgaacttcgccgctccgaacgcacccgctcctgacttcaaccagccagccccggcctatggtcagccgaccgcaccggctcctgactacggccagcccgctgtgcctacgcccgattacggtcaggtaccggttccgcagtacggccagccggagaccccggccccgcagtacggccagccggagaccccggccccgcagtacggccagcccgacgttcaggccccacagtacggccaggttccgccgattcccgaaaacgttgatgatgggtccaccgtgctgtctccgcacacggctcccaccgatgacaacgcacagaaaccctggcaaggccagtgactgacgccggcgaagttcgcttaagaagttcgcctcatcactcatgaagcccaacaatgaggccccactcatcaagcggcggtagtattccccgccgttcagtaagccaatgccctgtgtactggatcattccagcacacagggcattgtgcgttattgcggcccctctcttcgcgcaacattccccggaatgcgttacggtggaggatggacgctgcgccgagctactcctacaagctgcctacggagagcgtttgggagatcacatgggattctcccgggcccagcgtcacgatgcggtcgcggcataccgccgcttcaaccgccacgaaaccgcgccattcgcccggcttggtgtagctcatattgtcgccgtccgctcccggattccacaccacggtttgcggcgacccggtacggctgatatgaatcgcacgccccaacatgtcatcgcgcagttccagacgcgcatccgagtaatacacacgattcaccggctgctcgccaaacgtcaccacttgcgcgtcctgtgttttcggcggaaacccttcttcggtggcatccagatacgtcgctccctgcaatccgaccagctgagcaccggacacatcgccgacatgcagataggaatgcaacgcggcctcgtacgacataggcgccgcgccggtgttggtcacggtcaggctcatggtcagcgcattgcccgtttgcacgtcatacacggcatgaaactgagcacccggctcgtcatcgaaccaaggcacttcattgtcgttcagctgctgcgaatccaacacataccgtatgtggctgtcgtcgaatgaaccctcgtccaacgcccaccgacgcagacgtgcaaaaccgtgggatggattgagtgccagctgcttgccatgcgcaaaacccgggccgaaccacgggaagcagatcggcactcccccgccgagcgacttaccggcctcgatatgccacgtactcggcgtccacaccacatccgcctgcccggccggggcccagcgcaacagatgcgctccgtaatcgctgattaccacgctgccgccattgttgacgagcatacgcaaatcgacaccattgcccataagtttcccattcccattgtgcgaacgatacttttcactaaataggatacttccttaacaaaaaagaatcgcaaagtatggccgcaggatgcacaaaggccgtacacacaccatatacgatgtgcgacgcggccttgtgctctgtggtccaatgaactcgttgcttttgagcgatgccctaagggctacagatgcgtttctcgctgccagagagcgatctgccgctgctgggttcctgctacgtcgattcagtgcgcaccaaccatccctatggcgtgcgtaaggcggcggtgcgcttcctgcaacacggtcacacccatgtgggcgcggcgttcaccgatacaccgacttcggagctgattcaggatggctggaagcaaatcgtgacggaaagcgacgccatcgaatgcccgttcaccatcaccggcattcagccgtacaacaccagggacgtcaaccaaatcgtggacaccattctggattcgggcgtgacggccatgctggtgcactccgattatctggcgatcgccatcgcgcagaccctggagcgccgcggcaagcgcgtaccggacgatatctcgatgatctccgtcaacggctttgccacgcccagctcccgcccgctgaccgtactgcgctcgtccgataaggatctggccgaggcggccatcaacctgctgatcaaccgcatccaaaacccggattctacaacccgccacatctacgtggacccgacgctgaccgatcgcggctcggtaatcgataagcagtaaccccacctccctctgacgagggaggtggcatcgcaaagcgatgacggagggagaggcaccaggcctctaaccgttacgagcgaagcatcggccagagcaacgccctcactctttacaactccacggtctctttgccgggatcatccttgacatgcgcgaacttggcggccagagcctccttattgcgcttttcgtcttcttccttggcctgacgcttagcctcgtccgggttccagagcacatcctcacggtgcttgttccattcggcaacggccagaggagcgatgtattcggcggtggcggtcagggtgtctgcgtcggcggctttggcacgggcattaagcaacccgaggatctgctcgtcggtcaggcagatgcgcggcaccgagcactgctcgcgcagttcgttgacgtagagcagaatcggcagaatcttggcggcagcattggcgacactgtccgctgaaccatcggccacagcatcaccggacacctcacccaataacgcatcgcacacggcgagcgcggtggcgaaccgaacagccacatcggcgggcttggcagacgtggccagacgaccatcggcttcagcgtcggcctcgacctgggcttccatggccgcgaccgcctccctcaccgattccgccgtcgcggaatcccagtcgattcccaacacgtcggccgcctcaacgatcagcctggcatcaccggactcggcgtagtcggccatcgtgtcgtaggcgtcattggcggcgagcagggcgtccacgatgctctgcgggcgaccgggaatctcatcggcaccttcgtagacgaactcggcgtccggcacggtgacgtcctcgccggtcaggatgcgggcgaatgcacgggtgacgcgcacctgcaggttctccgcgtacttggcgtcattgtccatttgcatggcttcggtcagcggccacaggccgatcagcgccgagccggcttcggcggcctcagttaccgccggcaatgccgcgacctgtgcgattgcctcacgattgagttcaatggtcatctatgctcctttgcgtccaccactcgattgcagtgcgtcttggctcccctctctgaggggagccaatgtcctaacaccagtgtgccgttacttgacgttggctgctgggtcgacatacgtgattgacatcacacggccggtttcgttgtcgtacgtcaccgaggtcacggaggcgagcgccgtgtgccgcaggaacatccagtgctcggggtggccggtctccagataatggcgataactgaaaatcggcgattcgtggctgaccaccacaatctgctcgccggggtgctgggccaccttctcgcgggcgaagtcgtccatacgcgccgcgatgtgctgataggactcaccccagctcggcttgtacaggttggtgacgagcttccagttgccgttcttccacagcgcgccctcgccatggccgatgcgcttgccacggaactcgttgccggcctcaatcacccgttcatcagtggtgagcgtgagcgaagcctcgccacgagcctcgcgcacggggttcagcgcatcgagaatcgcgccggcggtctcgcgcgtacggtcgagcggcgaggagtagacggctgcaatcgtattggtttggggattcttggccaagtacgtggcggtggcttgagccatgcgacggccaaggtcggaaagatggaagtcgggcagtcgctcatagagcagatggtcggggttatataccttgccatgccggacgaaatggatggtggtagcgctcatgagccgcctttctgcttcccgccctgaagggcatgagaacgttgtcttaatatctccaatctaccgcgtgtcgcggagtggacacccgtagagtatccgtgacgcaaatatgcggatgggaaaatccgacgcaaactttgcgcgaccatggacaacacatcattcgatgagggcttcgccggcaacgccacgccagcgggggacatccaatcgggagcggaaaggagcgtagtgctgttatgtccaataactcgtccaactcgaactcgagcaccattctggccggcatcaaggaagtaggccacaaagtctttggtgggtatgcggaactactgcgcattccgcataccgcccgttattccatcggctcggtcatcgcctgcatgccattcccgatggtcggcatgaccatcaccatttccgtacagcattattacggcaactattcgctggccggcatgctcaccgccattcaggcgattgcgctggccgtggccacgccgctgctgggcaagctgaccgacaagttcggccagaggcaggtctcgattccgacgattatcgtttggattgtggccgccatcgcgctggtgacggcgattaccaaccgcgcgccggaatgggtgctgtactgtctgacgccgttcctggccgccattccgccgtggggcgcgatgagccgcgcgcgctggaccaagattcttaagggtgaccgggagcgcacgaaccgcgcgctgtcgctgtgcggcgtgctcgacgaatgcatgtgggtgatcggtaatccgctggcctccacgctggccgtgatctccggtttgctggcgttctcgttcaccggcatgtgcgtggtggtcggtgcgctgatgttcctgaccgagctgaccactgagccaccgtcgcagaccgcgctggcgcgtgccgagggcatctcccgcaaggaataccgtgagcgcgaggccgccaaggctgaggcgctgaaggtggaaaccgccgccgaggagacccgccgccgtcttgagcgtgaaggcgtgaccgatgaggccacgattaacgcagccattaagcaggcggtcgccgatgcgcgttcgggcaagaaggcgtccatttggggtccgggtctgattgcggtgtgcgtcacctggttcggtttgggcgcgttccagtcggctacgggcatctccatcatcgcgtttgccaccgaagcgaatatgaagcagtacacgggctttgtgtttgcctgcttctccttcagctcgctgatgggcgcattggtgtatggcgcgaagaactggtcgattgccctgtggaagcgcttctacttctgcctggccgtggtgaacatcggcatcagtacgttcctgttcgccaagcatctgtgggtgatcatgatcatctacttgattattggcgtatgccaggccccgacgtggatcaacggcaaccagctcatgttgcatctggtgccgccctctcgcttgaccgagggcatggcgtggatgggtgcgatgaattctatcggctcctccgccggttcggcgattgccggccagttcatcgaccgcatgggctcgcacggaggcttcatggtggtgaccaccttggcactggcctcgctggtgattgcactgatcggcttcaagcagatcaagggctccaccgagcagccgaccctgactgaagtgagtgtgtgagacgtatgctaagccccctctgacgagggggcttagcatacgtcaaaacgctacttcggccagcctttgggcgtgtgctccaaggaccagatgccgagcttgtgggagaagctgttctgccacttggcttcaagctcctcggcattcagtcgattttcagcggacttcagacggttcatcgcattggtgtgcgtatcgtcgagcagccacttgcgaatcaagaagttccagatcattaccacggcagtggccaccaacttgccgatattggtgcgcaacagatattcggcatgctgcgatacataggcatcatggttcataccataggtggaaatccagataatcgcgtcattcatgaacagaccgactacagcacccgccacgaagataaggatctccatccagcgtgccatgtcatcacgatgcttgaatacgaatttcatgctcgccagatagttgaaaatcagcgagatgatgaaagagatggtggcagccagcacgttgtgcatgtggaatatgccaaccaataggttgaggataccccagtcgataacaaaggcgataacgcccacaatgccgaacttcatcagctgttcaatcagttttctcacaagagtattcaacactattgggctgactgcggaacgtgtattggctggaaaggccaataatatccccaattggccttgccccggtccgttctgcaagcagcttcctacgtccgcatgccatgttcaacagcagccgctgaggctagactggaagtgaaccgaatcaaggaggaattatgcccgttattcacactcatgtgtccgtgtccaccacccccgagcagcgtgaggcactgaaggccgcctacggcaaggcgattaccgctgtgccgggcaagtccgaaggctggctgatgtgcccgttcgaggacaatatgccaatctacttcggtggtagcgatgaccagcccgccgcctatgtggaggtcaacgtattcggccgctctgtgccgggctctgcttgggaaaagctgaccgaaagcattatggccgcgctgaactccacactcggcattcccgaggaccgcacctacatccgctacaccgccaccaccgattggggctggaatggcggcaacttctagttgccaccattcccctcgcagcatagctgttcgcatcgcctacggaaagcccagtgggctttccgtttaatggctcagggtggcaactagtttgcgtattctggctcccctcagtcagcttagctgacagctccccctcaaagagggaagctcagatgtagaaagcccgccggtggcgggctttctacgtttcaaggggctgatttccaacattcagaagctctactagcgtttcaaggggcttttaaaacaagaaacccggagtataaacattgcaatttcaatggtcatactccgggtttcgcaatcgaagagcccctcgaaacgcagatagacctccggaaaaccggaaatccgcccctcgaaagcgagttacctcacctcatgcctgtcatcacacaatcttgggcatgggggtggtgaggctggtggtcaggttgacgtggaccagaccggcaccggcatgcacctcgaccttcttcagggtcacggtgcgctcttcttcgggggcgcggtcgttgtcggtcatggtcgccggggacttgaccgccacgaacgccagatcatccagcgagatgcctgcgctctggcacagttccatggcctcggacacggactcggtgaagcccggcttgtagatcacgcgctcggccggtacgccgtaggcgttctcggccacccacttggcgttctcggtcagggccatgcccttgtgcgaatgcggttcggccggcatggagccgttctgcagcgcgtcgacgaaaccgtcaagctgcggggccagcgcctcgccgccgtcgcggaacaggttgccgatgatcggcgtgcggaagcccagctcgtcggcggtggccttcagggacggaacctgatcgtcctcgccttcccacaggttgatgagcgggaaggtcggaatgtccaggttctccaggcgctgcacgtggaacgggtagcgccaggccagctcgggatcgtcgcgccaggtggaggcgcgggtcaccacgatggcggcggacggccactgcgcgccatactcgcgacaggcgatgtccagccacttctgggcaccggcgtcggtgccgtaaccggcttcgaccacaaccacgtcatgcagagcgcaggccatttccacggaaaccagcgtcggaatgccgatggacacgttggcgaacgggccaccgtgcacgtagaccggggagccgttcacggtctcggtcttggccggcttgaccgcgtcggccagaatgccggtgatgcgccacagatccacgaactcgccgaaggtcacggccttgccgtccttggtgccggcgatcatcttggatacacgctcggaaatctcgtccatcgagcgggagagcaccatgatctgcatgagctcgcaggtcggcgtgagcacgaccttctccggcacgttgcccttgccgtagtccacggcggtggagcgcagggagcggctcggcacctcggagacacgcggcacgagaatcgtgtcaagcttgccttcatcgatggccttctcggcgaaggagacgagcaggttctgggccgcctcgatggcgcccatttcgccgcacagaccccagtcgatgagctcggggtgggtcagggatgccttgccgccgccggaggcaccgcccttggaaccggctgcggtgatgcccatgctcggctgacgcagcacggcggccgcatcaatgccacgcttgttcagggcgtcgatcaaggcgatggtcgtggtggtcttgccttcgccgcgcgatgccttgagcggcgtatcggcggtgacgagcaccaccttgccgtgcttgcacggggcgtccgggttctcagccaggtacttcatgtaaccgaatgcgtcgatcttctggaccaggccgtactggctggtgaagtcttcgatggtggtcatttaatgcctttctgtgttgatgatggcggagcggggtggtggggcggccgccgccgcctcttcgcctagaaacagcccactgggctgtttcttaacagcttagcctctcagtccgcttcgcggtcagttcccctcagggaggggagctcaatacggactaaaagtcggacatgtggaagccgttcttcatttccatgctgcgagtgtacagcacggagtcaagcagcttgtcggtttcctccttgagctggtcggccatggtctggttggcggcggcgagaatctcgcgcacctcggggttacgcagcgcggcgatggtctcgtccggggtcatcggctgcacatcgccatccacgttgtcggcctcgaattcctcttcagcggcagactgcgcggcttcctcggcggccgtcaagcccagacgggcgatctgctcgtcggtggcggcgaccaagcggtgacccatcgcaccggtcttctcctggtagcgctcgacggcgttggacgtggagcggaaggcgccatcgcacagggcggcgatgatgcggttggcccagtagaagttctcggacgtcacgcgggtggtggtgtcctcaaggtaagcgggcgtggtgtccacgttcgggaagaacggcaccagcgtgttgaacgggttggagccgtatgccatccactggatggcgcgggaggcctgcgggcggtacgggcggatctgcatcaccgcaagctggctctggcggttgatgccgatcgtgcggtacatgtggcgggtgcgctcatcgcccagctggccgtatggatcgaacggggtgccctggtagtgggagctcaacacgtacttgatgtcctcgatggtcaccttgcgctcgggctggcgggcccacgggatgtcgtcggaggtgggcttgtggtcggcgtccgggccgtcccacacctcgtcgtacgggttgaggaagcgctgcatgtaccaggcgcgcggggtgttgtacacgtggtcggagtcggagtgggagccaaaggcgtcgcgcgggttgaacggggtggtgttctccaccgcgaggtccaaatggttggtttcgatgaattcggcgagatcttcggagcacatgtgcgcttcctggtcgcccagagcgtcctcaaggtcgaattcgtcgataccgagctggttcggcatggtcacgtaggcctcgtccggcacgcgcttggcaatccagtgatggccgcccacggtttccagccaccagatttcgttggagtcagagaaggcgacgccgttcatctcgtaggtgccgaactcctcgagcagtgagccgagacgctggacgccctcgcgcgcggtcttgacatacggcagcacgatggtcaggaagtcctcttcgccgatgccgccgggcacctcgggctcatcgcccttggccggcgtgtattccacgaacgggtcggcgccgagcacgcgctcgttggtggtcagggtttcggtggcgctcatcgccacgttcgcctcgttgacgccggcctcgccccaaataccttccttgaggtccgcgttcggcacggcggtgtactgcagcgggtcgtccggcagggtgatggtcaggtgggagatcactgatttgtattcgcgcggctgttcctccggtttcacgacgatgaagcgcttcgggttgaactcgccgttcgcggaatcctcgttgcgggcaatgatggtcgaaccgtcatagctcgcgtctttgcctaccagaatcgtggtgcaggccatagtgtgatggtgtcctttctcttattcaagctccccttgtcaggctgagccgttcagcaaacagcccggtgggctgtttgtaggcgagggtgggagataagtcccaccacagatgttgcgggcggtagcccgtccgtaattgcaggacgagctgtctcgcaaagcgagactgaggggtagtcactctagctgtctctcccccagtccgcctacggcggccagctccctcatcagagggagctcacatacgccaactaaaaatcacgccttaccggtcaggaagatgccgtcggtgtcgggcgcttcgccgctgttgcgcagcgcgtgcaacagctcgttgagccagaagccctgattcaagccgggcaacggcttcttggtggcccacacctgcaggtagtactcgtggtccttgtccggcggctgcggaccgttgtaccgcatgatcaccgctgggtcagtgctgcggcccaagaacttggaggccgaagaattgcggccttgcacggtctcgggaatcatggccggcagctgacgggagaagtccggcgggatggccaacgcatgcgaatcattgaagtcgtacatcagcgcgtcaatcggcagattggccacggaccagtgaatccactcgaagccgcagaccggaatcgaatccgggtccacgaactcccagtgcaggtaacgggcctcggggttcacatcaccgatgtagaacgggaaggagacgaccggcacgccgccgttgaagtactcaggcgcggcggccttggcaaaatcgtccggaatgacggtgaaatcggcggaaatcttcatatgtcccagtatcgctcatatgtgtgacgtactgggggctgtgcgttacgggggtctctcccccagtctcgccgcgctcgacagccccctcgtcagagggggctggttgcgtcgggttatggaattagggcgcagaagagggattcgaataccagtagcgggttgccgttgccggctagacgcttgcgggcgtgggccacttcgtccagacgggtcacggcaccggcccggttcaaccgcaccgacaattcggtgatcggcgagcggttctccaggttgatgaggcccaccgaatcctccgcattgttctgcagcaccgccacatcccggtagatggaggcgatggagttcagcgcacgatccaatacgtcgcgcgtacggcgggtgaccaaacgcttcacatcgtctttcttggcgatctggttgaacgcgccacgcagtttcggcgggatgcggtcgttcggtgccagtccgttgatgcggcggaattccgcttcctggccggcggtgatgcggcttgcgtccgcctcggcctgggccttggcattgtcgataaggctgccggccagcagcaccgcgtccgaggcgcgagcgaggttcagtacgcccaccaccaattcgtcgcgatccgtcatcacctgctcgtcagtggcgtacaacttggcgatgccgatgtgtccctcggccagacgggccgcacgctgcgccacttttggctcgacattggtggtggaggtcaggaatccggccaccgcctgggtggagggcacggcgaggttcacgatgcgcgtgcgcgagcggatggtgggcagtacatcctgggcactcggcgcacacagcagccagatgcagtgttcagccggctcctcgatctccttcagcagcacgttggtggtgcgctccagcatgcggtccacatcctcgatgatgatgatgcgccatggtgccgtggcaggcatttgctcggaggcggtgatgatctcgcgcacctggtcgatgccgatggtcactttgttggtggccagcactgtgacatccgggtgggtgccagcgagcacctgttgggtgacgcgcgtgggctcatcgttcatgccgtggtcggggctttccagcgccgccgcgaatgctcgggccatattggaacggccggagccgggaggcccgcaaatcagccacgactgggtgatctgacccgggtcgccctgcgcgatgcgactgagcatgtcgattaccggctgctggccgactagtgaatcccatacgctcatcggacaccgcccatcgtcacggctcctgtagacgccccggatcgcgccatcaccgtatccacatctgcaacattgtcccgcagcagtgtctgaatgtccgcttcgatggcggaccacacctgttcgatggactggctggcatcgatcacgtggaaacgattcggctcggccacggccaagtcgaggaacgcctgacgggtgcgggactggaagtcgctgccggccgactccatgcgatcttcggtatgctcaagacgattgtgggaaagcgccggatccatatccagcagatatgtgcggtcgggcagcaggttgttggtggcccacatgcttaaggctcgaatctcttctggcgtaagttcgcggccaccggcctgataagccaaggaagagtctaaatagcggtcggtgatcaccacttcaccgcgctccaatgccgggcggatggtttcggcaacgtgctgggctcggtctgcagcgaatagcagcgcctcggcgcgcggtgcgatgtcgacggcgcccccatccacaccgtgcaacagcagttggcgaatggccttgcctagcgcagtgcctcccggctcacgggtaacgaccacggtacgcccctgagcctcaagatacgcacgcagccgctcgacttgcgtggtcttgcccacgccatcgacaccttcaaacgaaacaaacagaccgctcatgctattgaccttagcgttaggcgcagagttgtgcccaacaggcagttaaaccagctctacctccgtttcaaggggctgatttggtcttttctgaaggtctacttccgtttcaaggggctgttacccaagtagacaacgtcccaaaacggcggaatgacgttggcgcggagccgttcatactcgtggttcagcagatgaccagccccttgaagcggaagtagatattctcaaaacgagaaatcagccctttgaaacgcaagtagagcaataattccgctcagccacgcttgggaattacggcggggcgctcgtagccctcgttggcggtcagccagtcgacatccttcttgacggtggcggcggtggagctgagcttttcggcgatgcgctggttggaccagcccttgtttgccagcttcttcacctcggcacggcgtccggcgcgcttggcctcggcggcattggtcgcagccgaagcagcgcccttcttggctcccttggctcccgacttcgcggcaccggcacgcccagcaccgcgacggccacgggtggagggaccagccgcacgcttttcggcgagcagtcggaaggcgtcatcaggggtgatggattcaggcgtgtactgacgcggcaccgtgcggttggtctcgccatcggtgatgtacgcgccgaaacggccgtccttgatggtcacgttcttgccggtgttcgggtccttgcccaaatcacgcagcggcggcttggcggcaccacggccacgcccgcggccgtacttaggctgcaagaacagttctttggccttgtcgatatcgaccgtgaagatctcgtcttccgaggccagcgagcgggtctccgacttgccgtcggcacccgtcttggtcagataggggccgtagcgaccgttgttggcggccaccgtgcattcggatacctcaccggtttcggcgttggtttcctcgtatgtgcccacttcgcgcggcaggctcagcagctttagcgcgtcttccagcgacagcgattcagggctcatcgtcttgaacaacgaggccatcttcgggcgcgacgcggcggcggccgcggccttcttcgaacccttcttggccgcagaagcaccagcagtatcgccagcagcgccagccgaagcctcagccggcggcaccagcgccacatacgggccgaaacgcccattgcgcacctcgacggtaccgccggataccgggtcaacgcccagctcgcgcggtccaccggagtggttgtcgatcaaatcgcgggccacggccaccgtcagctcatccggcgcgatggtgtccggcagagacgcgcgcttcgggttgccttcgacgtccagatgctccatgtcttccagatacgggccgtaacggccgacgcgcacgtgcaggccgtcgccgatgtcgatggtgttgatggcgcgcgcgtcgatctcgccgagctgcgcgacctgctgttgcaggccttcgtgcgcctcgtcggcgttgcgggcggcgccctcgccggaaccgaagtagaagtgggtgagccagtcgcggccggattcctcgccgtgggcgatgcggtcaaggccgttttccatctcggcggtgaactggtagtcgaccagcttggggaagttcgtctcgagcaacttggtcacggagaaggcgagccagctggggatcagcgcacggccacgctcatacacatagccgcgatccataatcgtggagatgatgctcgcgtaggtggacgggcggccgatctccttggcctccagcgtcttgaccagcgtggcctcggtataacgggccggcggctgggtttcatggccgtccggttcgatgtcgcttgcctcgacctgttggccgacgctcatcggcggcagggaggtgttggattcggaggcgtcacccctgacggccttgacgtccgtcttgccggcggcagcagcctggtccgagccagccccagcgccgggagcggcggctttgggcttgcgcccctcccccgtggccttcataaagccggggaattcgatgacggtgccggacgcttggaacacggcctcgccctcggtggggccggccggcgcagacaggcgcacggtggcggtggagccggtggcgtcagccatctggcaggcgagcgtgcgctgccagatcagcgtgtataggcgcagctggtcgccgggaagtttggaagccagctcatccgggtcgtggaagcgcgagcccgccgggcgaatacactcgtgggcttcctgcgcgccagcggttttggtggcgtactgcttgggctcggcggagaggaacttgtcgccgaaatggtaggagacggcgttgcgggcggcggtgatggcctcctgcgacagcgtcaccgaatcggttcgcatataggtgatgtagccgttctcgtacaggctttgggccgcgcgcatcacgacgcgagcacccatgccgaggcgattgccggcggtctgctgcaaggtcgaggtggtgaacggcggctgcgggcggcggcggtacggcttggtttccatcgacatcacagtgaaatcggcggtcctcagcgcttcagccacggcagtggcaccagcctcatcaagctggcgaacgttcgccgcgaacccgtccggggtcagctggccgtcggcaccgaaatccttggagccggcgagtcgcttgccgccgagcgcgatcatgcgggcggagaattcggcacgctcccccagcgcgtcaggcgcggccaacatggcgacgatatcccagtacggcacacgcttgaatgccatgcgttcgcgttcgcgttccacgatcaggcgggtggccacggactgcacgcggccggcggacaggcccgggcccaccttgcgccacagcaccggcgacagctcatagccgtacagacggtcgaggatgcggcgggtctcctgtgcgtcgaccatattgccgtccacgtcgcgcgtgttgttcagggaggcgttgatggcgttcttggtgatctcgtggaacaccatgcgcttgaccggcaccttgggtttcaaggtctgcaccaagtgccacgcgatggcctcgccctcgcgatcctcatcagtcgccagatagagttcgtcggcgttcttcagggctgatttgagttcgctgaccgtacgcttcttgtcgccgtcgacgatgtaatacggcttgaacccgtcgttgacgtccacgccgaacttgccgaacttggccttgtctgccgcgggcacctggctgggctgcgcgaggtcgcggatatgaccgaccgacgccatgacggtgtaccccttgcccaggtagtcaccgatcttgtgggccttggtcggagactccacaatcaccagtttggtagccatacccactccttatgtattgcgcgaaacacacgacgtttctggcgtcataatactcatgaatcatatccaactgccaaattccgccgttgtgccaggcaaattcggccgttcgcacctcatgttttaccgtttgggcggtgccggcggagcgccgatcaggcccagcctgcttaagggcgctgcagtgatctgacgtagggccagcaacagtccgaatgcgagcatggccacacccgtaatgcccacaacagcgctgacattcgccccctgaaccgcccaactggcgctgacattgagccccggcaccacctgccagatcacataaccgctgtaggcgagcaacagcaggcccccggtaatcaacacgctgccgacgatctgcacactcactgaggagacgcggtggcccggctcgtccatgccggacttgcgtgtaaccgccagagcgagcagggccaatcccgccaccagcaggatggacatcgccacatccgaagggcgatgccattgcccgtatatcacagagacaccgacggtcgccgcccaaaccacgccgatgacgcccgccaaagctcgaaccgcgcgaggcacggtaagcagcagaatcaccgcacaggctgcggccagcatcgtgtgtccggaaggcgcggaattagcggcaggcgattcagtgttgatgatgaacggacgcggcaacagacccttgatacgggtgacggccaagcagaccacggcgaacacggcgatttgcccggccaaccaccagcggcgtcgaatcagcgccgtaataatgccgattgcggcaattgtgcagctgacagcgataaccagccaggattgtgcgacggcgttcatcatgccggtggtccaggacggtacatcgttgtgcaggtttttccagaccagttcgtcgtacgattgtccgttttcggtaaacacgcacccccaccacacgccgaagccaatagcgatcaggagcagaccgaataccacgcacagtacgcggctggagattcgcgggcgcacggtaagcgggtcaagccgggccaagccacggtcgatatcagatgccccatccgcatcgtccatgcccagcggcctgaaatcccctaaggagcctgatgtggatgccgatgcatctgaaccggagaccgggccgagcgcagccaatgggtcaacaacgttcgacgacgagtcaggctgcgctgcgcctgagccgaccagattgaccgccgcatgcgggtcgcgaattctaggggtctgtgcgtcattcatacgttcgactgtacggccgcgccccggacagggagccgtgctcgtgccagctcacggccaaatccgcacaaatggaaaacctccacgcacccgtcagaggccacttacccttgctgcattcctgccctgggggagttgggtgacatagcgccgcgtggaggctggggataagtctatggagacgtatggaccagcgcagcgacacgaaacgtgcgcgccgggtcgcacggcaggccaaccagcgcattcagacaatattcatgcagcatcaaggaacgtgcccaattgtaagaattccggaaaaataccggcataaatgcgtgtggttacgctcacgtcaaacgattgttcaaggccaacagttacggtggacaccatggcttcttatactcgtcgtgcacattcgggaggcaatggccccgctctgaggcaaccgcgcaccgcgcaaagcagagccgaccactccgcacaggagggcccctatacgccccaggagagccgttcccgccacgcaagccacaaggcttccaatagccatcgagccccgaacaggaagaaaaagaacacaggaaaaggcaagcaccgtgtactgaaatgggtgctgggcatcttcttctccctgattggactgggcttgctggccggtatcgcagtattcgcatacctgtacaccaccaccgaggtcccgcaacccgaaaagttcgcgttggccgagaaaaccaccgtgtattacgcggacggcaccaccgcgatcggctcctacgcggaacagaatcgttcaatcatctcttgcgaggggctgccggactacatcggcaacgcgattgtggcgtccgaaaaccgtacgttctacacggataaaggtcttgatctgaggggcatcgcccgcgcattcattaataatgtgaccaagggcacgcgccaaggtggttccaccatcacccagcagtatgccgagcggtattacatgggcgaaaccacatcctatgtgggcaaggcgcgcgaggccatcgtggccatcaaaatcgcgcaaaccgagtccaaggacgaggtgctgtgcaattacatgaacaccatctatctgggccgcaactcctacggcatccaggcagcggccaaggcatacttcaataaggacgccaaggatctgacgctgtctgaagcggcgatgatcgccggcattattccgtcaccgtccacgtgggatccggccgataacgccgatatggccaaatcgcgcttcaagcgtgtgctgaacatcatgcaggaggatggttacatcactgccaagcagcacactgatgccaagttcccgcagactgccgcggtggcgcagcaaaacgaatacgcggggccgaacggttatctgctggatatggtgcgccgtgagctggtgcagtccaaggcctttaccaaagaggatttggataccggcggatacaagatcatcaccaccatcgacaagagcaagcaggaccttatgcagtccatcggcgacacccgtctggacgacatgcctgaatccctgcaaatcggcggcatagcgctggacccgaagaccggtgaagtattgtccgtatacgccggttcagattatctgtccaagcagctcaacaatgccgatcaggccgtattcgaaccgggttcgactatgaagccgttcgctttgctgggggccgcgcaatccggcgtcagcttcgatacgttgttcaacggcaattcccaccagcacttcaccggcttggatcaagaggtgaataacgctctggagaacaactggggcaacatcaatctgtatcaggccaccgccaactcggtgaacacggtgttcatgaacgtcaatgagcatctgacgccgaagcgcacggccgcaatcgcccatgaagcgggcattcagggcgatatcgatgaaaactccatgtacaacgtgctgggcatcaacgccctgaccgtgtgggatttggcgcaaggccattcgaccatcgccaacaatggtgtgaagagcaccttgcacatggtgtccaaagtgcttgattccaacaataaggacatgtacaacgcgcccagcaaaggcaccaaggtgttcgatgccaacgactgcgctttggtgcagaaggccatgcagggcaccaccacgtacggtacggcggccggcacatccaacatgctgggccgacccatcgccggcaagtccggtaccgccaacgacgaaatggcttcgtcgttcgtgggatacacccccagcatgatgaatgtgtgggctatctggaacccggacgataagggcaatccgcaggcggtgccggccttctccggatacggcatctcttccactggataccccgcccacctgttccatgagttcatggctcaggccttgcaaggtaccgaggtggagcagttcccgaccgctaaagacaatggcaagatcggtggacccgacggcacttggggcttgggcaagggacagagcagcggcctgtccaacaacaccaacaagcagtccaccgaagacgcgcagaagcaggctgagcaggacgcacagcagaaggcggccgaagaggaagccaagaagcaacagcaggcccaggagttcgcccagcagtgcctcgccaatccgagctattccaccgagtgtccgaattatcccggcaccactaccggcggagatggcaacaatggcaacaatggcaacaataccggcaataccggcgggaacaacgggaacaataccggcaacgataatggtaattccggaggcaccggcgggaacaccggcaccaacggcgtcacccagtagtaagtaagcacagacaacaaagctccctctgatgcaatcagagggagctttgttttgttgttagcgctcagcgcttgcgctgggaacggttgatggcagagataatcgacttcagagcgctggtggtgatcgacgaatcgatgccgacgccccacacgatctgcgcatcatcggcctcgccgacctggcattccacgtacgaggcggccatggcgtcggtgccgacggacatggtgtgctccacgtaatccataatcgaggcgtcaacgccaaagttggaaatggcgttgaggaaggcggcgatcggaccgttgccgatgccggagacctcgcgctccacgggcgcatcgaccccgacgttcacgccgcggtcgagcaggcgagccttgagcacggtatcggagccatcctcaccggagctgacggccaccttgagcagcttcaagcggccccacggcgcgagcgaggcgtcatgagtatcgcccacaaccacaccggcggcggtcatgccggactgttcgatcggcaggtactcgtccttgaacagacgccagatatcctcgtccttgacttccttcttggtcgtgtcagcgtagtcctgcacgatcttgtcgaattcaatctgcagacgcttgggcaggtcaagattgtggttggtcttgagcaggtaggccatgccgcccttgccggactgcgagttgacgcgaatgatggcctcgtacgtgcggccgatgtccttcgggtcgatcggcaggtacggcacaagccacacgaagctgtcgagatcggcgccagcgcgctcggcggccacctgacgagcctcgagacccttcttgatggcatcctgatgcgagccggagaacgcggtgaacacgaagttgccggcgtacgggtgacgctcggagatcttgatctggttgcagtactcaaccgtcttgcggatctcgggcacgttggacaggtcaatctgcgggtcgatgccttgggtgagccagttgaggcccagcgtgaccaagtcgacgttgccggtacgctcgccgttgcccagcaggcagccttccacacggtcggcgccggccagcacggccagctcggtggcggccacgcccatgccttcgtcgttgtgcgggtggagggagagcactacggagtcacggtcgtcaaggtgggtggagacgtactccacttcgtcggcgaacacgttcggcgtggtcatttccacggtggcgggcaggttgatgatcatcgggtgctcgggagtcggcttgataacaccgatcacggcgttgcacacctcgacggcgtactccggctcggtgccggtgaaggattccggcgagtactcgtagtacaggtcgatgcccttggcctcgttctcgaggtccttgcacagttcggcggcgtcggtggcgagcttcttgatctcttccttgttcttgcggaacacgacctcgcgctgcagcacagacacggagttgtagaagtgcacgatggcgcgcttggcacccttgagcgcctcataagtacggcggatgaggtgctcgcggcactgggtgagcaccacgatggtcacgtcgtccggaatcagctcacgctcgatgagcatacggatgaagtcgaaatcggtttcggaagcggacgggaagcccacctcgatctccttgaatcccatggagacgagcaggttccagaaacgcagcttgcgctcggaatccatcgggttgacgagggcctgattgccgtcgcgaagatcgacggagcaccagcgcggcgcgcgctgcagtcgcttgcccggccacgtgcgctccgggtaatcaaacgggatctgcttgtcgtaggcggcgtacttgttatacggcatacggctcggcttctgcggatcgccgatgaatcgtgccggaggcagcagcgggtcgttgttccccccattggacgccgcagccactgccgcgagatcaaaaacggatgattgaccctgacccattgttcctcctttactgtgcgaaccattcatacaatcgcttattggatattcgtttacgcattggtaacatgcgtaacttcctccatcctagcgacggcccattccaacaccccgttcatctcacaatatgccagcacacgtagcgcttcccggcgcagtactactagacttgcaactatgcgtggaggcgcatgggcttccacagcgagagaagaggtccattatgacaaatccaagtatgcctccaatgccgcaaatccctcaaccgaacggtcagcggcccgcagctccgcaatttacagcaccgcagccggtcttccagcagcctgcagcaccacgccccgcgcagcccgcagcgccgcagttcgcggcgccacaatatgctcagcctgccgcgccgcagttcccggcgcaggctccggctgccgtacagccgacattcccacagcagcccgcagcacagcaagccacctataacccgcgcccggtcaaccaactgcgcaccaagcgcagcctgctgaagtacatcctgctcggcattattactttcggcatttacgatatctggcaaatgagcgaagtgggcgagaccctgaacctcatcgcttcgcgccgtgacggcaagcgcacgatgcactactgcctgatgttcttcctgatcggtggcctgacgctgggcatcggctggctggtgtggtaccaccgcctcagcgcccgtattggcgatgagcagcaggcccgcggcatgactcccaccgttaccgcagccaccttctggctgtgggacgtcttgggaattttcatcatcgtgggaccgctggtctacttctacaagctgctgcatgcgatgaacgatctgtccgccgactacaacgcgcgcggctgaaacaatcccgtccttctacacttgccgacatatttgccggggcagtgtttttactgcgcttgccgatggccgcaccaatcagaccattattgttcggctccgcagtctcgttgattcataggagattccatttatgctttgccccaattgccataccgataacgcggaaggtagcaagttctgcgaaacatgcggcacgccgctcaccgccaccgaagcgaatactgcagcgtcgagtgcttccatgacaccgcaggacgcgccggttgcgcccacgccagcgggagcgactcccgctccggctgccgtttcagtccccggccccggcggtgcggcagtgccgccgattcctatgccgcagggtgctgctggcatgtcggctccggcggtcgtctccgcaccggcggctacgcagcccactgcgaccgttgccacggccacgcagacggccccggcaacggcaaccacaaccgccgcgaccaagcccggcccaaacaaactcatcatcatgctggtggcggtgctggcggccctgatcatcgcgggtgtcgctttgttcctgacatatcgttccgaggtgtggggcggcaagtcgctgcctgacccggcatccatcgcctccagcgtcaccgataagaacggcaagaaggcgtcggccgtcaaggccaaggatgtcacggccgcgctgaaggccaagggactcaacgcgaaaacggagaaggtgttctccggcaaggattcgggtgagttcatcggctataagaacgccgctccgggcgctcgtgtcaaggccggctccacggtcgtggtgcaggaatccgccggccccggcgtgccgaaagacactctgggcgcacaggtcaataaggtgactgagacgttcgccgatatgggcgttccggtccactataagaaggtgtttgtctctgacgccaagaagaaccccgaaggttcggttgtggccacctatcctgccgccggcactggggtcaaggacgacgagaaagacaagggcatctacattggcgtggccgccaagggtgacgacaccgctctgcccatcgacgtgatgggtcaggatgtggataccgtcaaatcccagctcgagtctgagggccacacagttaccgttgaacagcgtttctcttccaaggattacgtgggtaaggtttccggcgccagccccgctccgggatcgtccctgtcttccggcgaagacgtgaccctgtatcagggcatcgatgccagcgacaccaaagaagcctttacaggccatgatttggccgaaacaggcggtgacgcgctgctcggtaccacacgcgcagccgacggccagtggtgcactaatgatgggaagtgcatcaccatcgacaattacaaggtgactgaaggcggcagtgataatgctgactataccggcgattacgacggtactctgattgcctgcgacgccattcagcaggcgtactgcagcagtccgaaagccgactacctagtcacacaagattatggcgccttcgagctcatgccgcatatcagcctgaccaacttttgggccaacggcaaaatgtatgacggcaatggcgtgcatatgggtgattcttggcccacatccggcgaataccacatgcaggatctgttcctcgtagtgcctaccggctccgacttgcaggggttggaagataagggctacttcgacaaagacgcgcttgccgcagccaagaagcagaaggcggtggacaccaatcgaccgttcattctgtaccgcgatccgaagctctacgacactaccaccgctccatacaacggtgccgggaacggcgccaatccgttcctgccctacaacggatacaacggcagtaagtccgacatcgtcaagatgaagccggccccaagcgacgccgacgcctactatctggtcgaagcgtccgaacccgattgggattccctgccggacgcggacgtgaaggcgcccagcaccaaggacaagggcaactccaaggattccaaggattccaacaagagcagtaagaaatccggcacaccggatgcggcctcactgaaggtgttttctgatttggccggtgcccaatacgcttacacgattgctggcgatggcagcgccttcaccaccatttcgttggatgatcggggcaacttctccggcactgtggacgaggcagatatgagcagtggcgattccgcagcgaatgcgccacgtatccagaccaagttcagcggtaagtttgcatccgccacatccaattcagatggcacggtaacgctgaagtgtgatgcgtcggctttcaaaattgacgacaagtccaaatccgacaagtcaggattcagcccgtgtggcaccttcaccggatatccatctggaacctccagcgatgcgctgccatctgaagcacaggccatgctcgtcaagcgtggaacgccggatggaccatccgattggatgctgattaacaccgaaggctctggtatttttatccgcacccagaaataaataacagttaagcagggttcaggcggatccaacgcttaatactcagtgaggccagttcataccggcctcacgtgtttttagcgcttcttcaccaacgagcggatgacggccataaaaccgaggctcatggcaccggccagcactgcgaatacctgcgggcggcgcaattcgttacgcatgctgatggcaccggtcacgcagtggtcctcgaaccagacgcgcacctcgttgctggagtatcggcccaccagatcaccccaggtgagcatgcgggtcacgtagccggccgggttgctttcatggaattcgaacaggcggatgccgcgatagcgcgacttgggaccatagcattcgaatccgcaggtgggcgcgtagcccaaatcaatgccatgcgcgtggcccacgaaggcgttcttgtgatcgtgaccgcagaacagcgcgaagtagccgcctgcctcacgcaaggcgtccacttcaccgacgttctcgtccgcacagccaatcgcctcacccaaccgcgatcccggccggcaaatctcatggttgagcacgtagcaatggccggcgtgggtacgcgcgccttccaccgcgttcggcgtccatgcgggaacctctttgaggcaatcgtagaattcttgcggcggaatgtgctggaaggcgatggcaggcaccggcttaccgtcgccgttgcgttcgccaagttcggactgtacggctcccagccaatcgatcgcctcggggcttggcgtgccatacccatcggaatcagccaaatcaagaccgcgcggattgaccacataggccgggtattgggcgtcgttctcttcaggcttgccggcgtaatcgccggaattcaccatcatgacggacatagctacgcgcccggatccgtcggaagcctcaatgggcagggcaaaagtgcctggctcggggctgtcgaccgggttcaggcagccggggaattcgcggtagatgccgtcctgctcgtcggccaggatgccgcactggaaatcgtgattgccgtaggtggcggcgaacggcacttccgcttcaatgaccgggccaaggaagccggcaaacgtgcggcggactttgtcacgggtctcgtccatgagctcgtccaaagtcgtcggcacatcctgtgaatcggatgttgtggagtagaccagcgtggacgcggtggacgcggtggacgcggtttgttgggcgtcgggattgctgccgtcagacttcatggccagcagacgattgttcacgcggtctctggcccgccgcttgattccgcgcagcttggcctcgacttcggtgaccgcacgcacgcgagcgcccggttcctcgccacggcggcgcaggaaagtgtcgatgtaggcaggatcgtaaccgcgaatctggtcgccggtgaacaccaccagatccgggtcggctttgcgaatggcctcacggataagacggatggtatcggggagcacgttggggccgtcttggatgtcggccatctgcagcacgcggaagctgccgtcttcgcggaatcgcaggttcgtcatgcctcaccagtctagggacgtaatgctgtttcgcacagcatacgcgccggtccttcacgttccccgccgctccgcacggcagctgaatcactacaagaaatcgtagaacgtgtatcccttatccgctccgctcgtcacgttgagcaatgctttgccgttcagcgtatcgacgtcgtttcctatgagatagccgtctcccgtggcccccatatccgagtcatggtaggagccggagaaggtgccatccttattgactttcattacggttccccatgcgccgacaacggaaccgaaactatagttacctgccgcctgtttcatggcctctttgaatgtggcgtctcgtttgccgctgtccttggacttgtcaccggtcgtctcaccggaagcggccttatcgccagtgcccttgacctcggcgtccggcagggaatcccagtcgagatcgccgttctgctccaccagatagtagacggtcgaatcgctgggagccggcctcatcggcaccagcgcgttctgatagttattgatactgctgttggtcggcacaaacgggtccacgtccttgccccggctggcgctcacactgatctcgctgtacaggctcttgtcacgaaccagaacgtacgggcggctggtgtccacggccttctgcttcttggccttcgccagttcggcggcgtcgaagtaaccggaatcatccaatgacttggcatcggaaccggccgggaagtagaccaggaagtccttcatgtcgtaggtcatgccggtcgacccgttctcagccccggccggtggcgtcatttcgccatcgtcgaacgacgcccgttcatagttgccgttcacgcagtactcgcctatcgaagcggacatcatctttgagccgcagttcggcagatccatgcccgcgtacagctcgaacataccccagtctttcaacagcagatggtttttcatcggcaatttgtccgcggccatgccgtgttccgaatccgcttccagcatcgcgccgctgatgtcctgagagaagttggtcaggcccaacacatcggccttgtcttcaggctcatggcctttgatttgcaggtactgataatcctcggatgaagtggagccaaagggattcatcgaggattgctccagtgtgatgcagtccttggcggcatccgtcacctcgctcttgcagtacataccgatcattgcggacgcgtggatgctggccatcttgatgttgtcatacgagttggttttgctcagcacgtccatgttgctggacttatcgatgccgtaatacaaggtcaccgactggccggaactcaacgtggatcccggagccgggtacgagccggaaatcttgcccacgtatttctctgacgagtaatgcggttccaaatccacactgtagccttgcgactccaagtcgctgacggccttgttcttgtccgcaccaagaatatccaccgggataccatcgcccttggaggccacgccaatgtaaatgccgttgtccttctcgtcatcggtgagccctacaccgggagccgggtacgtgacgctgacctgcccttccggagtcttgctgtccggcgaaatcacaaccttcttatagtgaatcggcacgcccatattcgcgaacgtgttcgtcaccttgttcacatccttgccgaccgtgcccttcggcacaccgggaccggccgactcctgcaccaccaccgtggaaccggccttgacgcgagcgccaggattcgtgccctcgtagccgaggaacacaccgcgatcctcgccggagaacaccggaaccgtcttcgcgttcaggcccttggccttcaacgcctcggtcacatccttggccttgaccaccgatgccttctcgccgttcttatcggtgacgctggaggcgatggacgccggatcaggcagcgacttaccaccccacacctcggcacgatacgtcaggaataaagccacaccggctacgatcaacgccagcagcaccgccacgagcgcgataatcagcgtattcgggccacgcttgcccgaaagattcggcaatgtggcggttgcggtcgttgtgccgctcggcggcgtggctgcgcccggagcgacaggagcacccggagcggcctgcggcactgctcccggtgcgatcgacccagtatgacttgctcccggtgcggtcggcgctcctgccacaccgctcgatgtcggcacgccgggctgcccataggcgttcccatcgtttgggccgggcagcggcgggtgatcaagcaccgtcatagtattgtccggcagcggcactggaatcgggccggccgccgcctgaggagcaggagcactcacgtcggttagcggcgcaccacagtgcatgcagaaccggcttcccccatcattgtcagcaccacaattcttacagatcatcattgctcttctctctggtcgaatgacgcactatagcctcattctactggaaatgaacgcgatggaatagtccccactcagccgccaaccaaaaggcgtggtccgtatacacagttgcatgtgcaaatactgcttgtactatttgcacaacgtgctatccaccgaggcaagcacttggctcatcagctgagcggcacgatcctgaccttggttttgcgtgaccacagagaccgcggccttgttgccattcacctccacgatggcgaagtaattccacgtgttctggatgcccatgccacgatgtgcatgcacggtcatgccgctcggaatcaccacgccctccgaagcaatatcagtgttcatcagaccagtgccaccgaccgcatcaacggcaaccagcatgcgggccgcgtcacgagcggtactgtaattctcatatccagcattgctggcctgtacatcaccgaaatcacggttgaagctggtgccgctgtacccatgggaactcagccatgaattgacagcactccatccgccaagggccccgacagcctgattgccggcactgttgtccatgccggtcatcatcgtatttgccaatccttccgcattgccgttgccttgagaggcaagatacaccggcagatacaggcctgcggcaacgaacttcttactcgactgcgacgtattggcaatggccgagtcttcagacgacgcatcggcgctgggagccacatccatcttcactagcgggttgtatccaccgctcatcggtataccgggtacaaacggattggtggtttgctcgccgttcttgtatgcttcgacgcttgtggtcttgtatcccttggggtcgcgcatgatgaagaacggccggtcggtgtctggcttccccgccttgttcgccgcagccagcgccttgttggagaaatagtcggaatcctcgagtttgctgatcttcgatcccaccgggaagtaaacgtagaagtcatccatttcgtaggtggcaccggattgctgaccatcagggatatcatcagtcctcacatattgaccatggtcacacccttccgtctccccatagcctcggtagaccgtgccgtcgcataccggccatccgtagccacggtacatctcgaacatgccccactgtttggccaacaagtggttgcgcatattggtttcattatcgggaatcgaaccatccttgtagtgcagaatgcacccgccaatgtctccggtgggcgtgcacagtgtgacccgatcgtcccatatgccattggactcatcgcctttgcgcaccaaatacgggtaaccggacccgtatttcattccgtcttgacccttcgaaatcagcgagatgcatccacccgagccaggtaagaaaccatccttgcaataggtgcccgtaacacgccattcgcccgcagccgagatatacggcaaactcctgtcactcttgctagtgctggcataatccgcgtgcgggtcgaaatcataatcactacctgaaccggtggtcaccacatcttcagtgttgtcggctcccacaccgtagtacagacgtatcggttgcaatattttataatcattttcctcattgctcgcctcaaacggcgcaccaaaaatgtaattggaagctacgattttgccaaaatccttcttggcggaaaatcgcggctcgagaataacctcgatcttgttgttcgatgcgttttctactgcggttttcgcctcatccttatccataccgataacgtcggccggcatgccctcgactgagggatccgggataccaagataaatcgcaccattatcgtccactggctgccccagccgggtaggtatacacgactttcttcgtatcggccttggatgttgcggctactcgcttggcataaatcggcacacccatatctttaacggccgcagcggccttggcgacgcttatgacccggtaccggcgtctgcggtaccgcgatagtggcgggcgcagacgacgctgggccgaggctagagctgagaccggggccgggaatgggaccggcgggtggcatcggcacaggcggaacatcagtgaccgtattgtgtcccacggcaagtttcggtgccagcggagcaccgcattccgtgcagaaacggaacctatcgtcattgacagcaccgcacctatcacagttcatcgcgtcttctctctgatgaaatgatgcaatatgcctttcattgtacagagaaaacgcacactggcggagtcaacggaacagactcaccccgcgacgggccgtgcaatacgcgttgcccagccaggtatggcgggaattgggccagacagctcccagtcgcggtgcgttctggctcatccagatgctcggcacacggccgtctgcggagcgtgagccgagcagattgaagccgttcttttccagcagccactccgggtgctgggtggcgatggccaagccttcctcgagggtgagcggcaggcgttcatcggagtcgataagcttgcgggccacgtccggctcgcgattgatataacacgtgccggtgtgcggattgacgaccagatagaacgggccttccggcggcatgaagccgtcttgaggcaggaagctggcgatgtcacgcggcggcatggtggtgaagccggccatgcgattgatggaggttcgtgcgatcagtgactcaggcgaaaccagttcgcgcgtgggcaccagcaggatgttcgatcccaaatcggaatgctcgagcgccccgatcaggggtcgggccagcgagcggaatgcggcggcggaaatatccgccacatccggatagccgagagccacgatacggtcgagctgtttttgggcctctactgatgcgatagacatggctaccagtgtagaacatcaccttcgcttcatcgggcagtcaccatctgggaagaccgctactgttgttccgcgcgtttcgtacaatgtcattgttttacggtcacccgtatgacggccgtccgaacgtaagtaacccatcgaaacccagaggtcatagaggtcatcatgtccgaaaaattgaaggtcggcatccttggtgccaccggtatggtcggtcagcgttttatcacgctgcttgagaatcacccgtggttcgaggtggtcacccttgccgcttccgcgcacagcgccggcaagacgtatgccgaggcggtcggagaccgttggaagatggaaaccccgatgcccgaatacgtcaagaacatggtggtcgtcgatggcgacgatgccgagtccgtggcctctggcgttgatttcatgttctctgcggtaaacatgccgaaggaccagattcgcgccattgaagagcgttatgccaagaccgagaccccggtggtctccaacaacagcgctcaccgttggaccccggacgtgccgatggtggtgccggagatcaacccggagcacttcgaggtgatcgagcaccagcgcaagcgcctgggcaccactcgtggtttcatcgccgtcaagccgaactgctcgattcaggcctacacgccggcactggccgcatggaaggaattcgagccgcgtgaggtggttgtgagcacctatcaggcgatttccggcgcaggcaagaccttcaaggattggcctgagatggtgggcaacatcatcccgttcatctctggtgaagaagcgaagtccgagaaggaaccgctcaaggtgttcggccatgtggacgccgaaaagggcgagatcgtgccgttcgacggcgacctcaagatcacttcgcaatgcatccgcgtgcccgtgctcaacggtcacaccgccaccgtgttcctgaacttcggcaagaaggccaccaaggaagagcttatcgaccgtctggtgaactacacgtccaaggcttccgagctggagctgccgcacgcgccgaagcacttcatccagtacctcaccgaggatgaccgcccgcaggtcaagctcgacgtggactacgagggtggcatgggcgtttccatcggccgtctgcgtgaggattccatcttcgattggaagttcgtgggtctggcccacaacaccctgcgtggtgcagccggcggcgccctcgaatgcgccgaaatgctcaaggctctaggctacatcactaagaagtagttgaatctcgttaaaatcgcaaaagccctccgcaaggagggctttcatcgtattaggcgcggaattcgcggctcagcggccagtaccgccgtacaccacggcttcgatctgatcggcatcgagaccgtaggcagtgtgcagcgccttgacggcgtcgttgagctggtcgagcggcacgagtgcggcgatacggatctcggaagtggagatcatcagcacgttgatgccctcatcgctcagggcctggaagaacttggcagccagaccggcgtgggtcttcatgccaacacccaccacggctaccttgccgacgttggtgttcacatcaaaggagtggtaacccagcacttcctgcttgtcgagcagcgtgttctgcacctgcttgacggccgattcgggcacggtgaaggagatgtctgcagtgccaacggatgcgccggcctgcacgatcatgtccacgttcacgtcggcggtggccagctcggtgaacaccttggctgccatacccggctcgttcggcacgccacgcacggtggccagcgcctcggaacgatcgtgggcaatgccggaaatcaccggtgcctcggggcccaggtcagggaacaggtcgcccatggatttcgcttcttcttcagtcatgtcttgccttgtcttggttgaaattacttacgattattgttcgctgtagccgcgctcagtcgaggttcggcagcgtgcgcgggtcaatgccgtcaggcacaaccagcgtgccggggcgacgggagaacgaagagcgcacgtgcaacggcatgttgaaacgctgagcgtactctacgcagcgcagtgccagcaccttggagccgcaggaggccatttccagaatggcttcgtagccgatggaaggaatacggcgggcggaaggcacgatgcgcggatcggcggtaaagatgccgtccacgtcggtgtaaatctcgcagatgtcggcaccaagggccacagcgagtgccacggcggacgtgtccgaaccaccgcggccgagcgtggtggcgtcacccttggcgttgatgccctggaagccggcaacgatggcgatgtctcccaatgagagcgcgttcttcacgcggtccggtctcacggccttgatgtgggccgcgccgtaacgggtgtcggtgaagaagccggcctgctgaccggtgaaggagtgggcgcggctgccttcggcgtgaatggccatggccagcaggctcatggaaattcgctcgcctgcagtcatcagcatatccatctcgcgctcgggcgggttggagtcgatgctcagcgcctgatcgataaggtcatcggtggtatcgcccatggcggagaccaccacggccaccttattgcccttcttctccgtctccacaacgcgcttggccacacgtttgatcgaatcggtatcggcgaccgacgagccgccgtacttctgcacgatgagagccactgctgtcctttgttcttctcttagggatttgtttggtcgatattctacgcaaacgcaacgattataagggctgtcgcgttcaccccgcgaccccgcgccggcatgcggacacgggtatggcctacgttgttcagcaaatattcaagttttcaccggtggttctttgagacagccgcatccatcctttgagattcgagcggttaactatcaattaccggcaaacgaaagcaaaccggcgaggtttccgcagaaccccataactgaataccttgtcatgggcgaaactttgggctacaaagtggaccgcatttcggtgattttgccggatgacacgtcgaagctcaagattgtgccgggtgaggaccgtgtcaccttgatgacctgtacgccatacggcgtgaacacgcatcgactgcttatctccgggcaccgcgtggcaattccgatgccggcccccgagccgaatgacgtgcttgacgcgcgcaatatcgcccttggtgttggtctgggcatactggcggcaggactgttcattatctggttggcacgacggcacaaggccgcgcgcatcatccgccacggcgcattctggccgtggatgcgccgcaagggcgaaagcgccaatgatacgctggcctaggcctcacgccgaccggccagcgccctgcccagcgtgatttcgtcggcgtactccaagtcggagcccaccggcaggccgctggcaagtcgggtgaccttgacacctacgggtcgcaatagctgggtcaagtagctggtggtggcctcgccttcaatattcgggtcgagcgccataatgacttccttgacctcatcgccttctaagcgtttgagcagactgggaatacgcaggtcggcagggccaacgttggccattgggttgattgcgccgccgagcacatggtataggccgcggtattcgcgcgtgcgctcgatgctcatcacgtccttgggctcttcaaccacgcagatcaccgaacggtcgcgtctcgggtcggcgcataccgggcaggggctggattcgcacacgttgccgcaaatatcacagaagcggatcttggccttgacctcctcgatggcctcggccaaatcgcgcgcttcatcttcgggcgcggacagcatgtagaaggcgatacgctgcgcgcccttcggcccgatgccgggcagccgcccgaaagcgtcgatcagtcgctgtattgcgccgtcataagcaagtgccatgggtattcctcgttattcgtcctcattattcatccgagtgcttcttggcaggctggatgttcttggggttcttcggatcatctgccgcgaattgctcgacttttttgacctcgaatagctttttcagatcgtcaagattcatggccgtcgcctcgccgagcgactggtcgttcatcgagtattcgtcgtcctcggccgcgacttgcggttgcggctgcggctggctattccacgggtcggcattcggcgtcggctgtgcgggctgcggttgattccacgggtcatcgccggcagccggctgcggaaccgattggggctggttccacgggtcatcgcccgacatattgcccgacactgtctgaggaaccgaagaagccggagtctgggactgcggctgattccacgggtcgtctcctggctgcggagccgcctgagcatggttcccctgcggctgattccacggatcatcgtgaggagactgctgatatggctggttccacgggtcggcttcgaccggttgcagtgccagcgaggccgtagcctgagattgcggctgattccatggatcatcgcttgcgccggcaactgccgtagcgggagctgcggtggctggctgccccgtggactgtccagtgggtccagcggacgcaacggacgcagcgggtgcaacaggagcagccggagcggcccacggatcaacaccatcactgatgtccggaaccgcaacatgcttcttgtgatgctcttcgggcgcaggcgcagcagcgggctcgttaggtgcgaacccgtctgcagattgcggtgaagcgttgcttacggccggcttggcccaagggtcatcgtcactccaactcttcgccgccgtggatgcactggattggccggctcgatggctgtcgtccgtatcctcggcttggcctgttgcagtcggcttcggagctttcggctcgctccccatatgaatgcccagacccgcgcccaaactcgacgcggccaatccggccttggccatggcaatctgctgcttgaccttggccaattgctccgggctcatacgtttgacggattcgactcgctcgccattcgccgcgaccgcagaaggtgcaataaccgcattggcaccgaactcgttgcgcacggcatccaacaccacggacgccgccttcttaccgctgttgtccacggccaaggcgaaagcgtgctggctcagcgacttgtcgaacgtcatcgacaggcaaggcagactcttacggttgggaccgaattttacggtcggcaccttgtctcgtgacacatattcacgaatggtttccggcaaagcggcgacggctgcatcccacttctcgtcgatggaccgattatccgatgccgcaggcgaggtcaccggttgggccgggacggccggcgacgtggcgggatcaccccaggcattggcagcagcagttgctgcggcaggttgcgcagacggagagcccgcgggccggtcgctgactgggctgctgacagggccattgtctcccacagcggattcatgggaagcggtgctctgaggcgcggctgcttgctggttgcgtgcagcaccggagaatccaccatgtgagactccggcaaacccgcctcgcgatgcgccggcaaaaccactggcacccgtaccggaagcggctgacgtagtcgaagtcgaagaagcagccgcaggcggcatgccagaagaagctggcgcgggagcggctgttgcaaagcctgattcactgccggccaacaatcgtgcggccagcagttccaagcgcatacgcggagaaatggctccggtcatggcacccaacgtagtgttgatgatgtctgccatggcggtcagtgcgcccagtcccagcgccttggcttggcggtgcagatcgtccatatcctcggcctcagccgtgtcggacagcacggattccgcacggtccccggccaacgtaagcaccagcagatcacgcacacgagccagcaggtcttcgacgaatcgtctcggatcgaatccgccgaccacgactttctggataacgccgtacagggcttcgccgttgtgattgattaccgcatccactgcctcaccgatcagcgcctccggtgtgaagccgagcagggctacagcggcatcatgggtgataacgccttcgaccgaaccaaccatcagctggtcaagcacagacagggtatctcgcatggagccgccaccggcgcgcatcgccagtttcagcacaccgggctcgggcttgatgccttccttgtcgcagatcgtctccaggtagggacccatgacttcctgcggcaccagacggaacggatagtggtgggtgcgcgaacggatggtgccgatcaccttgtctggttcggtggtggcgaagatgaacatcacatgttcaggcggctcttcaacgattttaagcagcgcattgaagccctgctgcgtgaccatatgggcctcatcgagaatgaaaatcttatagcggtcgcgcgcaggggcgaaaccagcgcgttctcgcaattctcgagcatcatccacaccgttgtgcgaggccgcatcgatttcgaccacgtcgatggaacccggaccgccggtggccaggtccttgcagctttcgcattcgccgcaggggtgggaagtcggccctttggcacagttgacgcaacgggccaggatacgcgcggagctggttttaccgcatcctcgcggccctgagaacagataggcatgcgtaagcttgccttcgtccaaggcgcgcatcagcgggaccgtgacttggtcctggccgatgaccccttcgaaggtgtccggacgatagcgacgatacagtgcaagtgccatagctactaacctacctttgccctcagaattaaccgataaaaagtcaagataaaccgggctcatagctgccgaatcgggaaaactctttatattccaacgacattcatctgacaacggttaccgcatttttattgttattaaccgctttctttgtattaacatagtgtcaataacggttgtagtcaggaggtgcccatgagcgatatcctcgacgagaaacgccccacccgtggcgatgcccggcgcgacgccatcgtgcaagccgcgcgcaaggtgtgtctggaaaaaggcttctccaaaatcaccgtttccgacatcgcaagcgaagtcggtatgacgcgttcgctgttctaccactacttcgaagacaaggaagccgtagccgacgcagtactcgatgacgtcatcgacgaaatcctcaccacgttgaagcagtggaaccaagcgcgcgaaacaggcaacgtgaacaaggcattagacgacatcgtgcatgtgctccgttccctaatcgccgacgagagccccttctcaaaccgtatgatccaagatggcaacgccgaactgtatatcaagttcattgaccgcgcggcggaccgtattgccgactacattgcccagaccaccgtacgtgatttcgagcagatgcatggtctgccaatcaccaacgtccatgagacattcttcacgctaatcgtggggcttatctcgctggttcgctcgcatccgaacatcagcgaccgaaccatcaaagaggtcatggcgcagacgctgcatatcgaaagctatgtcgtctgaggtctgacggccattggctctggtaccgctctcccgcactcccctcagtccgcttcgcggccagctcgtccgcaatcgcggacagcctacggctgactttctcctggttcgactatcgtcgaaccctcgcctacaaacatcccactgggctgtttgctttacggctcagcctaatgaggggagccaatataatcaggtcaggcgaactggccggttacggggtcgcgaccgtctcgggcgatggcgtcgagcacttcctgtcgggagtccacctcacgggcggctacggccggcggtaccagtacgcgtagcgcgcagtcctcggccactaccctgaatggcagatgcccgatgtattcgccgtccgccatcagcaccggtggctcgtcgccttctgcggctcgcgtgacttcgatctcgcgtatgcgcttccacccgaacacctttgaggcgagcagcttgccgttataggcgttcgagatggccaccgcacattcgccgaagttcggcacatgattcatccacaccaggtccaacagcccgtcggagaagcaggagtacggtgagacctcgatgccgccaccgatatgacgcgaattcgcaatcgtcagcaacggcgtgatgatgtctcgttcatccgtggtaccgtccgccagcgtggccttgacgtggtacccataacgcttcatatgcgtcagctccaccagcaccgccgcaaagtagcgcatggtgccggtcggcagatgcgaatgattcgcacggtcgttgatacttgcgtcaagaccacaagacagcatgcccgcatagtaccggtcaatcgggtgctcggcagacttgttctcccggtactcgtattccccgccggtggatgggttcacggcatagccaccatccaaagaggtcacgcgtcccatgtccacatcaatgtgtgatccgcgcacgatagcgccgacgataccttccactgcggtttcgatgcgattgaccggcagcttaagtccccgagcgaaatcgttgcccgagcccatggccacgatgcccagcggcttaccgccgcaacccacggcattggcaccgagtgcgatcatgccgtcgccgccgaccaccaccagatagtcgtactcgtgcgcgcgttcacgcgcctggttcagggaatcgtcgaaacttacgccggtgatgtcgatgacgtcgaagttatgggcacggccggcgtcctccagcagtcccaatactcgcgcatccaccttggcaccacggcccttatcggaagtgggattgcccaccatggccaccacgcgacggcgttctgtgcgttcactctcgctcatgctctcaccttaaccaaaggtccagaagcccgccagagcatcagtgcttacggtccattattgtgataattgtctccttccgtacaattcaccggtccggcccgagccatccgctccacggatgatgccaccggaaccatggtttccaccttgatggttaccaacacgtcttcatcccgcacggagcaggagcccagcgtgacgccattcgcttcagccatgtttgcagcaagcgcgcatggatcaccgatatccacatgccacagcgcatacgcggcgtcaaaggcgatgagatcggcgagggaacgcgctcgattctggcagatcatgaggttgcccacacttgccgccaccgcgagcgcaatgcccaccgccataaccagcatggctccggccatcgtgcccgatccctcctcataacgcattccctgcaccgcagttcctttctattgcggccgcccagccagcagccgaccagttattggcttatcgccgtagcgttgccggtgacccgcgttggagtgacatccagtgggccgggcagtaccgaacattcgaccatcacgctcgtcgattggccgttgtgggcaatgctgacgcggggatctccccctgcaacgtccgcagctatgctgcgcgcggatgattcgtcaccggtaaccacaaactcgcgtgcagccgccgtcgcggcaccttggcagtccatggaaacgatgaccacacgtcccattgccagtatcagcccggcgatggcgataacgctgggcaatacgatcgcgaattcggcggtggccgatcccgtgcataggtctggcggcagtctggcgagcctccaccggcatctcatggtcttcatggctgtcacccgactttcagagcctgtttgatgatgttggtcagcaacgtcttgatggcatccgacttcaggatggcgaccagcaccgccgcaaagcctgtagccgcaacgagtacgactgcgtattccgcagtggctgcgccttcttcgggctcagccatgagggcgcggatgcgtgcgtccatgaggcatagccgttctttcgccttggcgttcagcgtggccacacgagccttgctgtgcgcaaagatgccggcctgcccgtcgacgatgacggggataggggtattcattggcgttcctttcggtaaggaggggaagctgcgcagtggcttcgcaccttccccatgcgtgtgtgagtggttggcccccgcgccgggttgacgcggggtgcataccactgtggactatcaacgcttcatgcaccaggaaaaacggggtatgtggttctagcttgccgagttatccacacctcgacgtgtcgtccaccacaaatgtggataaccaaacgcagccaagtacaataccgagcaatacaacaagattcagcctaagcgcactcagttcacgcctatattcacatcatgaaggacgcaatcgccggaatgactcctaccagcacgaatgccggcagaaaacatagccctgtaggcatcagtagctttaccgacagcttcgcggcattccgttcgatggcagcacgctcgtcacggtccagctgttcaatggcggattcgaggcgcacaccaggcatatcgccatgcgtccatgacgattccaaagccgattgcagcaggccaagatctcgttgcgtggtattcgtatttcccttggatggactatcagctggcgcaccctcatgctgaacagccatagcggcatgccacgcatcagcccagggaacccctctggtcagggagttcccgacctcgctcatgcgagcgccgcagtcgccgccgacggctttgcccaccatgtcaagcgcccggggaatcgaggagccctgacgcaaggacacctgcaacatacgcaatatgagtatggtccatgacgacccgcaatcatgcgctacggccggctcctcgcccggcaagcggctgtcatgacgagacggagccttatacagccaaccagcaatcgccgcacagcctgccgcggcgtgtacccacaccgtactcataatccgctgcctttcaacaatgcccgcatccatgccaagccggcagcataacaacatcctcccaatgtcaagcagaccacaccgcgtggcgatccaagcaagaacgccaatggtctagctcccagaagctcgcccaatgccacagtgacggccggaagcgcgctcagcagccccacagtggctttaggaacggcacatgcttgcgatcgcaggttctgcatcagcctcatctgccggtaagcagtcaataccgcttccagacatggcaccgcttggcaaccgagctcatcgctcaaaaccgctgcggcggcgaccccgcgtgcagcttcaagtacctgcgctggtgattcgtcgggcagacgccgctgttcgaacaccgttatgagccgttccacagtaatgcgatgagtggcgaagcgtctgctggattgttcctcgaatgcttcaaccaatgtgccgccacctcgcaatcgcgcgatggcggacgtaatcacctgcgcaacgcccacgcgaggtgagtcggcatatcgaggttcgtttatggctgcggaatcgaccgcgcgcccgcggtaagccagccggtacagcctcccggacttgttccccggccatatcagcacggcgagcgccaccagaacagcacaccacatcatcacccaccaccactcggcctgggaacgatgccccatcgttcaatgaagtgcccccattcggcggcataccgaggaggatggcagccattccataccgccagcggtgttcctgccagttcaccatgtgctacgcgcagttcgccgatctgcgtgatacgccgctgtccgttcactcgctccaaatgcaccaccgcgtcgaaagcgcctgccgccagcatggtcaacgcctgcggactgactccggcgagtaatccaagcgaaatcagcctggacggtactcggttcacgccgtccgcatgcacggtggtcatgccaccgtgatgaccagaattgaacgcgcgcaataggtcgacgatttccgcgccacggcattcgcccagcaccacgcggtcggggcgcattcgcaacgtcgctttgaccaagtccgccaggcttatggctccgacgccctccacattcgcctcgcgtgttaccaacgagacatgatcgtcgcgtcccagttctcccagttcacgaacttcctctacggtgacgatgcgctcgttcacgtcgcattgcgccagcagcgccttgagcaaggtggtcttgcccacgcctgttccgccggtaatcagcactgtggcatgtttgcgcaccaatcccacgaacgtcggcagccaagcagccgggaatacgcctaatttgctcaggtgctgtagcgatgccatggttcggtcagggaatcgtatggaaatcgcggcaccttgtggcaccaatggggcaatcaccgcatgcacgcggatgccatccggactggcggcatccgctatcgggcaggcatcatccagtctgcgcccgagctgcgcgcacagttggacggcgtattctcgaactacttgcggcgaacggaacggcacatgcaatactgtttcgcgcatgccattgccgcggtccgcccaaacgcggccatcgcaggtcaccgccaaatcggtaacctgcgggtcggatgccacatcattcaatagaccgaagaacacagttctgggcactgcgccgggctcatcagcccgagtgattacggcagccatagcatcactggtccttgtgagaagttcccgaaaccgggcgaatggcctgttctacgagatcggcaagcaagttcatggctttgcgactgcctttggtcaccgatctgatgccgaggccttccagtacgtctccgcacagattgacacttggcttgacaggacccaataccgtggcagtcaagtagtcctgcgcctcgccaatacccacgtgccctctcccacgtggagcgccacgtggttccacgccgacgatatgtggcgcttcacagccccaagaatccagtctggaccggtgcgctttggccctagccaatcccattaccgacaattccgcggcaatcacctgcatgccactgcgtaaatcgggcacggtctcaatgagtcccccttgcccggcgtccacgatgacgacgtcattcgcttccgccaaagcccggatggccgcttgaacttcccaccagtcaggctggcgcgcgctccaaggatcgtagggaagtactcgcacaccctcccacgtcatcagctcatgattcatcgcctcaccctcgatacggccgaggggcgcgtcgacttggctgaaccgtaagcccggctctcgttctacaccaagtagcagatcaaggcatccggccacgaaatcagcgtctatgagaacgcagctgtgttcacgtctcgccaatgtccatgcaagcatggaagccatgacactcaaccccacgcctccatggcctgacgtcatcgtcacaatgttatggaagctggtgtctgtagttagggcgagtgccggagcctcgcccgatctctgccgttcgcatgaggccaacggcctgggcggcggagtgtagtagcgatgcgctggaatcggcgcatcgtccgtgggcagcggaatgcccggaggtgctaccgctggcgaggtgatcctacgcgccacgcggggtgaggtattgctattcataagccgattgaaacgtgtccgagttcaatgctcaacacgaatcgaccattgtggttctagcttgccgagttatccacaccccggcatgtcgtccacgacaaatgtggataaccacggtgctgtttcacgcccatctcatgcagaaaaggccctgacctcacatgcacagtcagggccttcattttcacgacgattccttatgcggtaatctacatttcttgcttacttatcgaggttcttaatgccgtcttccatagcatccaactgagcatcggtgaccttggccggcttcttcttgccgaacttggccttgagcagaccgatgatggtcggggcgagcgagaccagcagaatcagcacgatcaccagctcgaagtggtcctgtactgccggaatgttaccgaagaagtagcccagcagcgtgaacaacgtggaccagcacaggccgccgagcactgagaacggcgtgaaacggctccaacgcataccggaaataccggagatgaacggcatgaacgtacgaatgaacgggaagaaacggcccaggaacacggccagcgggccccacttctcaatcatgtgctcggttttggccaaacgctccggggtcaaggccttcaccttgccggactggatgatgcgacggccgaagaaatgaccaatgaagtaattgcactggtcgccgataatcggggcgcaccagaccaccggcagcagccagaacagcggcagcgcggccttgccggtcgcggcatcgggagcggcgaacacaccggcggcgaacagcagggagtcgcccggcaggaatgggaagaacaccacacccgtttcgataaatacgatgaggaagatgaagccgagggtcggcgccacgcccatggcaatccaaccggcaatcgcggcacgcggatccttcagcagttcgaggatgaaattaacgaagcccatgtgattcctatgagtcctatacgtctatatgtgtgaacaatctgtccaatgaaccagacattcgtctgaaaaccgtcaaccactctaccagtcgccccgatacaagagggggccaccggaacctcatagcagccattactgccatcttctttacaaatatggcgtgcttcgctggtatatcgtcaacacattccaccgctcatgaggagaactgcatgcgcggtgatgtaatcaattactcaccaagacgctggcgcacgaaaccgtccagcgcggccgcatcgataccgtcatacgattcgatggacgcgaactggcccaggccggaagtatccgtgcgaatccagccagtctgcgcgatcagagtcgcgcccgatgccgcaccggcctgaagtccaaccgaggaatcctcgagcaccacgcacttggccatgtcttcacgggcgatgccaagcttgtcggctgcggccagatagggcgcagggttcggcttgtgttcgtacggatcgtcgccacagacgtagccggcgaacagtccctcggactgcttcatgatgttctccgccatacggcgcggcgacgtggtgaccagcatggacggaatgccggcctccttgagcgagtgcagcacgtccaatacgccgggaatccacggcagacgttcgacctccgccttgaacacataatccttgagctgtttgtcgatttcgggaacgctcaatgtgcagccatgcgcaatcatgacctctgccacgtgtggcaccggagtgccggagcactcccaaccgaggtcctcgttccactcgccgccattgttgtgcgcgatctcgatttcaccgtcatgccaaagcggctccgaatcgataagcgttccgtccaaatcccaaaacacggccttgagcagcatggttacctccgtacgtcgcagtgaatcctcaactattcgtattcgatatacctatctcaccaactccgcacgacagccgaacagcaaatcaccaaccccacaggaccatggatttggaatcggcgggggtggagtcggattcgcgcgtggtgtcggcagcggtatcgcggccgggcagttcgcgggtttcgcggcggatggcgttgcgccagaggcgggcgcggttggagcgttgtacctccacgatattgccgtcacggcctgcggcgaaaacgctctcctggtcgccggtttgcatgcgtttgacttcgcggcgcagttggcgattctcttcttcgagggccaaaatgcgtgcgatgccggaaagattgatgccctcatcctgacttaggcgctgagctcgagtcaggcgggcgatgtcgcgcaggcagtagcggcgtgcgccgccatcggtgcgctgcggacggaccagacccagccggtcgtactggcggagggtctgggggtggatgttgcccagttcggctgcctggccgacggtgaagatgggcagttcgatgtcgaagccgacgtcatcggctccgtcgagatcggccctgcccatcaccagcgcggttgcgcacatcgcgtacaactgcttcatttggttggctaaccgcgccattgttcacctcctgattacaggctgagatagtcgccggctttttcgtcgaattctttggcggcgtgcttgacggccaaacccggcttggcggggaccatgatctgcacgcggccgatcaggtcgcccggctggttgccgcgctggacgccaagtcccgcgagcttgacctcggcaccggagctggagcctgccggcaccttgaaggtgacgggattgccgtcgatatccttggcctcgaccttgccaccggccacggcctggcccacagttacgggcaggtccatgacgatgtcgtggccgcgcatcgagaacgcggcatcgggcttgacggtgacgtgcaggtacaaatcgccggccttgccgccgttgatgcccggcttgcccttgccggcaagcttgattttctggccgtccttgacgcccgcaggcacgtgggccttgaacttcttgccgtccacggacagggacacggtagcgcccttgaccgcctgacgcagggtcaggctgatcttggagttgcggtcctcgccgttttcggggcgcggggcctcctcatagccatagccgccggcattgccgtacggcgattggccgtagccgccatacgactggccgccctgacctgcagcaccgccgaacatcgagaagatgtcgttgatgttgttggggccgccgcccgaagtggagaagcggatacgcgaaccgttgccaccggcaccctggccaaacatggagccgaagatatcagagaaaccggaagcgtcgaagccgccggcaccggaaccgcctgcgaagcgggcgccgcccatgccgaactggcgaatcgcgtcgtacttttggcgatcttccttcttgctcagcacgtcgtaggcttcggagatgtccttgaacttctcctcggcttccttggtcttgttgacgtcagggtggtacttgcgggcgagcttgcggtacgcctttttgatgtcgtcgtccgaagcgtccttggagacaccaaggactttgtagaagtctttactgagccattcgttttcagccattcatgtctcctttcttgaaaagtctttatggttggctcccgctggatgaacagcccagtgggctgttcatagcagtgcgcaattgcgcacgtcgcataaaacatcgggagctgtcgaacgaagcgagactgagggtggtttatattcagtgtttgaccaccctcagtcagccttcggctgccagctcccgccagcgggagccaaggtaatgtcagctcgttaacgagctggccgttatcagttttgcggggaggctactactactcgggcggcgcggattacgcggtcgccgatgcggtaaccggcctcaaccacggtgtcaaccgtttccttttcggcattcgcgtccggcttgtgcaggatcgcgtcatgcttggtggggtcgaagtcctcgcccttttcgccgaacttctcgacgccgaacttctcgaaggccttgtcgatcttggtggcaacggccttgaacgagtcgtccatctcgctgtgttcgcgaatgcggtcgatgtcgtcgagggcgggcagcagcgcggtcagcacgtcgatgatgccgtgctggcggaagcgctcctgctccttctgcgtgcgattgcggtagttgatgaactccgcacgttcgcgctgcagggcttcgaggtagtctgcggcttccttcttggccttgccgaggggggtgagggtgtcttcggaatcggactggccttcgccagtcttctctccggcatccgacttctctccctcagctgcggcaggagccgcgtcggctccttcattggaaggagcctgggcagccgaatcctgcgcagagtcggactcggcggaggcgtcagcccctgaagaggcctgagcggcctggccggcagcctcagcatctgagggatccggcaggtcgttcaggtagtcgtccttgttgaattcggacatcacttgttgtccttgtcgtcatcgtcgtccacgacctcggcctcgacggtgtcgtcgtcggaaccggaggcggagccagcggaagcgccggcaccgtcagcgccagccgcaccggcaccagccgcggcaccctcggcaccctgctgggcgtagaggacctggccgatcttctgggcggcggtcatcagctcggtctgagcagtcttgaccttctcggtgtcgtcacccttcagggcttccttcagagcgttgaccttgtcggtgacttccttgacgatgtcgtcggagagcttgtccttgttgtcgttgacgagcttctcggtggagtaggcgaaggcctcagcctggttgcgggtctcggcgtcttccttgcgctgcttatcctcagcctcgtgagcctcggcttccttgaccatgcggtcgatctcgtccttcggcaggccggaaccaccggtgatggtcatggactgctccttgccggtgcccttgtccttagcggacacgtgcacgatgccgttggcgtcgatgtcgaaggtgacctcgatctgcgggacgccacgcggagccggagcgatgccggtcagctcgaaggtgcccagcggcttgttgtcgcgagcgaactcacgttcaccctggtagacctgaatcagcacggacggctggttgtcttcagcggtggagaagacctcggagcgcttggtcgggatggcggtgttgcgatcgatgagcttggtcatgatgccacccttggtctcgataccgagggacagaggggtcacgtcgataagcaggacgtccttacggtcgcccttgatgacgccggactgcacggcggcaccgacagccacaacctcatccgggttcacggactggttcgcttccttaccaccggtgagttccttgaccaggtccttgacggcgggcatacgggtggaaccaccgacgagcaccacgtggtcgatgtcgctcacggagatgccggcatcgtgcagcacgttgttgaacggcgtgcggcagcggcccagcaggtcggaggtcatttcctcgaagtgcgcacgggtcagggtctcatccaggtgcaccggggtgccgtcgggggtcatggccaggtactgcatggagatgctggtggaagaggaggaggagagttccttcttcgcctgctcggcggcttccttcaggcgctgcagcgcaatcttgtccttggacaggtcgacgccgtacttgttcttgacttcggaaaccagccaatcgatgatcttctgatcccagtcatcgccaccgaggtggttgtcgccgttggtggcctgaacctgaatggtggagaaaccgtcgtcatccttgccaatctccagcagggagacatcgaaagtgccgccgccgaggtcgaagaccaggatacgctcgtcttccttgcccttctcaaggccgtaggccagagcggctgcggtcggctcgttgatgatacgcaggacgttcaggccggcgatcttgccggcgtccttggtggcctgacgctgggcatcgttgaagtatgccgggcaggtgatgacggcgtcggtgacgggctcgccgaggtatgcctcggcgtccctcttcagcttcatcaggatctgcgcggaaatctcctgcggggtccacttcttgccgtcgatgtcgacggtcca

SEQ ID NO: 1081 - DNA, 47036 bp, Unknown
  R13_10m  MAG No. k141_6826
cataggcctgtgccttggtgacggcaacgattccgatggccacgccgacgccgacccagaagatgcgtttgaacatcactcccccttctcggcggtgtcgttgacggtggttttcgcggcgttcttcgcaaggaaggactgacccgtggttttcagcgcgtagaaggtggaagcgatcttgatgatgggcttaccgaggaaagagccatacagatcagtcaacgcaccaacgttgttggcggtggtggaagccgcggcggaaatcttgttcacgtcttcaagcgacttgttgacctgcttgacggtggtcacgccttcgtccagcgcggggatggcgtgttcgccggactcccggaccgtctgcgatatctgatcaaacatcttgcccagcctgatcagcggatagatcatgaaaccggccaatactgcgaacgcgatggccgcgatcaggccagcgatctctccgactcccattgtttcctccttgcggtcacacttactcgcctaagggtagcactccttccctatttcttggcataccattgcacgcgcagggcgaaaaccgtgcgcgtggatgcatgcggctataggcgaaaggtgtcctgctgacgctttcgtttgcggcgtgccgccgtggaccgtacgtgctattcgatatgtattgcttgctatttgctacttgccgtacgaaacgatggtcacggcctcgccgaacggcttgtcggtgtcgaagtcgagcacggttaccgaaccattggccgggcgttcgttcagatcgaggtcagggccgccgaaccggtggccgaggctaagcagtgtgttgccatgcgaaatctgcagcacatcgtcgccatccttgagattcgggttgtcggcgataagacggaacgcgccttcgacgcgcgtccaatattcctcatcggattccgcatcgtggaagggatcggcttccttgagaaaatcacgcgaggcccccaacccgaacttctcgacgatttggttgtaggttttggcgccgtgaggcgctcccgcggcgtaccaggccatggccatgtcaagtccctcgtagtagccgtagaactgctcgcggaagtgcatgtccgtcacgagtgcggggcgcgggttacccgcggcttcgttgatgtcgagaattttctcggccgtctgccgggcacgcgtggtgtccgaacagtaggcggcggtgaacgtcaatcctttcagtcgctcaccggccttgacggcatcagcgacgcccgactcggtcagcggcgaattcgaccatccctgcagacggttgtatcggttgaaataggtctgtccgtgacggaccaaatgcagatgaagaatcatggttccgattatgtcaccattccggcggtttcggtgcgggctgccggaagtcataagtcataacggcataggtcactacctgagatatgcgtaatccgggtagtatacctgacgattcctgagagtacacttagggtactatgagcataacctcgaaacctgcaccatctcaatcgtctgagcctgcccatttcaggggtatcgatggactgcgcgctctggcgattcttggagtcatagcattccacacccgcccgtcgctattgcagggcggattcattggcgtgacgatgtttttcgttatcaccggttttcttgccacacgttcagtactgaacatggtggaccgcaccgggtcctttggatatggccgatatctgatccgccgcattactcgtttatggccggtgatgctggcgaccattgccgtggtgccttggctcacttggatgttcgctcccagcctgttgcagaaagtggtttccgattcgctgccgagcgccttgttcgtcagcaattgggtgtacatcttccgcaaggtgccgtatttcgaggcggccggattgccttctcctctgacccatctgtggttcttgggcgtgacgatgcagttctatctgatttggccgttgctgatggtggtgctcggcaaaatcaccaagtccaaatgggtgcgctccatggcgattcttgtcatcatggctgcttccaccgccgccatggtgctgctgtttgacccggccaatacctcccgcgtgtattacggtaccgatactcgtctcgccgagctggccgccggcgcgctgttggctatctggattgcgccttcctcgcgaggtacggaagttgcggaagctggagcggcttcgcaaacagtgcagatcggacgtcaggccggcgacaagacgggcgcccgtctcactatcgtctgcaatgttcttggcaccgcggctttggcggcactgctggccggattctggttcgccaacgggtatctgtcgtacatgtaccaaggcgggtacctgattaccgcgttcatatcgttgtgcgccttggcctgtgccgtgaacaatgactcaatctggtcgcgcgtgctgggttgcgctcccctacgctatatcgggtcgcgatcgttctcgctgtacgtcatgcattatccgctgctgcagttcatgaacccggcgacacgaacgcaggcgttgccgtggtggggttgggttcttgaggccatcgtggtgttggcggcgtcggaagccttctaccagctggtcgaggcggcccgtaaatcggtgcagatgcctcgcagccaacatgccaagccgctaccgaaagccggctgccagctgcgcccgggcgcgtgggtcatgtcggttatcggattggtgaccgttgtggtgctgacgtgggcaccggtggattggaatggcatcgctcaagcgcgagccattcagctgcgccccgaactcgcggcacccgccaagccggtcaagaaaccggcgaagcccgagcccgagtcttctgccacgaatgccgcgaacggcgaaaccaataccgctgacgcgaataagaacggttcggattctcagccgcccaccatcaaaccgattgcggaaaaggtgccaaacaatcttgacatttcgaagtacgcctatgatccggcaacggaaagctgcaacgcggatatgatgatggtcggcgattcagtgacgtcgggtacttcggacgccatccaggccgcattcccgaacgcttttatcgatggcctgccgaaccgtcagatgccgcaggcggtggatgtgtatcagcaggacaccgctgccggccacagtggcagtgtggtggtgtttggcctcggcacgaacggcgtgatttcgaatgagcaggaagtgcaacagctcattgacctgaccggcggcaagccgacatacttcatcaccatccgtatgccatacccgtggcaggagaacaacaacaatacgatgctgcgtgaggccgccaagaagaacaagaacgtgggcatcatcgattggcatgggtatagcgaaggtcatagcgaatacctcaacgatgacggcattcatccgaatatgaccggtgcctatgcgtacgcgacgatgattcgtcaggcggtgtgcggccagtaatcgccctacaacgcaggaaccccgcggcttctcgaaagaagcgcggggttcgagcggtatgtcctggatttgttgaccagagggcccggatcagcgggcgtagaattcgaccacgtactggatgttgacctgcaccgggatctcctcgacctccggcttacgggtcacagtggccttcagggacggcaggttcacgtcgaggtagccggggaccgcaggcagcacgtcacggtgcacgccttcggcggcgatctggaacggaaccatggtctggctcttggccttcacctgaatggtctggccgggcttgacgcggtaggacgggcggtccacgatgttgccgtcaacgaggatgtgacggtgcaccacgaactgacgggcctgggcggtggtgcgggcgaagccggcacgcagcaccaggttgtcgagacgggtctcgaggtcggtcagcatggcgttaccggtctggccggcagtgcgggtggccttctcgtaagcggcgcgaagctgcttctcggagataccgtactgagcgcgcagacgctgcttttcgcgcatacgcaccgcgtaatcggactcggtgcggcggcggtcacggccgtgctcgccaggagcgtacggacgcttttcgaagatgcgctgagccttgggggtcagtgcgatgccgagggcgcgagacagacgcacctgacggcgagaacgctgaacgttcgtcattggattaatccttctgtcgttatctgaacggaacgcttgccttgcatatgcctggcaagcgctgagccgggcctccccagcgcttcgtcgtgaacgaacacgaacgggttggttttcttgcgatcacctaccgccgacccgctgatgggctatgactccagacggtatctacctgttggcagacaccagcagaccatattacaccgaggctatggacagcactccggcgtccatgcgatacacccggtctgcgtattcgagtgcatcgggatcatgggtgaccatgagaatcgccgtgccgttgttggcttggtctctgagcagacgcattacgatgtcggtgctctcctggtcgaggtcgccggtcggctcgtcggcgatgagcaggctcggctggttcatcagcgcgcgggcgatggagacgcgccgcatttcaccgccggacagctcgcgcgggtagctgtctgccagatcggcgacaccaagctgggtgagcagcatgcgagctcgggtggcgaacaggtccggacggctcgcagccgtgtttgacggcgtgttttcccggtctgtgattggcgcaatgacatccggcatgaacaggtcggcggctgcttcatcattggtggcagcggcttgtgccacggcatcggtcgacgcaacagcgtccacctgagcaacggcatccgttgcttctgcgttttgggcaaacggcagcggctccggaaacatcgttgcgggcagaatcacgttgtcgagcacggtcaggttgccgagcagggtctggctttgggtcacgaatccgatggtgcgattcctcagcacggacagtgctttatcgcccaagtcggccacattgcgtccagccacgctcacggttcccgaggtcgggcgaatcagcccggcgaccatgttgatcagcgtgcttttgccgttgcccgaccggccgacgatggcgatgaattcgccggcatcgacggtgaggttcacgtggctgacggcgtcgaacggcgtgccgcggcggacgaactggcgggtcaggtccgtcaaggtcagcagatggtccggggagggcgtctcggttacgtgcggcgaatccggcgcagtcggcgcgttcggctgagctggcgtggtcggctggagcttggtcggctcaaccgtggtcagccgagtcggcgtagttgtctcagtcatatcactccccctctcgcagggtcaggtaggcttcgggccggccgagacgccacatggtggccagcgaaccgatgatgccgatgaccgtagagcacacaatggtcacggcaatgaatccgatcaccgcaaccgggctggcttgcagatacggcaattgaagttgtttgccgatcagcgaactgaatgggaaaatcaccaggctggccgcgccgacgccgattacgccaccgatcagaccgatgatggcggattccttcagaatgatggcattcaacatgccgcgcgtggcgcccatgatgcgcagggacgcgaattcgcgtttgcgttcgttcaccgacgaggcgaatacggcgagcagcacaatcacgcccattacccagatcaccgccacgaaaatcttgaggtaggtgacaagcgcggtcagcgaagttctggtgttggcggtgatgccgccggggtatacgtaccccaaatcggcgaaccgggagtcaagacgcttgatgttttcagccacggtctgcgcttcgtaaccccgctgcgtcttgatcatcacggtggagacggcttcgcctgcatattcggcgggcatgacctgcttggagaccttggccgaggcggcgaccatatcaggcacggtgttttggttgatgaacaccgaattgtcgaggctggtgccggtgttggcgagctgggcgacgaccggccacttatggccgtagagttcgatggtgccgtcggtggacacgttgacgtttgcgccggcaatcatctgaccgtcttcaagggggccttcgaactgggatgcgacccatggttcgatgacgaagtcagtgtccgggtcgtaaccgatgatctgcagcttttcggcacagcaggcggcggccagcgacgatatataggtctgttcggtggcctgtgcgatgccgtcggcctgcatgacctcgtcggcgatgtctttggtgaaatagaaagtgctgggattgccgctggtgagcagcgcttcagccttctgcgcggtgttttgcggcacgaccataaggtcggcgcccaggcgcttctccatactggtcatgccggtgttgaggttcatggtcagcatggtgccgccgaagaacgtcagcgcgaggatggtgacgacggcgagcagtgcgccggtgcggaacggcttgcgtttgaggttttcaatcggaaggccgcgcaatgcgatatgggatggcacgatgagtccttatgttgcttatagtgcggttgcaataagcgagaccggagtccagcgttcggaatggctgggctccggccgtctgctcgatcagttgcgcttggcggcgcgagagtcgagccagatggcgatggccgcgaacacgatggtgagcacgccgagcacgatgagcgtgggcagcataaccatgcggcagtgcatcatcgcgcccttgcagatgccgatcaggaaggtgggtacggcgagtagtagcagggcgttggctgcggcggcgatattgaggccgatgcgaatctgcggggcgacgaacaaagccacgacgccaaacacgaggatgacgacgccgatgccggtggccgcctgctgcgagtagtggcaggcacccggcatgtcatggccggtgcaggcgtgcgcaaaggtctggagcgcgatggtgatcagcgcgccgaacagaatattgggcacggatgcaaacagcttgttcttcataactactttttcctctcccctgttcccagggctcgtaggcgcaacctccgcattatgcccagatagtgatgaagaacacaagtcttgttttttgtgaatttatttggtatataactcagcccctcgtcagaggggccaatctatctacaacttctcaataggtgctacgcggagcatgaggcgtttgacgccggcggagccgaagtccacggtgattaccgaattgcggcccttgtcttgcgcgtcggtgaccttgccgagaccgtactggtcgtggctgatcatgtcgcccacggcgaagtcggcgatattcaggccattgtccttggtgagcttcgagctgggcacggcagagccggtcgaaccggatttcggtgtggtgcggcgcgtggtgaccttgccgccacgggtgccgccatatgaaccagatgaagaaccggaacgggaacgcgacccgtaagacgaccccgaacgggagcgagacccgtaggaggacgagccggagcgggaatcatatgatgatgaacgggaaccgtacgaagaacctgaacgggaaccatacgacgaggagccggaacccgagccatacgacgacccataccgcgaccgcgacccataggacgaacccgaaccggacgaaccacgcgagccgaacgtcgacgacccgccaaacgtggcaccgccgaaatcgtcatcatcccagccgcccaaatcgtcggcgaatccatcggtctcccagttggcgcgcatacgctccacgccggcttcacggcgtttccaatcaatcagcgaatccggaatttcgtcgaggaattggctgggcatcatatcggcggcctggccccactgggagcggacggcggcgcgcgtgacatacagtctctgcttggcacgcgtgatgcccacataggcgagtcggcgttcctcctgcagttcagtggtgtcttccatcgaacgcgaatgcgggaaggtgccctgttccatgccggtcaggaacaccaccgggtattcgaggcccttggcggtgtgcaaggtcatgagcgtcaccttgccggagtcctccgcctcaccgggcagctggtcggagtcggccacgagcgcagtggtctccaggaatgcggataacgtggcgtcaggcgtgttctgttcgaattcggctgcggtggactgcagctgggagaggttctccagacgggaggcgtcctgcggatccacggatttctcaagttcggcccttaagcccgacttctccaatacttcggccacgatctcgctgggcttggagtcgtgcgcgtgcgtgaactgcgagagcgcgcccatcagatcgcggaatgctcgtagcgaggtggcggtgcgggtcggcacctcgatctcatccaagtgcatgagtgcgtagaagaagctggtgccatgctcgcgcgcgtaggcgagcagcacgccttcggcgcggtcgccaagcccgcgcttgggcacgttgagaatacgacgtagattcacatcgtcgtccggattgacgagcgcctgcaaataggccagcgcatccttgatttcgcgacgttcgtagaacttggtgccgccgacgagctgatacggctgattcgtgttgatcagcgcctcttcgagcgagcgggattgggcgttggcgcggtacatgatcgccatgtcggagtaggagatgccctcttcggcgtgcaggcgcgcgatttcggtggccacccactgggcctcctgctgggcgttgtccgccgcgtagccgacgatcggctcgcccttgccgagcgcggtccacagtttcttgggcttgcggccctcgttgttgctgatcaccgcgttggccgcgtccagaatggtctgcgtcgaacgatagttctgttcgagcatgatggtcttggcgttcgggaagtcctgctcgaagtcctggatgttgcggatgtcggcgccacggaacgcgtagatggactggtcggaatcgcccaccacggtgatccaggcggggccggacttgccggcgttcggcgcgcccgggatggccttctcccccgtgtccacgccggccagctcgcgcacaagcacgtactgggcgtggttggtgtcctgatactcgtcgacgagaatgtaacggaagcggtgatggtagtactcggcgacggccgggtcggtgcgcagcaactcgaccgtgcggccgatcagatcgtcgaagtcgacggcgttggccagggccaagcgatgctcgtattcggcgtagatcaccgcatagatggcttcaaggtcgcccaccgtgccgaactggtagccgcgctggccaggcgtgaagtcgggcgcgtgaacggcgaggttttccttccaaccggtcagattgttcttgaggtcggagatatggccgaggatcgagcgtggagtgtagcgcttgatgtcgaggttgaattcggtggcgatgattttgacgagtcgctcggagtcggcggaatcataaatggagaagccggacttgagcccgatggacttgccgtcgcgcctcagaatgcgcacgcaggcggaatggaaggtggagacccacatgcgctgggccaccgggccgatcagcgagccgagtcgttcgcgcatttcggcggcggccttgttggtgaaggtgatggccagaatctggctcggccatgcgccgaactggctcaagatccaggcgatgcggcgggtcagcacacgggttttgccggagccggcaccggcgccgatcagtagcgcctgaccgcggtattgcacggcttccgcctgctgcgggttcagatcgcctacgagttcctgcgcgctgcgtgcgatgacttccggctcgtcgtacactgttgcctccctttgaatcgcgacattcatgtttaccacatgcacgggtcagcgcaggacaacgtacacttacaagtatccatatcattcactgacatacagcaatgggaggtctaatgcaggaacttgaggagcgaatccagagcgagggaacggtgaaggcgggtgatgtgctcaaggtggacgcgtttctgaaccaccagtgcgacgtgcgtctgttcgaccgcatgggttcggcatgggccgctcatttcgccggcaagcacatcaccaagattctgaccatcgaggcgtccggcatcggcattgcgtgtgtggcggcccagcatttcggcaatgtgccggtggtgttcgccaagaaggcgcagtccatcaaccttgacggcgaccagtacaccaccacggtctattccttcaccaagcagaaggagttcccggtgatcgtggccaagaagtatctgaacgccggcgaccatgtgctgcttattgacgattttctggccaacggcaaggcgttgcgcggtctgattgacctgtgcgaggcggccggtgtcacggtcgagggcattggcatcgccgtggagaagggcttccagggcggcggtgacgcgctgcgtgccgaaggctacgatgtggattcgctggccatcgtcgagtccatgaatcccgagaccggcgaaatcacatttaggcactgagcacattgactgctcccgccagcgggagcaacagagagaagaaaagaatcatgtcagagaagaaaaccaagaattccgtatcctttgaggcgctgtcttcgctgaacgcgccagtatccttctggaagggcattccgttcggcctgcagcatgtgatggccatgttcgtggcgaacctcgccccgatcttcatcgtcgcctcggccgcgaaaatgaccccggcccaatcggccaccatcatccaggccggccttctggtggcgggcctgggcacctgcctgcaactgtacggcgcgtggctcatcggctcgcgtctgccgatggtcaccggcatctccttcacctacgtggcggccgccgtggcgatctgcgcagacaagggctatggcgcagtggccggcgcggtaatggtcggtggcctgctggaactcgtgctgggtttgacggccaagtattggcgtcggttcgtgccgcccatcgtctccgccatcgtggtcacgtcgatcggcttctcgctgcttaacgtgggtgccacgagcttcggcggcggcagcggagccaaggacttcggaagctggcagaacctgacgctcgggctaatatctttggtcgcctgcctggcgttccagctgttgatgaagggcacggccaagcagctgtccgtgctgttcggcctggtggtcggctatgtggcggccatctgcatgggcaaggtcgatttctccggtttccagaacctcgctattgtgtccgtgccgcagttcatgccgttcaagcctgagttcgactggggttcgatcatctccatcggcctgctctacgtcgtctcctcggtcgaggtgctgggtgacaccgccgcgctgaccaaggtgggcctgaaccgtacgcccaccgaacgcgagaccgcgggcgccatcgccggcgacggcctgatctccaccgtatccggcctgttcggatgcctgccgctgacctcgttcgcacagaacatcggattggtggccatgaccaaggtcgtcaaccgcaaggtgattctctccggcggactgattctggtgctggcgagcttcgtgccggccatcgccgaggtgttcaactcgctgccgcaggcggtgctcggcggctgcacgatcatgatgttcggcaacatcattctttcgggcttccagatgatcgccgaagcgggcttcacgcagcgcaacatcacgattgcggcgctttcgctgaccatcggcatcggcttcacccaggtgagcgacatcttcgcgcagttcccggcactgttccaacaaatcttcgcctcgaactgcatcgccgtgtcgttcgtggtggccgtaatcctgaacgccgtgctgcccagcgaggagcacttcctctccgcgcccaaggaggcaccggccgcggacgccgagtgataacaacgcgacatatcagctgcgcataatcacatgctgatgccctatcgtcttgcaggatgatagggcatcattgattttgagagagactacaagttgaaccatgagttcgagccggtggcgtgtcgatcaatcgacatcttcccattcgaggatgtctccgggttggcagtcgagtgccttgcagatggcgtccaatgtggtgaagcggacggctttggcacgtccgttcttcagaatggacacgttggcgggcgtgatgccaatttgttcggcgagctcgccgacgccaatcttgcgtttggccatcatgacgtcgagattgatgcgaatcgtcatctcaaatcacctgctcaggttcgcgcccgatccggacaaggagaacagtttccatacggccacgaacgccgcttcgatgcagagcaggaacagcacgcccataatgagatatgaccagtgcatcgacgtctgtctcgggcagaggccggccagcgcgccgctcaatcccggtacggcgaatagttggccccataggcaggccagccagaccagaatcacgatggctttcaacgcgagcaacacccatcggttcatgtagtttttcatagcccggtcctttcaggtgccgacgtttttggcgacaccgcgaacatcgatatgactatatcgaaaaacgatataccttgcaaggcgtattgcgtcaaccggcattggtcgctcatatgcatataggcttcggcagactgtcagcagaccgtcagctcaacggaacgaacgccatatgagccacccattcgcgcacgagcgtgatgacggcttcgggttggtcgatgtgcgcgttgtgaccggcattatccagagtcacgaaggtggcgttgggatagtgcggcaacagggcttgctggtcttcgtatccgacgatctggtcttgcttgccggtgacgatgagcaccggaccagcatatgtgccgagcatttcctcgggattatcggccagccaataacgctgatccagtcgttcgcatgccgcacggtcgcacaacgccacgccgggcaggatgaaccgttggtagcgccgccacgcgtcgaatgactggttgacgcccatggtaatgaaatcgaacacctgttcctgtggcaaggagtgcgtcagcttgggattgggctgtgcaaccacatgttcggccacatgccggccggtatgctgcgggtccacgaccggcgcgatcaatgccataccggccactcggcgaggttcgcgcgccaatacttcgcggacaagcgcaccgcccatcgagttgccgaccatggcgaatggagccgctttaccgacaaggccgtcaatggccgtttgcagccaatccgccatttccggcagcccgcaggcatgctcgggcaatgccggcgtacggccgaaaccgggcagatccagatatatacggcgaattgaatcattgccgtcaaacgccttgtcgagcatcatcagcgaacgatggtccacacccatgccatgcacgaacacgacgggcaatccatcatcattgccctcaatcgcgcagtacggctgcaattgtgccatgtgtgcctctccttcaacccggtacaaatcgcctttcacacaatagcggcagcagctcccctggtgtcagagcaatcccgaccgccattctcggtttcgaggggctgatttcgtggtttggggacatccacttccgtttcaaggggctggtcattggccaaaacccaagtacgaatagcttcatgccaacgtcatttcgccgttttggagctgtcgctactcggccatcagcccctcgaaacggaagtggatgtctcggaacgagcaaatcagccccttgaaacgcaaatagacgattgcgaatcgacttatcagctgcgtcgaacttgcaatagagatgtcggtgtatcattccccggtctgattgcgcggatgtcaggaagcgtgaagaattgtcacaaagtcgcgtgatggcgcagccgccgttcaggtggatatgccacgctgtcatgaggacggccgagccggaacacggcaaatctcgcatgctgcataggccagccggtcacggtcagccatgacaccgaaatattggaggcgcaatgggacaacaggtgcggtgcggcagacgccgctcccatggcgcgggcgcgctgattgcagccgtcatacttgttgttgcggcgctgatcgcggcatggacgctgctgccacggctattcacgcctcacgagaccgcgcgcacggccgaggaagcatattgcgcggcggtgtcgcccgacggagcccgccgcaccttgacgcctgatcaggcgcagaacgcggcgctgattgcgaacatcgccgtcacgcgcggactgccggatcacgcggcgacggtggccatcgccacggccatgcaggagtcgaggctgacgaatctggactacggcgacttggattcgctcggcctgttccaacagcggcccagccaaggctggggcacggcggagcaggtgtccgacatgacctatgcgacaaacatcttctacgaccatctgctgcaggtgccggattgggagacgattccggtggaggacgccgcgcaggaggtgcagcgctcaggctacccggaactatatgccacatgggatgcgatggcacgcgcttgggcctcggggctgaccggtgaacggtcggcggacgtcacgtgcgcgttggagccagcaatctcctcggacgcggacgggctggttgccgccataggcggtacactgccgaatgtcagtgtctcggttgcgcccccaaatggcaaaagcggcacgaacaacggcgctgcgaccaatacggccagcacaacgttgacgatcacactgccggacggcctgtccgccgacaaccgcactcgactttgctggcagacggcaggctggctggtcacgcatgcacgtcaatacggcattgacgcactgcacgcggacggcatgaattggaaccgcaaagccggtacatggaccggcaccgaaaccgccgagcagaccgtcaccgtcacgcttgcgtgatgtgacctataacgccgtcgcgaccacaaatccgactgactggagcctacgccgtcgatgccgcctgaggcacgatacggatatgatttttactcgttcgaatgagcccaatccacgacggcttcgatgttattgccatccgggtccagcacgaatgcggagtaatagccgggatggtacgggcgcggaccgggagcgccattgtctcggccgccggcggcgagcgcggctgcatggaacgcctgcacggcttgctgactgtcagccaggaacgcgatgtgtgtgaccggcgtgaccggcgaagcctccgcctccggcccgtcaatcggcgacacgtagaaatcggagtgcagggttccgtcatccacgccgaatccgagcgtgggctcatgatgcgccttgacgatatagccgagcggtgcgagcgcctgtttgtagaatgtgatgctacggtcgatgtctttcacgtgcaacgtcagatggtccagcatggtcttggtcaccctcccctggttcttgtattcgattgctgcttgcagtgtaagcccgaacgtttcccacagggccgcgcatggctatgatgagagcaatcgcacgtcgagttcgagacaatattcaaaacgaatccaaggcaatagggggaatgatgatgaccaaggcactgattgtggtggatatgcagccgacgttctgtgaaggcggcgaactgggagtcgaaggcggcaacgcggtcgccgagcggatcgccgattatgtgaacgcgcatcgcagcgagtacgcgtatatcgcaaccacgcaggactggcatatcgagccgggcgcgcactggtcggcggaaccggatttcgtggacacgtggccgaagcatggtgcggccggcacgccgaacgccgaattgcatccggcgatcaaggcgctgattatccatcatcatttcaagaagggccagtattcggcggcatattccggttttgagggcatcgaggacaataccgaccgtatccagacccgtgaggaggttgcggccgagcaatccgccggcaagacgctggccaatgcgctgaaggccgccggcgtgagtcgcgtggatgtggtgggcatcgccgaatcgcattgcgtcaaggacaccgcgctcgatgccaggaagttcggtttcgaggtcaccgtgttcgaggacctgaccgtaccggtcagcgaggagctcggtgtcgcggcccgcaaacagatgacggcggccggcatcacattggccgagtcccgctgatcaggccggatatacccagagcgaacgcacgaacacttccgtatattcaaggccgacactgccgcatagtcgcctagtcgatatgtgaagaaggcttttatggttacgatgctgctgacttcgatattccgcaacgcctcgtccgccgtgcatgaagtcgaaccgcatccgcaaggcaagcgggtcgcgttcatcccgacggcgagcgccgtggaaccgtgggggccggttcactcggcgttgagcaaacacgcgctgcaacgcctcggtttcgaggtggagcaactggatgtggaagatgtgccgagcgggtccgccgaacgcgtcacgcgtagcatcgccgaggccgactgcatctatgtgggcggcggcaacacgttctttctcctgcaggagttgcgccgcaccggtgccgaccgggccatcatcgagcaggtgcgcgccggcacgccgtacatcggcgagtccgcgggctcggtcatcacggcacctgacatcggctatatcaagctcatggaccgcacggacaaagcccccgatctcaccgattacgcaggattgggcttggctgatttccgcgtggtcccccaccatcatgcaacggccatgggccacgccgcacaacgcattctcgaccggtatggtgccgatctcagtctcaagcccctcaccaaccggcaggccctgcttgtcaaggatggcaaaacccggctgctgcgatgatgcgggtcgtcggcccgtcgcccattcggcatcaccgtggtgtgtccggcctgacatgcctatcgagcggcatcaatcacacagcaatgtggctgggaacctcgccgaacgtcaacacctgcatacatcagcacggcaaaatctgccgaaatcgcccggcgcacgagatgccagccggccccatccgtcacctcagtgccgtaccgggccaggcatggccttgagcaacgggatgaatccggcgcacagtaccagggccacgacggcgagtatctgccagtgggcggagccgagccagccgccccacgtgccgacggcaccgccgatcgcatacgcgaacctggcacggccgctaaatttggccaggtcaccaccgctcagcagcagttgtcgcgatacgatcacgccatgcgccagcaggccatagccgaggttgttgatgagccatccgacgcacaccgcggcaaactcgggaaccagtacggcggcaagggaaatcgccgtggcgattgccccgatggcggacacggcgcgcatgccgagttttgcggagagccgcatgtagacaaacgatccgatgatgctgcccacgccgccgaatgcgtagaccacggtcagcatatcgctgccgtaccgggagccgatgcccagcaacgcatagcttgcccacagcgacggaatcagcgcaagcagcagcgatgcgatcagcagtctgacccgggtcgagcgggtgaccggagtgcgctgcggcgcgtgtgacgtgtcggccgccgtggattcgtcggcggagccgtcgccgtcatcgccgcccgcaccatcgttgccgaatcccggcatgaactcgcgggtgcggaatcgcgtcagcgcgcaggcgaatgacagtgccgacgaggtgagcagcatggccatgatggaggcgttggccaaggccgatccggcaacctggcccagcaacgtaccggccacgctggcaatcacggcgacgtagccgctgtacttgacgagcatgtcatcgtcgtcgccggccgcatccacctcgaacacttcggaggccacgtcgatgacctgcccggtcatcagcagcaggcatgacagggtcagcagcagccacttccaatacgtccaaccgttgggcaccagcgcgaccgccaggcacagtacgccttccacgccctccgtggtcgcaagcgaacggaacgagccgaaccgctgcacgatccatgcggatatcggagaagcgaagtcgatgaccagattgaacgtcttgcggaacgcgatcacccatgccggcagtccgacgatcagaatcgaagaaatcaccgacccctcgaaaatcgcgttggacagcatcgaaaacgtcatacccaccaacgcccatcgcaacgccctgctcaataccgacaatccgcgcataccttagttcctcgtccttgccagtgtaacggaattatgacttctcaatcgtccccccgctgtctaaatgaaagtgcaacaccctttcactggttatctggacaatctccaatctaaagggtgttgcactttcatttagacagcgccccccatatccgcatgtcactgctgccatcataatgagccagtagacgcctttaagcgttctgacaaccatggaatcgaaaatcgctatgcacatcatagaacaacactgccaaggcaagaggtctgaccagtcgctcaatgaggacgggctgatcatcaccgatggtttcgcggcagtggtggatggagtgaccagcaaaagtgtgcaccaccctgccggccttgttcttggccgcgtccagcaccggggtgatgtcagcggcccattcgcgcaccgaacggccggcgagcatgtcgttgccgcccacgcacacgatcagcacatccggccgatcgttgatatcgccgatcatccggtagcgcacgcgccgggcggtcgcgccgagcttgccgaccgtacgccaggccaccggccgaccggtacgcttgcgacgcgcgcggcaagcagcggcataatgcctttcgactggtcgtccacgccacatccggccaccaatgaatcgccgaccatgacggcaagaatcggcttcacgccgttcgcgcctttccaatcggggccgatcggcgccttgatatccaccacgcgacccttggcatcgaacaaaccgaaccgtttgcccttcggctcggacgccaacttcacccggcccttggcccacataccctcaatcggagcaacggcagcatcaaatcacacgcaagattcccacgccacccaacatagtccgccctcctcgacctcgttagcggccagtagcaacccatattcgaaaactcgataaccatcgtcaattcgcatagtttgaacgttttaggcgttttggtcgctttggacgttttatactgtgatagataaaaaggaggtcaccatggcagaatccgacaaactcaccattccacgaacaatccttccatccatcaacattgacgacatgacgacattggaggcattcaccgcacgatttcttgatgagcggatcttcatcaaagatgccagcggcgtggagactcccctaccttcgcagctttgcgacgccgtcaggcagacggccatccttctcgccgaaggcaaaagtgtaacgatcagtgccaccgaacaagatctgactaccgaacaggcggcggcaatgctcggcatttcgcggcaaacactgataagactgcttgataaaggacttattcctttttcacgtccgtccaatcaccgtcgcatccggctggaagacctgcttgaatacaagcgagcctcgaaacacaccaaggattgcgccctgagccaaatgatcggcgtcggggaagacgccgaattgtacgacctgcccgagccgaccccgcaggaagccatgcatgcggtatcggaggtaaggagagtacgggccgatgctttcggtgtttcttgatgccaatgtcatctattccatcaccttgaccgatgttctgctcaccttggccgagcatgacctttttcttcccctgtggtcgcctaacgtattacaagaagcacaggaagccgcctcccgaacactgcctgacgccgcacaacaagccttccgaaaaagactgataatgatggaccaggcattccccgaatcctccctacatgttgaggaatcggaatggagccaattcgatctgcccgacccggatgatcgtcacgtacttgcggctgcggcacagggacaagcagacgcgcggccacgcgcaatatcaaggattttccccagaaactgcttgactctttctccattcaggtcatcacgccagatgatttgctctgtgtattacttagacgagatccggaagccacagctagcgccatacgtgagcttatcgattctcgacatcggccaccgataagcattcccgactttgctaaaagacttgaacgctctggcgcaacacagtttgcagccgctattgcgcatatacgacagcctctcggcaatcattcgtactttgaccagtaacccatgaattctggatgaattggggtgaaccggcggggctggaggcgagcgggcggcggattatggggcacaatggtgtcaaggaggccgccatggtcgatgactatactgccaaaatgactgagctgatcgaactcatgcgtctgatcggcaacgatacgcagcagtgcgaggtcaaggaatgcaagcgcaagatctcctcgaccatcaccgatacgctgtccgcgttctccaacggctccggcggctggatcatccttggcctgtccgaaaagaacgggttcacgccggtcgagggattcgacgcgcgcgccatgcaggaggcgctgagccaggcgtgcgagaagatgacgccggtggtgcggcccgtgatcgtcacctgcccgttcgaaggcgcgaatctggtgttcgcgcgcatcgacgaaatgctgccgcgcgataagccctgcttcaccaccgcgctcggaccgcacggcggctcgttcatccgcaccggcgacggcgaccggcgcatgacctcctatgaggtcgaccggctcatcgaggagcatctgcagcccacctacgatctggatatcgtacccggcgccacgaccgatgacctcgacccgcagcttgttgccggattgttggcacgcgtgcgcgaacagcatccgcgcgtgttcgccgaccgggacggcatcgatgcgctgctggatctgcaggtgttgcgccatgatgattccgacgagtcggaggtcggcggaatactgcgccccaccttggccggactgctggcgttgggccgctatccgcagaagttctatccgcggctcggcatttcgatagccgtgtttccggggacgagccgggacgatgtgttccggggcgacgaacgattggtcgcctcgaagtcggtggtcggttcgattccggtgatgatcgacgatgcggtcgactcgttgatgcgttggattggcgcgaagaagcccgattatccgccactcgtgttgcgcgaggcgattgcgaacgcgctcacccaccgtgattattcgcccgatgcgcgcggcacgcaggtgcatatcagcgtgttcaccgatcgcatcgagatcaccaatccgggtggtctgtatggcatggtgacacatgatgtgctggcgagtccgcatccggtgacgggtgcaccgttcgtctccacccgaaaccagttcctgttcacgctgctggagtccacgccgtatccgggcggcgggtttgtgaacccagaaggcggcgacggctaccagcgtatcgccgccgcgttgcgcgaggccggcatcgagccggcgaccacgcgcaacgacatcaacacgttcacgatgaccatcaccaagcaacgcacgatggcgaacagttcgccgggcgacgtggtcaaggcgattatgaccgtactggagcggcattcggcgatgagcgtcaaggagatcatgcgcgaactgcagttgacgccgctggccgccacatccggtatgcgcgagctgatgaaggaagggcgggtcgcccgagtcaagttcgccgacgactcggtacagcggtatcggttgaaaggctgatttctcactcggccagctgcgtggtggcgggcgcggccagggcggggcgggagcggcggaaccggccggcggccaggccgatgcagatgaacatcacgccgaacagtgcgaccaatcccagcgagccggcccagccggcgacgcttatgccggtttcctccgccgtgccggagccgagcgcgttgtcgatcgcggtgcaataccaccagccaggcaggaacttggccatagtcaccatcacggcgggcatcatgtcaatcggcaatgcaactcccgacgtgaacatgatgagcaggccgaagatattggcgaatccgttggcagccgcctccgaaaacccgaattcgctgagcatgaatccacaggcgacggtcatcagcgcatatacgcaggttgcgcagaacgtcatcagcactccttcggcgctcaatgtcaacggatcaagtcctgccgcggccatcagaccgaccgccagcaccagataaccgacgcatacgacgagcgcgaatccgctgagcgtcagcaaccgctggagtcccatcgacgacatgcgttgtggggatgcggtgagacgacggcgaacttccccggtggtgaatatgcccagaatcattgacccgcagacggtcatcgccaaaaacagcggatacagcgcggttttcatggtgttgccaaatctgctggccgccatgtccgaagcactttccgcgtccgcgcttgccgtgtcgatcacagcgaccttatggttcgcgtccatgtcactcgccgatgcggcagccgctttcgatgcctcgaacagatcgccgacgctgggtttctcaatctgaccggccggcagcatatcaagcatgtcctgattcgagaattcaccaaacccgcccatgccatcttcagacgaatcacccgcagtgtctccaatgtcgataccggccatagctgcgagcgccgcactatcgaccgtcgtatgcgagccaatcagtgccgtacgtgtgagtgaaaggaacccgctgacgttcatccgggccatcgagcctgcaccggacgtatagctggtgaccgtgtccactcttggtggattctcgcctgtcgccgcggcatcaatgaaatcgtcggcgaaaccatcggggatgatgacgatcagatccacccagttcgaggcgacggcttgttgcagagtttcactagcatcgtcaacgttcaccagttcgctggaatccgacaggtatgtgcgcatcgatgacgcgatgccgcccctgtccgagtctcgatcgatgacggcgacacgcattttggccggctcgaatgccgcggctgcggaatcggatgtgccagacagcatcgaccagctgatagacagcatcatgatgcccacgaacacgaggtaaatcaacaggtaggccctgtgcgagaacagtacacgcaatgtggctttacaggtgttcatagcgttgcctcctcagcattgcgatgccggccaagaggaataccgcgctcatcgccagcaaaatggcacaagtggtgatgaacggctggtagctgtcgtagtacaaaatgtcgtaaaacaggttcgtcacctgttgcgcggggttgatggtgccgaggatgggcgcgttgcgtgctatccagtcactgatctgcatggcgaagccgccgtacagtccggtgaacagcgacaatgtgcaggcgattccgctcgacaaaccgtatttcgtgtcgtaggaaagcttcggtaccgcgccgagcaaagtaccggctgaactggtcatgaatgcggcgatgattaccgcgaccaccgtcaccggttctcgccctccaaacgaaatgtcgcaaatgaagcgaatataggccaatgcgataagcaatgcgaccgatgcgcacaaccagcaggcaaggaaaccggcaataagctgtctggcatggctcaatggcgccacggtgcggcgaatgcccaatgcggacaggttggcttgtgctgtggagaccgtgctgattgagtaccccatggcaatcatgcaggacatggccagcaacgcgtaatagtatctggcgatggcattgggctggaaatgcgtgagcgttgtttcgtgagtcacatcgacgctttgcccgatgctattccagaagttgcggctgagcgcagcctgtggattgtcggcgatggtttgtcgggtgacggcgtcggtgcggttgtacaggtcgatggcgctgcgcaatgccgataggctgatatccagtccgacgcttcctgtggtgtcattggccgcggtcaccgtttcccgactgatggttatcgccaaacgcccattgccgtcagcagccaggtagccgcggactgtgccatcggcgagcagctgttcggctttccgcacggtgtcggctgcggtgatggtcagcaattgctgattgatatcggcgtatgccgtgccgtccaaagactccgacgatgaggccgtctctccagacaaggcatccacaaacgtacgcgctccgtccgcctgctgccagcggctatcttcgacgacggccattggtatcggtttgagctcgtatccctcggacagtccgccgaagaacccgttgaacatggttgccagcacgatcggaaacacaatcatccagaacagtgcctgacgattgcgcaggttcgctttcaatgcgaccaaaaatgtggtccacatgatgtctccttacctgctcccgctggcgggagctgtcggcgaagccgactgagggtggttactacgggaccgcccccgcccgcttcgcgggagcccccgccagcgggggcaagattgttagtcccttaacgccttgccggtgagttccaggaatacgtcattcagggtgggcgggcgactggtcaggtggccgatgttggcgccggagcgtttcaccgcgtcgagcacgtcggtcaggttgtgttcgccgcgccggcatcgcacgtcgagttccttgccgtcgtaggtggcttcgatcacgcacggcagcgcacggacctcggccatcgccgaatccgccagatcgagcgtttcgatggtgatgcgctcgcccgtgtcgatcatgttcttgagctcgtcggcggttccgagcgccaggtgccggccgtggtccatgatgaggatgcggtcgcagatctgctcgacctcctccatgtagtggctggtgtagatcaccgtggcgccggcctggttgagccgctggatgccttccagaatcgaattgcggctttgcgggtcgacggcgaccgtgggttcgtcgaagaagatcaggtcaggcttgtgcgcgatgccgcaggcgatgttcaggcgtcgcagcagtccgccggacagtttgccgggccggaacttgcggaagtcctggagaccgacgaattcgatggcctcctcgaccagcggcgcacggtcagttttcttcggcacgtacagcgagcagaagtagtcgatgttttcggtgacggtcagttcattgaacacggccacgttctgcggcacgatgccgatacggcgcttcagcgcgtaggaggtcggcgtcatcggctggccgaacacgcgaatcgtgcccgaatcgtaggtgagcagcgcgaggatgcagttgatcgcggtggttttgccggacccgttcggcccaagcaggccgaaaatctcgccctggttcacgtcaaggtcaaagtagtcgagcgccaccatgtcgccgtagcgtttgaccagttggctgacgtgcacggccagggccgggttggttgtcgagtcgtgttcggaagctctgttgtcggttgccatagccactcccttccttggtgattccatcatcccaagaaggggccagacgccgccacaggcaaatgtcacgacttggccgcacaggcgtgacatttgtcattacagcccttcggcgtcggtctgcatggccttgtacaccttatcgaccggcatcaggctgatctcgtccatcgaatagttggacgccctgtggctttgcgcaatcatcggtatcatccctttacggttgtgtcgacaacatccgacgcttgtgcctcatctattcgggaagtgtgacccgttgtcttggaccgtcatgcgaataattccgcacgcccgtcaagttcgtcgtgttccgcacaccgctagactggtggtgaaagagcgtcgagccagggaggtgccatgcgcgtgttggccgagaagggcttgctgctcgtgttgggcctggctttggcctggcttgtcggggtgcggctcgatggcgtgttcatcgccggcctgctgttggccgtttccgtcgccggattggtggaatggctgcgtcccgcgcaatggtcttgggtcttgtgtacggcgtatctcgtcatcgtcgtggcagtgccttcatggtgcgcgttcatgccgctcatcgcctacgatactgcacagctgccggccctcgcctcggccggagcccgaactggggcacggactgcggcaagcggccgtttccccagtgtctcgcggaccgcggcctctcaccgttcccttgccgatgcaatacgttcggccccgtggctttcggtcgccgcgcgctggatatgggtgttgccgctgatcgcgctctggttcgcccgtggcaccgaccgtctccagacgctggtgatgacgatggtcgccctgcttggattcgttctgggccgggcccgcgcctcctcggacgaggcgcggcgcgcgttgctgcacgcgcaggacagggcgcgcgaatcctcgcgggccactcgttcgcgcatcgccgacatcgatgaggagcgcgcccaatccgttcgtatggcaacactcggtgaacgcacacgtatcgcccgggaaatccacgacaatgtgggccatctgttgacccgcgcgatcatgcaggcgcaggccggcaggacggtggccgaggcgacgaacgatacggtcgctgcgcaagggttcgccacgttgggtgcgacgttggatgatgcgatgacgatggtgcgccgttcggtgcatgatcttgaggatgacggcactgatttcgccgcgcagatcgatgatgccgtcacgtcgttcgacggcatctcccccggtttcgccgtgacgctggccaacgacatcgccaaggcgcccgcgccggtctcgcgctgtttcgcgaccgtgattcgagaggcattgtcgaacgtggtgcatcatagtgcggcgcgcgaggcgagcgtgacgttgcgcgacttccccgcgttctggcagttggccattcaggatccggggccggccgtgtccgagtccgatgggtcccggacggccgctgcccgcctgtgtgcgatgtgcgccacgcgcgtcggctcgcgactcgccgccgacggcgttgccgatatgcgtggttcggccgatgagctgatgcgcggcatgggtttggcggatatcgaatcgcgcgtgcgcgcccttggcggcaccgcggtctgcgggccgtatgaggacggctggcgtgtgttcgtatccgtgccgaagaagcgttggaccatggaatcgagggattgatgagaatcgcaatcgtggatgatgatccgatcgtctgccagtcgttggagacgattctgacggccaccggcacggccgaggtgctatggacggcaaatgacggcgacgccgccgtgcgccgttatttcgagacgccggcgagccgaccggacgtgctgctgatcgatattcagatgccctgcaccagcggtttggatgccgcgcgcgaggttctggccacggacccggccgcgcgcatactgttcctgaccacgtttgcggaccagtcgtatatcgcgcaggcgatggggcttggcgccaagggctatctcatcaaacaggatgtggcggcggtcgggcctgcgctgcaggcggtgatggccggtcaggtggtgctcggcgcggaagtgctcggcaagctcaccgaacggactccgaatcctgccgattccgacgattccagagataccgccgattccatcgagggcctgcttggcgagcgcgaacgtgagatcaccgcgctggtcgccgagggcctcgataaccgcgacatcgccgccagactgttcctgagcgaaggcacggtccgcaatcgcatcagcgcgatactggacaagctcggcctgaccaatcgcacccaactcgccatcctctggctcaacgcccatcggtgaggggcctttggtcaagtaggtctctccctccgccatcgcttcgcgatgccacctcgaacgcgattcaggacagcttgcagctgacctcttattcgctcgttgtcactcacccttgcctaaaaacacctccggcgttttcttcacggctcggctcatcagagggaggttatgaaaaaccaacctcagctgtttttcatgacgatactgtcgatggtgttggccacgcgctcgcagtcgtcggagcactgttcgaggtgacggtacacgtcatgccaggcgaacacctgcagcggatcggtgcaggtggtgtgcagcgtgcgcatcgactcgatgaacaggtggtcggcgtccgtttcgatcgtgttgatggcgaacaccagttcgcgcaacgtcttggaatgccggaatcgcggcagttcgttgaccagctcgcagatgctttccgtggcgcgcaccaccatatccgacatctggaccgcatcgtcgcgcatgtcggtcacattgtcgtagtacatgcggttgagtacgccttcgatgctgtcggtcacatcgtcgagcacgtggccaagctcgtcgatgtcctcacggtcgaacggcgtgatgaacgcggtcaccagttcgtccatcatgtcgtggcgcacctcgtccgccgacttctcaatcgcgtgcatgctgtccatgcgttcgcgcagctggcctggattgaagtcgtgcatgacctcggacagcagcttcgcggcctggcatgcgtagtccgcgctgcggaggaatccgtcgaagtagaacacgtctttttgtctcgccatgatgggtggaatcctttctagaacacgaccatgaacagtttggccattacgaagctgatgagaccgcaaccggggaaggtgaacacccaggtgagcatcatgtcgcgcaccacgccgaagttgatggcggagaggcggcgtaccgcgcccacgcccatgatggcgctggtcttggtgtgcgttgtggagacggggatgccgagcacggtcatgacgagcaggcacagcgcgcttgacagatcggccgagaagccttggtatttctcgagtttcaccatgtcctggcccacggatttgatgatgcgttcaccgccgacggacgtgcctacgcccatgatggtactgcacagaatcatgagccagaccggaatcatcacaccggtcacgctgggttggccgttgcagaacgccatgccgaggaacagcacgccgatgaacttctggccatcctgcgcgccatgcatgaagctcatggccgccgcgcccacgatctgcgcgtaggtgaagaacccgttggtgcggcggcggtccatgccagcgcaaatcagggtcacggccttgcataccaaccagccgacggcgaagccgaacaggaggcttgcgaccagaccgtagagcaccttgacccattcgcccatgttgatgccgccgatgccgccttggatggcgatggccgctccggacaggccggcgatcaggctgtggctttcggaggtgggtatgccgagcagcgaggcgcccacgctgtatacgacgatggagaacagcgccgcgcatagggcgatgagcgccgcgttcgtgtcgccgccgaaatcgaccatgttgctgatggtggaggccacggaagcgttgagctgcgtcatgatgaagacgccgaggaagttgaagatggccgccatgatgacggcggagcgtacgcgcatgcatcgcgtggtcacgcaggtggcgatggcgttgggtgcgtcggtccagccgttgacgaagatgactcccagcgtcagcaacgttgtgacggtcagagccgggttggaaagcacttgttggaggaaatgcgccagtgagacgtccaaggggaatcaacaccttcttcttcgggggcggaagccgtcacactgattgtaacggaagaatggctacgtagttcccatggcgcgcggattatatggtgttgttatgttgcgcgccgcgcatcctttcgtgaaaacagagcaggacagtcgtatgcttcgattcggcgcctgcatcgacaactctcgtcatctaccgaggattcggtcatgcgtgtgcgaaaatggacacggtgtcaatcaggaggtgcacagtggttgtaagcacggattcgagccgcacaatgcccgattgggtgaagtacggggtgttctggcacgtgtatccgctgggcttctgcggtgccgatatcaggcccgccggcccgcgccagttccatggccgcggccttgacgcgatgatcccttggctggagtacgtgcgcgatctaggcgcgtccggcctgctgctgggtccggtgttcgagtcggcgacgcatggatacgacacgctcgaccatatgcacatcgatgtgcgattgggcggggatgccgcgttcgaccagctgattgcggcctgccgggacatgggattgcaggtggtgctggatggcgtgttcaatcatgtgagccgcgatcatccggccgtccgggcggcgcttgacgagaccaccggacgcttgaatccggccgacaacccgtggcatggtctggtccgcgcgcatgtcggtgataatgacgaacccgctttggatgtgttcgaggggcacggggatctggtggcgctggaccattcggctgacgagaccgttgactatgtggcccatgtgatgagccattggctggatcgcggagccgccggctggcgcctcgacgccgcgtatgccgtgccgagcccgttctgggcgcgcgtgttgccgcaggtcaaagccgcacacccgtattcgtggattttcggtgaggcgatccatggcgattacccgcgcatcatcgaggaatccacgatggattcgatcacgcaatacgagctatggaagtcgatccagcatgcgctggagacggagaacttcttcgagctggattggaatctcaagcggcacaacgcgttcctgaattccttcgtgccgcagacgttcatcggcaaccatgacgtgacgcgtatcgcatcgcagattggcccggccaaggcggcgttggcattggcggtgctcatgacggtcggcggcgtgccaagcatctattacggcgacgagcagggctatgtgggcgtcaagcaggagcgtttcggcggcgatgacgacgtacgtccgaagttccccgactcccctgccgaactgtccacgctgggagagccgacataccggctgcatcaggcgctgatcgcgctgcgccgtcgcaacccatggctgatggatgcgcgtaccgagaccgtgaagctggaaaacaagcacttcgtctatcgttcgacgagcgccgacgcccagcattccctgaccgtggacctcaacatcgagcaatcccccactttcaccatccgcaacgccgacggcagtacagcgtatcaatactgagctacctcatcagagggagctcaccattcaccgccgaataccacgaatcagcaggtcgagcaggtaaccgtacgaccggtcgacccgttcgcggcctcgtgtgcggggttgggcggaacgcagttcgaattggatgaacccgtgtatggacacccagatggaggatgcaatcaggtgggggtcatcgtcacggaacacggtcgccgcctggccgtatcgaatgatctgcgtgatggcttccaggcaatgctgggccgagtccgacgcctgccccatccagaccagcgtgtaaataccgggggcgtccagcgcgtgttcgcggtagatcatgcccgccctgcgcaggcgcagcacaggatcggattcgtcaatggcgatgagctgttcgcgcagatcggtgaagtatgcgtcgatgagcgcatcggacaccgcctgcttgccgccgatgtgctggtagatgctggtgggcgacacgtcggcctgcgcggacagcgtacggatggtcagaccgtccacgccgtcctgttccacgatccgcctcgccgcgtcaagaattcttccgcggatttcaagggttggcgtgcgtctggatcggggctgcgattgcgtcatatccgttattctagggtgcgtacaggccattaccgccgttttggcatggccacgatcgcaacgaccgcggcgataagtgcaatcgtcatggccgccaggcagacgctgtgcagcccgcccatgaacgcggatgcgaccgagtcatccagcaatctgcgcagggtgcccggcagggagccggaaatggattcggcagccatcacggattccttggatgcgccaaggatgtcctggggcaggtgagatcctcgcagcgcgtccgtcaggccggtggtgtacgcaccggcctgcagcgaccccatgatgccgacgccgagcgtgccaccgagttcgcggatcgtgtcgttgacggcactgcccatgccttcctcgccgaccggcacggccgtcatcagtgtgtcggtggcgggaccctgaacgagggcgatgcctgcggccatcactgccatgacgaccgcgaacggcagtgtggcaatcgccgtctcgagcgccgaacacccacgcagcgcctggaaccattgggtcgtgaggaagatgaaaccgaacaggcacaggaaggcggcgcaaatggccaacatgccgatgacggcgcacacccagaacacgctatcccatgcgaaccgttgcagcaggatgccgccgatgaccgggccgagtactatgcccaccccggatatgccggcccacagtccgacggccagcccacgcataggcgatccgtcgaacagcccgatgatggatgacagctcgactcccatcaagttgtatatcaatatatcatacttatggaacattgatacacatcatgtcgggaacaggcatccgcatcgcaaacaccgacctacaacacgatcaggcccgacgaccatcaaaggtcgtcgggcctgattcatacgcgctgtcggactaacggcgtccggacttcatacggaatggcgcattattgcgattcttcttggaatggcggcggttcgggccttccgtgttgccgtatttggcgatcatgcggcgttcgtgacgcttggcaccttctgaacgctcgtcgcgtacgatgcggttctcgttcttgtgatggatgcgcttgtcgaattttccgcccttgccgtaccgatcattgcgacggttcttgccgtactcgttgcggccatcgtcctggcgctcgtcgtaacggtttttgccgtatccgccgcgacggccgcccttacggcggtcatcgccatgctcgaacagatagtcgcggcgctcggcctcggggtcgctcatgccggcgcggcgttccgcacggttgcggttcttcttcacggccttcttgctggccttgtcgccgtgcttgcgctgcggctcgccttcggcaacaaactcgccgcctgcgttctcgtgctggaatccggtctcggcaacgttctgctcggcgcggtcgcgattgcgattgtgcttgcgcctgccgctgcggccggactcatcgcccgccgcgttcttggcgcccctgttcttgcccttgcgcgggttgcccacgggctgcgacttgtcgaggctccaaccatccacgcgctcggcgcggtcgcccacaagctcaagcacttcgggcgaatcgtgggtcacttcgatcatcttggttttgatgccggcctggttcagtaagcggcgcgtctcgcggcgctgctcgggcagcacgagggtgaccacgtcgcccgccttgccggcgcgggcggtacgaccggagcggtgtacaaaggacttcgggtcagccggcggctcgacctgcaccacaagctccacgccgccgacgtctatgccacgggcggccacgtcagtggccaccatgacgcgcacgtcgccggaatcgaatgcggcgaggttgcgatcacgctggttctggttcaggttgccgtgcagctcggcggccggaatgccgttctgcgtcaggttcttggcgagcttcttggcctggaacttggtgcgggtgaacaggatgcgacggccttcgcccgaggcgagcacgcgcacgagttcgtgcttgtcgccgcgcgtggtctcgaacacgtggtgggtcatcaggtcaggttcggtggtggccgaatcgacctcgtgcaccttgggatcatgcaggaaggtgttcaccacttcatccacaccgtgatcgagcgtggcggagaacagcatgtgctgggcgtcgggcgaaatctgctcaagcagtcgcttgaccggcggcaggaagcccatatcggccatttcatcggcctcatcgatgaccacgacttcgacggacgagagcgtgagcgcctgctggcgcagcaggtcctcaaggcggcccgggcaggcgaccacgatatcggcgccggccttcagatcgcggatctggtggatgtacttgacgccgccgtacaccgtggtggtgttcatgccgaacgtgtgggccagcggcatcagcacgtcgttgatctggttcgcgagctcgcgggtgggggccagcaccaggccgcgcgggtgcggcaggaaatcgtcagcgcggcgctcttccaagctggccttcttgcggcgcttgatttccttgcggaactcctccatcgcgatttcgccaagcgaatcataggagccaagccgggtgaccagcggaatggagaaggcgagggttttgccggagccggtgcgccctcggccgagaatgtcgcggccggccagtgaatcgggcagggtgtcggcctgaatggggaatgcggtcttcttgtcatctgccgcaagtacgcgcaccagcggtccgggtacgccaagttcgccaaaggtaagggggcgggattccgcgctgtcgttcatctggaaatcagcggaatcgtcacgatcatcgaaattattacggggcacagtggcctttcatgtcaaaggttacgcaaattacgcaagctttccgagcttagcgtaagccccctactttgcttgatgctcgccacgctgtcatcccactctttactgatgaccccatggggcggtaactcgcccatgaggcggtaacttgcccatgaggcggtaacttgcccatgaggcggtttgaagaaattgtgaaaccgcagaataaagccattttcacctaccgccccatgagggttttaccgccccatgggatgtttgccgccccatgggccaattaccgccccatgggttctaccaccacgtaaggcgagcaccgccccatggaacacgcaaatggcccctacccgtgaaggtaggagccattgtgcaaaagggctgagccacaatacggcccagtagccctaaaacacactacaaaatatccggatcgtctttggcgatagtgccggttgccttgccaatggccttcaggccgtggtaggccacaagaatcacgatcgtgccaatggcaatgccgttgaaggaaatgccaccaacagtgaacgcgaattggccgatggcaataatcatggtgatggctgccaccatgatgttcagcggcttgtcgaagttgaccttgttctcaacccagatgcggatgccgatcatgccgatcatgccgtacagcagcgtggtcacgccgccgagcacgccggcggggatcgtgttgatcacggcgccgaacttcgggcacaggctcaggatcagggcgaaggcggctgcgcaccagtaggcggcggtggagtacaccttggtggcagccatcacgccgatgttctcgccgtaggtggtggtgccggagccgccgccgaagccggcgagcgtggtgcccaggccgtcggccatgagggcggtgccgatctggttgtcgtagtcgcggccggtcatctgggccacggacttgacatggccgacgttctcagccacaagcacgagcacaacagggacgaacatgggaaggatggaaaaatcggcctgcggcaggtggaacttcgggaagccgatccatgcggcgtcaccgatggcggagaagtcgacctggccgcggatgcaggcatatacatagccgatgattacgccgaccaaaatgttgaggcgacccagcaagcccttgaacagcacggccacgagcagcacggccagcagggtaaccagtgcggtgtccggcgcggcttggaagttggtccacacggaaggtgccagattgaaaccgatgatggccacaatcgcgccgttgaccacgggcggcatgatgatgtcgatccatttggagccggcgtaatgcacgagcacgccaatcagggccagcagaataccggtgaccatgatgccgaagctggcgaccgcaatgcccttgttggcggtggtgaccgcggtgatcggtgcgatgaagccgaaggacgagcccaaatagctcggcagcacgttcctgttgataagcaggaacagtgcggtggacatagccgtgaagaacagggtggtggacgggtcgaagcccgtcagaatcggcaccaggaaggtggcaccgaacatggcgatgacgtgctgtgcgccgataccggcggtgcgcacccaagtcagacgttcatcgggctcgacgacctcgccgggcgccagcgtcttgccgtcgccatgcaattgccattggaagatattggacattactactctcctcgctctcgcttggggcacggcattcacaaccagccgcactacgcgccattctagctcacgaagattttgtgaagtctctcttccgggaaaggctatttgccgtaatactccagcaggtgcggatcgacggcctgcaccacatccaccaaatcgccattggacaggtacgggcgcttgaattcgcgccacggctccaccttgacctcccagcggccggtcgtctcgtcgagcacgggccgggcggtctgctcccagcgcacacgcttggaggtgcggccggtttccgggtcgcggcgcgtgtagtgcaggcaggtgcagttggtgatcttccagtcgtccgagtcggcgcgatgcaggaattcctcgtcggccagatcctcgatggtgagcatcagggcgagcatgaagtcgccgtgggtgaccatgaccacggattccgaatcggatttgcggctcagcgaggtcaggatgttgtgcacacggtcctcggccacatcggcaatcgactcgcctgccggcggacgccagtacagcggatcggtattcttgaagttccagttgcgtgcgtagttgtttttgaattcgtccttggtgatggtgttgatttcaccccaagaacgttcgcgcagcacacggttctcctcccatttggccttgggcagggccatggtggctgcggtttcgcgggtgcgcacgtatggcgagaccatgtaacggtcgaacagctgctgctggctgaccagccaacgaccgatgcagtcggcctgcttgcgtccggtggcggtgagtctccaggagcggtcgggtacggtgacgttgtcctgcgtatacagggagttgtcgccctgttcgcccgcctggacgatgacgttcgcttcggattcgccatgccggattacgtatagatcgagcggcatgctcatatggattcctctttcgttattggttacgttgtgttgttttctgctgtttcctacttgacctgcgtaatggtgttccccttgaccatgaacgcatgccgggccatgtcgatcatcggctgatcgaacttggagtcggtgtagaactcgtcgatgacggcgtccggaccgtacagttcgcggaaccgtttggtcttgttggtgttgaagttgaggtacgtgaccttcatcgtctccacatccacctcgctggccacgagattcctcacgccgagtctgcggcaggcctcccccaccgtcagaccgaaggatgcggtgaggatcacatcatccgactcaggctggtaccaaggcttgatacgtgcgtaatatcggtcccagaaatcgtccacgagctgttcgacgctcgccacccgtttggatcggctcagttccgtgagatagccttcggtcatcttgcccacgccgtattccatttgttcaagcgtggcccggccaagcttgtatttgaccgcgtaccgcagcacgggggcgatatagcggaacactttcgggtcgtggcgggcggaatacaggtacaagtcgaacaggctttcgccatcatagatggttccgtcgaaatcgaatacgcgcataccttctgcttctactctgttattccttgtctaaggctaatctcggtaagccggcgaaagcgcaaatacgcagtgaatttcacatgaacactgttttttggattgatttcggtacaggtaacgtacactggtgacagcgtggaaggaggtgcgtaatggcgacgtctgaaatcgaacaatggtggattgataagtttcaggagaacctgggtccgattcgcaaggtagccggatggacgactcagcaactggccgacgagctgggagtcgcgcgacagacggtgtctaacttggagaccggcaaaagcccgatgaccaagctgcagtatctcgctttacgtacggtgttcagcgccgagatcgcacgtcgtgaagaccgcgatctggcacgcatcatcaagactttggtcgacgatcccattgagcaacgcattcgcgaacggcgcgcccaagagcaggacggcgaggccgttgccgacaatgccccagtcaatacggacggtggcaacgttgccgacaacgccgccaccgagaaatgcaagcccagtgccgccacattgaaggcttcaaagactgccgcaacgggcaagcccacgctcagcacggcgatgcaggctctcgtcgtcatcaccggcgcattggccagtggaaccgccgccggcatcatcacttacttgatgttcccggacggcggcccgaacaagcgctgagtcgccgaaatatcgaatccgttactcgcaggccacgccatcgtgatcgcggtccaacttgccgttgtatccaggctgcccttgatacaacggagcagcaccagccgcacggacttcagagcaattcgcataatgcacattttgctgcgcttgctgttgctgttgtgcctgtcgagcggcctcctcagcttgccgctgggcctcggcctgcgcggcagcctgttcttcagcggcctttcttgcagcctcttcttcagctgccttcttggcggctgcctcttcagctgctttcttctcctcagctaccttcttcgcttcttcctcctgcgctatatcgctggctttacgaacattgataacaggcttgtccccatcttccacggattggacaacccagttcgaagctctgagcaccattttgtccgtatcgcttttcacctcataatcagaggaggaaaaaccggcatccttgagctcgtctttcacatcggccagcgaacgccctttcttggcgatggcgacaattttcgaatatgtggattcctccttgccgtccgcaccgtcagaagaccccgagcatccagcaagcacaagacccagaaccatcataagaatcacggtcaacgcccaaaccgcacgattgacacgcttcatgttcccgaaacgaaccctgttgttcaacattattctctcccttgtagtcgcagatctgcggatggtcggaaccacgtcaatgtgaatccaaccatcctgataattactgcttattcaatgatatattcatccattgttttcgccgatatatcgcaccagcgtttccctcattatcaactatttcgagttgcatgaatgcgccgtttataggccaagaatttcgtgcttttttgcatcaaattcttcttgggagagaatgccgatatcaaccaattccttcaattttttcatcgcctcgacttgttcttccacagacatggatgccgtgtgagaggcgggagcagcggcttccggtgccggcgcaggcgccggcgcttgaaccggggcggccgtcataggattaatggcttgtgccatattcatgcccagcaacatgccaccatcgccaaagccgttgtcttggatgccttgcgcaatgcgctgctgggcagccatattgccagcttgctgggaaacgccctcgtatgcggcaacattcatcttattcgaggcgaactgctgcacgagttgacgtgattgctcggtgaactcgatactttcgatgcccacactggacacttcaaagccaaaacgatcattccacgtacccgcattggcccgatcgccacgcacgcatgccgcgatgtcattcgtcttgccgggcaattgcgaaatacgatattcattggacaacgaattgatggccacaataaacgactgtacgaattcagacagaatctgcctacgtggcccttcatcatcgaatgaatacgacacggtagtggcaggcacaaagttacgaacgaatcgaactggatcagcgacctttagcgacatggatccgcgtgcgcgaatttccaaatcgacgccatagaaccggtcgttatacaccagcggcgcagaagtgccgaatttgatgccacgaatctcacgcaggttgacgaaggccacatatttggtgcggccaggctggcctccgaaggtgaatcgatcggcaacctgattgaagaacgatccgatgccgtctccggcgagcacactctgctccccgttgcgatattcataaccgcccgactcggtgatgacgttttcgatacctgtttcagagaaaatgaacgccgcagtattctctggcacatagatacgcgaaccattggtgattattccctcggaaccgtattcattcgaaccgcgatcgttgttgcttccgcggggaatgcccggcacaacgacggtgtgttccgtgaacggaccagcggtgatgatatcacgccacaggtccgcgaatgtaccgccgagcgcgccggcgaacgccttaataactgccatctgttttttcctcgatatctcatgcatatggccgatcttgcgactatgcaatcgcaagaccggccgttatgctggcatgttggttatagctgcgtttcgcgatcgcagtattcgcatcgaacgacttctttgcgatgaccggaaagcggagcgccacaaccttcgcaattcaccgaaaccacgggttcggtaataccaagcccactacggaatgcgccaaaagtgtccttcagcgccccggccagagcctccgttccggggatggccttgttgaagaccggctcatccattggcgtatactgtctgccgcgtatacccatataccgtcatcgttcctttcttggaaaaccgttacctcgatacgccagtctgatcactggcccaccgatgcgagcttctgcatgcatcgagtcatgacctcggtgtagtaggccgaatcctcactgctgagggagttttcgtcaatggcgtctaccttctgggagaactcagagtaacgcttcatcatgctggcatagtcggtagccatgctgaccacgttgtcggatttctgatatttgttcatgaaggcaacatactcatcgataaaggcctcgtagctgtccatcgtggccttgaagtcagcactgtcattggtgttctgctgcgccttctgatccgaagactggtcgctctgcttgttggcatcgctggaatcagtgcccgtatcagtgctcttatcatcctgcttcgcggcgtcgccgtccgtagacgtatcttccttcttttccggaacctggatagtgatggacatgatggtctcatcgtcagtgttacgagaaacgctcacactgtatccatcggcgttcttggcattgaaactgtcagcggacttgctatagtccacggtgaaaccgttgtcttgcacggacttgacgtagtcggcatactgcttggcgtcggtaccgcacacctcgatggagaagtagtccgaagactcgcttctaatttcaccctttgtggatttcggctgcggcagcagcgccgcgatatccgactccggccatgaatatgcttcgcacttggtggcgagcgatgcttccaattccgcccgatcagccttggccttcgcatcgtcacgaattacgaacacgccaccgattaccagacccacaacggtgataccgactgccacccaggccagcactcggccttgcaccttgccactcgggcgggtcacgtatacggcgaagcctgagagcagtgccggaatcaccgtggcgaacagcagtccgccccaggatcggccagaaacatccacaaattgggcgagtacgaacaacactccccaaataatggcgaacacagccagcttggaagtcttcttcaccccttgtgcattcggagcaagcacggcaggcgcagcggcaccagcaaaaccagtggcagcaccggcaccatgtgtggcgggtgcaggagccacaccaatacgcttgtccagagcggcgaggaactcatcaacgcgcttggcgctttcgtttccagtcgcctccagacgaatggcggcccctgccgcaccctgcgggactacggttagcgtgcagttcaccccatcataggagtggaaggaaaacgctccggtctgggtgttttcgttatccaaggtaaacgtggcgccagtagtcagctggtcgtgaataacttggaacagctgttgcggactgaccgcatatacacgatcaaatggcgcgccggcgggccgctgcgatgccgtagccggagtcatcggagtggtggtagcaccatcagacgctacgttcggttggccagccggtacagtattcggcacggtaggcgcattcgcgcgatcttccggtgcgtcattcgtgccttcggacggtggaaccggctgaggttgttgatcaaatggcgttgtcatgatgcccttctttccttaagcagcagcattaccagcacagaagaggcaagcccggcaaccgttacggtcaatccgactgccatggcaagccggtatcgttcgctcatcattgcgtcccttcttattgctcgctttgctctgcgatacatcgaaaccagtgtatggcgttgttattatgtacgcaaattagcattttgtatgcatattagctttattgtcgatgcttgataccgcgcatgaacatcctttccgccaccgcacctacacggatggcatcgaccattgtcggcgacacgcgcgggccatacatcagctgacaactgaatttttcggcgtgtttccgaaaagtcggcgtcctgtacgctgggaatcgagcaaccgcgtacgatggcgcagcacagcacccgcaacacagcgacaaggagcatgggcaatggcagacatccccgaagaacatttgaccgaggaactgttggatcggctgctcgccagcgccagcattgagcagtatctcgatgagggactcgtcagcgcacgcacgctgaccgactatctgttcgaccgcatggaagcccatgacctgagacgagccgacgtggtgcgggcatccggcctcaacgccacagtggtttatgacattttctccggcaaaagccgccccggccgagatcacgccattatgctggcttttggtctcaagtgcacattacgtgaaacccaacggctacttcgtcttgcaggcgtttccgaactgtggtgcaaacagcgacgcgacgcgattatcatctggtgtatacgcaatggattcgaccgcatcgccacggacgacgagttgtatcgtatgggagaggcgacgttgctaccggccgattgacgacattcggcccaacaacactcaccagtgagacgcaagtaagagggcatcaaggagagacatggacgataagcaggcgatgcatgcgatgagcatcgacgatgcgtaccatgtcgagcgtacgctcgctcgcggaccttccggcgtcaccgaactggtgagcattgacggcaacggcccgttcgtacgcaagaagattccctctcccctagcgcaacgcaatgtgtgggcggcgctcagcgcctgccagagtaatcgtctgccgcgtgtggaagcgacgtacgagctgcccgaccggttcgtcatcgtctacgattacgtgccgggcagcacgcttgcgcaaattgcggaggaaaacgggcggcttgcaccgaatgtggccgtgcagcttatcgaccaaatttgcgaagccgtgcaggagcttcaccagcacggcgttatccaccgcgacatcacgccggccaacgtcatcgtggcccaggatggcgcgcatctcatcgatttcggcatcgcgcgcatccggtcagaggcaagcaaccgttcacgggataccacggcgcttggcacctacggattcgcctcgcctgagcaatatggctttgccaaaaccgacgcgcgttccgacgtattctcgctgggccggctactcggattcatgctgaccggcgtatatcccgacgccagcgactacgagcagcgacttgccgatgatgccgcagtaccggctcgactacgcgccgtcatcggctatgcgtgcgcattcgagcccagcaaacggccacagagcgtccaagagtttcgccaggcgctgttctcccagtccaatccgcccataccgaacgcatcatcggcaaatccgccatcaacgagaacaacgaacggcagcgcgtcggcgtctcgactattccggcgtctgcacttgagcaaacgcgccatcgtgctgtggtccattgccggagcggcactgataatcgccgccattgcgggaggcattgtgttggcaggccaacttggcattatcgggtcggcaacatcacccgattcctcgacacaatccagcagccaatcaaccgataaggccgatggcgggcactcctcgaacgggtcaggaaccgacaatgccaatggcacgggcggagtaggcggcactgacggcgctgatggagacaatcaagacaccgtcaccgacaatcctctgaaaatagtggaatccggctggtcggcggaccagcaagggtatgtccactacgctttcgccctgcgcaacaccagtaagacccagcaggtgcagtatccgcagattaccattacggggcgggccaaagacggttccatcgtgttctcgcagacgcaagcactgaatatggcattcccgaatcagactgtatatgacgccggtcaagcaggcgaaggcaccgccccagaaacggttgattttactgtgctcaatccggatacatacaacgtcgccaaggctcagggaaccgccgccttccccatcagtggaatatccaaaatagacaacagggacggcggcacgacgttcaatggcgaggtccgcgccgtggcagatggattcaagccatctgatggacagcaaatcaagatttccctagtactgcgtaacgcacagaacgcaatcatctatggagatatcgcattcgtggattggccgggcaatggccgatccacgccattctcgattaccgtctacgatctgccgaagtatgtgtcttacgatctgtatgcgcaaatctggtagttgactttacgtctggcagatggccgtcaggtgcctgtcaggccgctgttcgcgtcacctgcgcactgacgttacggcgcgcctggccgaacagatagatgccgatgggcagggtcagaacaccgccgatgatgaacaccagcgaaatcgggatcacgtcggccagtggcgcgaagatcaacatgccgagcggcattccgagcgcgctcagggtggtgtcaaggccgaatacacggcccaccatcttctcatcggcctcggtctggatgatggtgcgcatcgggcccgtgcagatggccgaagccaaaccgttcaccacatcaatcagcaaatacgccagcagattgtgaaccacgccaagaccaacgacggagacgcccaccagagcgatgccgaaggcgaccacgcgcatgttgttgcggatgagcttggcaccgatggtagacatcagcgcgccgccgagcagcataccgatgctccatcccagctcgttggcggcgagtttatcggaggcggtggtcaggttgatgaatccgagattcaaatcgatgccctcatattcgcgggtcatgagcaacagcgtaaggttcatcggcgccacggacacgaagcacaccaaggcgccaccgagcaccacgttgcgcaggttcgcccggcgccatgtgtagctgaaaccatctttcaagtcagcaaacacacgacggacgctggcaatcagcgaacgatcagcattggcatccgacatcggttcgagtgtgggttgcccgctattctccgcttcagccatacgcctcgcaacatgttccgtgctcttcttcggcgctttgatcaacgccacaaagccgacgccgataatggccgtggtcacatcgactaacagaatcgaccacagcggcactgtgttgataagcacagcagccaccgcaggtgccacaatcgtattcgccgaattaatcacgccgtatattgagttgacgcgcaatagtttgcccgagggaacaacatccggtatgaacgactgcacagcgggcgtctgcaccccgcctcccgccgaacgaatgaacagcaccacgaaaatcatggtcagactcgcccatcccatcgcgaagctcagcgacagcacgacggtgaccacagcaatcaccatatccggcagcataatcagcaacttgcgactgtgacggtcggcccaggagccgccgaa

SEQ ID NO: 1082 - DNA, 18252 bp, Unknown
  R13_10m  MAG No. k141_7203
cctgctcagggcggccggactggcgaaaagcacgtattaccatcttctgtcgcatccggccgccgtgacccggccggacatcgagccgatggtcgccgagatattcgcgcgcacgcccaacgggtgcggccaccggcagatacgcatgtgcctcgtgcacgagttcggggtgcgggtgagccacaagagcgtgctgaaggtcatgaggcgcatgggcctggaatgccggatacgcaggccgaacccgtaccggaaatacagctcgtaccggggcgagacgggcgcgagggtggagaacctgctgaaccgcgacttcacggccgaccggccgtgggtgaagctgggcacggacgtcaccgagttcagggtcgccgacggcaaggcgtatctggctcccgtatacgatatgggatccaaggagatcgtggcctgggacgtcagccggcatcccgacatggcccagcagtggcgcctgctcgccatgctcgaggagaagctgcccgaagacgccaacccgatcctgcactccgacatgggctggcagtaccggcaccggtggtggcgcgaccggctcgcgggactgaacatccgccagtccatgagcaggaagggcaactgcatcgacaacgccgcgaccgagcaggtgttcggccacctcaaggacgagttctacgccggacgcgagttcgcctcatacgaacagttcaagaacgaactggacgcgtacatcatccactggaacaccaaacgccgccagatacgactggagggacacaccccggaggaattccggaacatgtccctcacagcctaatcaggtacccttaataaaccacgtccaacaatcggggcgcagttcacgctgacgggtctctttcataagtgcagggcttcatgattggttcgcaccatggtttgcgaatcactcgcatatcacggtgcatggcattcgcatattattcacgcaaaccatcaatggcgctttggaaatcctccagacctgcaaagttctggtacacactcgcgaatcgaaggtacgccaccacatccaagtcacgcaacggtttcaggatggctttgcccacttcatctgaggtgacttcggcaaggcctcgggagcgaagatcctcttcgactttctgtcccagcaacttcagatcctcttctctgaccggccgcccctggcaggctttacgtacgccggaaatcactttgtctctgctgaatggctccacgccacccgaacgtttagtgaccagcagcatactggtttccaccgtggtaaaacgcttgttgcatttcgggcatacgcgacgccgacggatggaatgaccgtcatcgctaatgcgcgtatcaatgactttggtgtcggggttctggcaaaaagggcaatgcatgctctccagaataacgtgtacgggcggaaaaaccatgccgctcgggtttcatttactcaaccggaacaataatgcgctgcccggcctgcaatgttccggactcgagattgttcagcgtaatcagctcatccactgtttccgatacatcatggccagcaggtgtaatagccgaagcatatgaccagagcgtatcccccggccgcacgatatagctggtcacctgcgtggcacccgtatctgattgggcccgctgagcggtaagcgcgccgaaaccacaccaggccagcgccaaggcgatcatcactgcgataatccgcccacgcacattccggcgggacgttccagcatgctgcatagctacacgtgcgctacgggccggggccatcaccattgaaccagtcatcacgaccacctctctcgaacagatgttctatcgaacaactgttcttataatggcacaaatgttcgacacggtcaagtcgaaactcgaacagatgtttgatttcacacgaacaacacgttatgctggtgacataacgaaaggagccctgacgtgagcaccattcccctctcccccaagcagaagccggacgagtccaccctgaccgaccgccagcgcaaagtgttggacgccattcgcacgcatatcgacgaacaaggctttgctccctctttccgggagatcggaaatgccgccgggctcaaaagtccgtcttcggtcaagcatcagctacaagttttggaagacaagggcttcattcgcatgaacgcgaacaagggtcgcgccatcgaggtgatggcaggatccgccccgaatgccgaaaagccatcacaagccagcgaagaggcaaccagcgccagcaatatggcggagatataccaattccccgccgaagccattgccgaatcacatgacgtaccgctcgttggccgtattgccgccggcgtgccgattaccgccgaacagcatgtggatgacgtcatgcgtctgcctgaacggctgaccggctccggcaccctgttcatgctggaagtccacggtgattccatggtggatgccgctatctgcgatggcgactatgtggtggtgcgcgaacagaattccgccgtcaacggagatatcgtcgccgctctgttggatgacgaggccacggtgaagaccttccgcaaggaaaacggccatgtctggctgatgccgcacaaccccgcatactcgcccatcgacggcacacatgccgcgattatgggcaaggtggtcaccgtactgcgcaaattatagcctgttcgccaccagctgatcagcgtgcgctgaatcgcgctggtcgtgctatagtcgcacactgcttacgaaaccccggcctcgcgccggggtttcgtcgtattcagaccatatcgcaaatggtattgagaagcggtttcaactcgatagagcgaaggagtacacatggcccatacccatacacccgcaccatccacatccgtaaaccctgccgcgcaccagcgcaggctgattgccacgttgaccgtcactggttcggtcttcctcatcgaagtggtgtcggccgtcttaaccggctcactggccctgctggtggatgccggtcatatgctcaccgacatgtccgtgctggtggcatccacaatcaccgccatactgatgcgccgcaagcccaacaacactcgtacttggggctgggccaggcttgaggtgctcaccgctgccgcgggcgccgtagtattgcttatcgtcggcatctatgcgttggtagaggccggcatgcgtctgttcggcggctccaaagcggaaatcgacgatatcggcttgctgctgttcgtaggcattctgggtcttgtcgcaaatatcatctcgatcttcatccttgcctcgcagcgcgaagacaacatgaacatgaaggccgcgttcctcgaggtaatgaacgacgcacttggctcggtgtctgtggtggcctctgccctggtaatgatctccaccggatggaatggcttcgacgccgtggccggtgccgtcatcgcactgatgatgattccgcgcgccatcaagctgctgcacaacgcggtcaaggtgctgctggaggaaacaccggatggtcttgatctcgataaggtacgcgagcatctggaagacgtgccgcatgtgcttgccgtgcatgacctccatgccagcacggtgtccaccgacatgccgattcttatggcccacgtggtagtcgacaaagacctcaccatggaagatgccgccacaatcctcacccaactgcaggattgcctgcgcgagcacttcccggtctcggtcccccacaccaccttccagcttgagcccgagggctatagctccccctcctccaacgaattccacgaataaaaatgctccctctggaagcattcagcagggtataaaaaatcgctgtacgtgtgcgatttttcgtgccgcacaaggtgaaggcctacaaaggtagttcgaaccttgtgcggtgtgaaaggcgctccgtacagcgattttttatcagaagccgaactgggcggcggtttccttcagcgtctcggcggagcgcttcagagcggcgagctccttgtcggagaccggggtgttgatggtgttgttgacgccctgacggttgaggagggtcggcacggacatgcagatgtcggagatgccgtggaagtccttgagcatggagctcacgggcaggatgcggttggtgtcgtgcaggacggcttcgatgatgtcgacgccggacatgccgatggcgtagttggtggcacccttaccgttgatgatcttgtaagcggcgttcttgacttcctggtggatctcctcgcgcttggcggcgtcgagcggatcgtggccgggcagcggggtccagtcgcacatggggacaccaccgatggtggcggactcccacagcgggacttcggagtcgccgtgctcgccggcgatgtaggcgtgcacgttcttgacgttgacgccggtctgctgggcaatcaggaagcgcagacgagcggagtccaggttggtgccggaaccgaagacctggttctcgggcagaccggtgagcttctgagccacgtgggtagcgatgtcgaccgggttggtgatgagcatgtagatggcgttcggagccaccttgaccaagttcggcatgatggccttgaggatgttgacggtagcgccaacgagctcaagacgagactgacccggcttctgacgcggaccagcggtgatgacgaccatgtcggcgtcgcggcagatctcaggatcgtcggaaccgtcgatggacacggtcgggtagaagctggagccgtgctgcatgtcgagcacttcggcttccacgcgctccttggcgatgtcttcaagcacgatctcgcgagcgacgccacgctgggcagcggcgaaggcgagggtggagccaacggcaccggcaccaataacagcaagcttcgtgggcttaacggtagtttccgccatgatggatgaacctctcttcaaaggcggtctgctgatgaatggcaggccttgtaactaacggttttcactctataaacccgctaagacgttttgctaccaacacaccaccctgtctgataacggtatggtaatgtttccaacggttgttagcgctcacaaacaaactgtgatgtttatcacgttaatcaatggactgttcgaccacctgagcggcaagatgggcgtcgacgtccgcttcaagctgtatgccatcatcgcggtactccaccttgtccaccttgccgtattcgcgtacacgagagatcagggagccagcggtatacggcagcagagcgttgacatgcacatgcgggaccggcagcagactttcgaccgcggtacgcagctcgtccaatccctcaccggtataggcggagacgatgaacgcatccggctgcagtgcggcgagtcgttcacgtgtcgcctcgtccgcctgatcggccttgttgaatacgagaatacgcggaatcgaggccgtgccttcgatgtccgccaacacgtcattgaccgcgtcgacctgagagaacgggtcagggtgggagccatcgaccacgtgcaggatcacgtcggcctcggccacctcttccagggtggatttgaacgcctcgatcagctgggtgggcaggcggcgcacgaagccgaccgtgtccacgtaggcgtaagcgcgtccgtcgcgggttttggcgcggcgcacggccgtgtccaatgtggcgaacagcgcgttttccaccagttcggccgaaccggtcagacggttggtcaacgaggatttgccggcgttcgtgtagccgaccacggccactgtgggcaggccgaagcgacggcgtgaaccgcgcttgacctcacgtgccggggccatctcacgaatctgacggcgcagtctggcgatacgcgtgcgaattacacgacggtccatttcgattttggtctcgcccgggcctcgcgatccgatgcccgcatccgcgcctgccgcgcgaccgccggcctgacgggacagcgaaccaccccaaccacgcagtcggggcagcatgtattcgagctgcgccaactccacctgcgccttaccttcacgcgaggtggcgtgctgggcgaagatgtccagaatcaccgcggtgcgatccaccaccttgactttggctgcgtcctccaatgcacggcgctgtgacggcggcaggtcgtcgtccacgataatcgtatcggcttcctcacgcgccacgatgtcggcaatctccttggctttgccggaaccaacgtacgtggctgcatccggcttggagcgatgctgcagcaaaccatcgcataccaccgcaccggcggtttcggcgagcgccgccaactccctcaacgattcctcggccttggcttgcgtggtgacggcggacgaccagacgccgacgagcaccacacgttccagtcgcaccttgcggtattcgacttcggtgacgtcctgcagctcgccgagaccggcgacatgcttgagctcgttgcgggcctcgcgctcctcccattcctggttggcgtcctcgtgccagccggtcgcgcgctggctgtcgtcgagcagcacttcggactgcccggccagcacaccttcaggggtaacgtcgttgttgccgcggtcgatgtcggtgtactgggtgttgtcggtcaagtgcgcctcgtttggttggaatggttcacgattcttctatggtcctttattatcatcacatgaggtgacatgctggcatagatcggcacgtaccggcataggccggctgatacaggtcggcatacgagagcggcgaatcccgcagaaatggagcgaccatggcagaacagtatttctctgcggaacccgcgtcgaaagatgtgcgccgcacattgaacgtaacgttgcgcggccatgaggcgaccgctcaggtgtcgaacggcgtgttctccggctcgcgcgtggacctcggtacatcggtattgctgaagcatgcgcccgagccgccgcttaccggcgatttcctggatttgggctgcggctggggccctatcgccctgacattggcgtttgagtcgcccgaagcgaacgtgtgggcggtggatgtcaacgagcgcgcgctggacctgacccatgccaacgcacaggcgaacggccgcacgaacattcatgcggctcaggtggacgagtccagcactcccctgcccgccgagaaccagccggcgttctgcgagacggtgccgggcgacctcacgtttgatgcgatttggtcgaatccaccgatccgtgtcggcaaggaagcgctgcatacattgcttatggcttggctgccgaagctcaaggtgggcggcgccgcctatctcgtagtgcagaagaatctcggctccgattcgctgatcccctggctggacgatgcgctcggcgaggggttcactgcgagcaaatacgcgagctccaagggcttccgtatcattgaagtccgtcatgaaatatgagtatcctgcagaacttcccgtatctgccgcgcgtgatgagatagccagcgcggtcaaacgttcccaagtcgttattgtgtccggccagaccggttcgggcaaaaccacacagctgccgaagatcctgcttgagcttggccgtggcacgcacggcaagcagatcgtgcacacccagcctcgccgtatcgccgcgcgcacggtggccgaacgtatcgcctcggagatgggcgtgaagctcggtgacgaggtcggctatcaggtgcgtttcaccgacgaaagctcgcccagcacgcgattgagagtcgtgaccgacggtattctgctcgcccagatccagcgcgatccgaaactcacccaatacgatacgatcatcatcgacgaggcgcatgagcgcagtcttaacatcgactttctgctcggctatctgacggcactgctgcctcagcgccgcgatctgaagctcatcatcacctccgcgaccatcgattcggtcaagttccaggagcatttcgagcacgccttgcatgagaaggtgccggtaatcgaggtttccggccgcaccttccccgtgcaggtggtctatgagccgcttggcaccgcgcccgcgttgatgcgcgaagtgccgggattcgcggtgggcgcccgccccggcgacgccgattacgacgagctggccagcgccatcgcggaatccgattccgaccggccccgcggccggtccggcgactcctatgccgatgacggcatcaccgatatgcccacggccgtggctcgagcctgcgccgaactggtgatccactcctcccatgagcgcggtccccgcgatattctggtcttcgcttccggcgagcgcgacatccacgagttcgaggccgcactgcggcatcattacggtccgcgcgccgacgacatgcgccgaccggacgccatcgagatcatgccgctgttcgcgcgattgtccgccgccgaccagcacaaggtgttcgaatcgcatttgcatcagcgcatcgtcatcgccaccaatgtggctgagacctcgctgaccgtgcccggtatccgctacgtggtggaccccggttccgcccgtatctcccggtattcgaagaccgcaaaggtccagcgtctgccgatcgagccgatcagccaggccagtgccgaccagaggtccggccgatgcggccgcgtggccgacggcatcgcgatccgcctgtattcgcgtgaggattacgagacccgaccgcgcttcaccgagccggaaatcctgcgtacctcgctgggtgccgtggtgcttcacatgctgtcggtgggcgtggcccgcacggccgaggacgtcacgaacttcgggttcatcgatccgccggatatgaaggccgtgtcggacggtttcaatgagctcaccgagctcaaggccatcggccgaaagcgcggcgaggtgacgctcacccataccggccgtcagctggcgcgcatccccatcgacgtgcgtctgggacgtatggttatcgaggccgcgaaaaccggttcgccgaatcttctggcccaggtgctcgtggtcgtggcgttcctgagcttgcaggacccacgtgaacgcccggacgacaagcgtgaggatgccgaccgtatccacaaccgatatgcggatgagacttccgatttcctgacggccctgaacatctgggatcgcgtgttccaagcggacggcgacccgagcaacaacgcgctgcgccgtatctgcaaaaccgagtatctcagctggctgaggatacgccagtggaaagatctcgtctcccagctacgccagatgtgcaaggagctgaagttcaaggtcggcgacccgttgcccgcctcccgcccaggcttggagattcgccagctgccgttgaatcagcaggccgcgcattcgctgtgctgctcgtgggatgcggatggcatccacaagtcgatgctcgccggattgctgtcgatgatgggcatgcaggtggtgcgtgagcccaaggcctccgatttcgcggggctgaccggtgcggcgcgcgcccgtgcgatgaaacgcgcccagaagcagtcgaagaacgattatcagggcgcgcgcggcacccgtttcgccctgttccccgcctccgccgtggccaagaagaccccgtcatgggtgatgagcaccgaactggtggagacctctcgcctgtgggcccgctattcggcggccatcgacccggcgtgggccgaaccgttggccggccaattgacccgcaccacgtatgcggagccgcactggtcgggttcgcgtggctcggctgtggccaccgcgcgcgtgctgctgtatggtctgccgatcgtacaggaccgtgccgtgcagtggggacgcatcaatccgcttgaggcacgcgacttcctgattcgccagggtctggtcgagggcgatattcagcagcgcttcagttacgacgactttgtgggcaaaaaccgtgacattctcgaggatgccgccgatgacgcgagccgcacccgccagctggcggacaccgtgtccgacgaggatctgttcgacttctacaacgcggtcattcccaacgatgtgaccagcgtggccgatctggcgaaatggtggaagtccgagcatgaccgtcagccgaatctgcttgatttcgacccggccaaggtggagcgtctggcatccagcgattcggtgagtctggacgattaccccgaccattggcatacgaccggatcggacggccaacccatcgacctgcgtttgagctacgtatacgatccggccgacccggccgacggcgtcaccgtgcatgtgccgttgaaggcgctctcgcgtatcacgcccgaccagttcacatggaatgtgccgggcctgttggatgagctgattctgtcgatgatcaaggcgctgcccaagcagctgcgcgtccagttcgtgccggccccggatgccgcgcgtgcgattcgtgactggatcgacgagcattacccggatctgccgggctcgggctcgcagcagaagccgaatctgccgccggtggatgaggatggcacgaccgttggctggcctgatttggcacatgtgttcaccaaggcggccatcgccaccaagggtgcgcagattcatcccgaagtgttggggccggaactggtcgagcgtctttccccgtatctcagggtcacgttctcggtggagcagcaactgccggccggcaagcaccctcgtggacgccggcatgcgcgcggccccgtcaaggtgctgggtgtgtccaaggatctgaaggcgctgcaacgcaagttcgccgcgcaggcggaggcgtcggcccgtcagatggtcaagaagcaggccgatcaggctggagaacagggcaagctggtcagtcaggcgaacctgttgcataaggcgggtgccaccaccgagtcccgggccacgatgctctggcgtggcgcattggatgcgctgcggttgccggccgaacgcatttcgtcgcgctggctgggtaccgaggcgttgatgctggcttctgctccgtacaagttcaccaaggatctggtcgaagacctgcagctggccacggtcaaacggctgatgccgaatgtcgacaggctctcggacgatgaggcgttggccaatgcggtgctcgatgtgcgcgaagtgtacgaggacaccgtctatcaggtggcgcatgacgtgatcgccgtgctcaaggcttatgccgaagtcgacaaggccactggcggcaaggctgatctgccgatgctttcggtgctgcagtcggtgcgcgagcacatcgccacgctggtgttccccggattcgtcggcgccgctcccccggacgcgctggcgaacatctcccgatacctgcaggccgatctcatgcgcctggccaaggcgaagaccgacaagaaccgcgacgtgcgatgggcgtggcaggccgacgaggcccgcacgctggtcgacaaggcgatggccaaggccaaggcggagccggccggcccccgccacgagacgctgatgaagcaggcgaccgccgcccgctggatgctcgaggaattctacgtgtccctgtgggcgcaggaactcggcaccgccaagccggtgagcctgcagcgcatcaagaaggcactggcgtagcgatggcgacgacgcaacggcgcaagccggccaatccgcgcggcagggcgaacgtgattgtcgcggggcggggcgtgtcaggcggcaatcgcaaacgtcgcccgggcaaacgcccgcgcaatcgcaggtatccgctcagcccggcgcgctggtggaagcgggccgggttggcgcagcgcgtcgcggctgtgctggtcaccgtggtggcggccgcatgcgtggtcgcgctggtcgtgggcactgtgcgggtcgtccagtggcgtcgcgacgtgcaggaggccgaggcccgccagctgcagctgacgcagcaatacgacttcaatcccggcgacatcatctcggacggccagttcttcaacgccaatgcgatgagcgaggccgaggtccaggcgttcctcgacaagcagggcgcggcgtgcagcggttcccggtgcctgaaaaccatgaccttcgacaccgaggaccaggcggcgaacgagtattgcgcggcgtacgagggcgcgagaaaggagaccgcggccgcgatcatcgacaagtcggcgcgcgcgtgcggcatcagccagaaggtgctgctcaccgtgctgcagaaggagcagcacctggtcacggccgtcgatccgacggacttccagtacaaggccgccatggggctgagctgcccggacaacgcgaactgcgatccggcctatgccggcttcttcagacaggtgtacggggcggcgcaccgctaccaatactatgtggcgcatgaaagcgcctacggctatcacgccaacgcgctgaactacatccagtaccacccggatgccgggtgcggcggcaccaacgtgtacatcgagaacaaggcgaccgcgctgctctacatctacacgccctaccagccgaacgacgcctcgctggcggccgggttcggcgagggcgactcatgctccagctacggcaaccgcaacttcgccctcatatacaccaactggttcggtgccgcgcgccgataggggcgggacggcaaaaaaccgaaaccacggtaaggctaggtgtcatccgcgccgtcgccgccccgccgcacggccggagaaccggccggatgacgagcggcacggctcacaggtcgatcttcggggaggcgtcgagcagggtacgcgtgtactcggccttgggatggttgagcacgcggccggtctccccgctctccacgacgcgcccgtggcgcagcactgtgatcacgtcggacatctcctgcacgatgcccaggtcatgggtgatgaacaggcatgcgaaaccgtgctcgcgctgcagccggcgcagcaggtcgagcaccttgcgctgcacggtcacgtccagcgacgacgtcggctcgtcggcgatgagcagcgacgggttgagcgccaaggcgcgcgcgatgccgacgcgctggcgctggccgcccgacagctggtgcgggaaccggccggccacatcggcgggcagctccacctgatcaagcaattcaaggacgcgcttgcgccggtccgtctcgctgagcccgccctgcacgagcatcggctcgccgatgctccatgccacggacttgcgcgggttgagcgccgatccgctgtcctggaacacatagcccatatgcttcaggatctcgcgcttgcgcctgccatgcgccttggcgagatcctccccctcgatgagcaccgtgcccgaggttggcgcgagctggccggagatcaccttggcgatcgtggtcttgccggctcccgattcgcccaccagcgcgcgggtcctgccggccaccagatcgaacgagatgtccttgacggcgaagctgccggccttgtacgacacggccacgtcgttcacctgcgtgatgcgcctgccgccgccgggcgcgtcactttccgtgatgcgttcgccgccggccgcatgttcgccgtctgccgcatgctcgtcgatgcgcaggcgcggcacggcgtcgagcagcatccgcgtgtagtcgtcggacgggtggcggaagacctgcgcgacgctcccctgctcgacgatcacgccgttgtgcatcacgtacacgtcctgcgcggcctgccacaccacgcccatgtcgtgggtgatgagcagcacggccagatcgaggtcgaccgccagcgaggagatcagggcgagaatcgccttctgcgtggtcacgtcgagcgcggtggtcggctcgtcggcgatgagtaccttgggtcggttgatgatcgccatggcgatcatcacgcgctgcagctggccgcccgacagctcatgcgggtacgacgaccacacgcgttcggcgtcgtcgagcccgacctcgcgcagctgttcgagcaccttggccttgcgctcggcggcgctgagctgcttctggtggtatttgagcgattccgcgacctgtacgccgagcgtgaacaccggattgaacgcggtggacggttcctggaacaccgtgccgatgtattcgccgcggatgcgttgcagcggcgcgtcggcggccagcagatcgatgccgcggccggcggcgtccttgccgtcgccgcccggaccggagtccggcccgtcatccacaagggcgtcgtcgaggtacgcgtggcccttcacgctggccaccgacggatcgagacggggcagcgccatcgccgtcaccgacttgccggagccggattcgccgaccagagcggtgatgcgccccgggaacagcctgaggctgacgccgtgggtcacctcccgctcgtcgaagctgacggccagaccgtccacggtcacgatcgcgcgtggttcactcattggaagctccttggatgcacaagcgttggaatgcgtccggcgcgcgcgccagcggaccatgccgccggcgcgcgccggatgcggatgccggctcagttcgcgctggcgagcgagacctgcgtgtagtccgggtacgccgggaagttgccgatgacgaagttggtcacgttcgatccgtggatgaacgtgttcttcgaatagatcagcggcacgaccggcgcgtcggccatgatcgtcttgtcggcctcggcccagatcttgccggcctcggtctgatcgatggtctcggtggccttcttgatcagctcgtcgaccttcgggttcgcgtaacgggccaggttgtagttgccgtggccgatctgcgaggagtcgaacagtggggagatgttggcgtagggcgacgggaagtcgggctgccacgagctgatggccagatcgtagtcgcccttgtcgttggtcagcgtatcggaatacacatcgtcgttgagtgtctggatgtccaccttgacgccggcccgcttgaggctcgtctggatcgaggaggcggtttcggcctgagcggaggtggcgatgagcttgagggtcggggcctgctcgcccgactccttgatcagctgcttggccttgtccacgtcgccggtcggatcggccttgtacaggtcgtagtcctcgcggccctcgatgccgggcgtaacgagcgtggtggcgaagttgccggcgatctcgccgccggaagccgtctggtaggccttcttgtcgaccgcgtactgcagcgcttggcgaatcttcgcgttcttcacgtgttgggtgttgatggcgaggtattccagcgcgccgtcgccgctggtggtcagcagcttcttgtagttcgggttggcctgcgcctgcgcgagctgcgcggccggcacgaatccggacaggaacgagttcttgccttcaccggtgccctgcatgatcgactgggcggccaccgaggtgtcctgtcccatcttgaacacgatcttgtcggggcccgcggtgcgcaccggatcggtcttcttgtcccagtaggtgttgcgcacgaagacggcctgcttgccggcctcgttcgactcgaccttgtacgggccggaggccaccggcagcttgccgtagccggacgccgggcccttgccgtcgggcacgggggtgaacgcggcgagcgagacgacccacggccagtcgccgaacggcgcgttgaggtggaagatgatggtcttgtcgttcggcgtctcgatggagctgagctcctggccgtcgaacgggccgtggtagtcctgcgcgccctcgagcagcgtcttgtggtagctcaggccgccggtcagcgagtcggcgaaggaacgctccagcccgtacttgacgtccttggaggtgatgggcgtgccgtcggagaacttgagcccgttcttgagcgtgtacgtccacgtcttgccgtcgtcgctcgacttgccggtgtcggtggccagatcgggcacgaccttcgtctcgcccttgtcggtgatcttccacgcggtcaggcggcggaagatgttgccgttcgtggtggtcggcagaccctggctcttggccgggtccagatccatctccgtgctggacagcagcacgttcagcgtgccgcccttgacggtggtgccgctcgccgagccggtggcggcgttgtcgttggacgcgccgcagccggacagcgccagtaccgcggcacaagcccccgccgcgaatacgcgccatgcgttgttcttcatgatggttttcctctctatcggtgccggtccgtagagcagaccggcaagtatcacgtgttgcggccgcagccgcactacttcgtgccgagcgcgaccctggggtcgagcaggctgtagcagatgtccacgatcaggttggcgacgatgaccagcacggcggcgaacatcgtcgcgccgaccagcacctgcaggtcgaggttcgacacggaatcgagcagcagcgagccgagcccctgcatcgagaacaccttctcggtgagcaccgcgccgccgagcagcccgcccagatcgaggccgaacatggtcatcacgggcagcagcgcgttgcgcagcgcgtgcttgaagatgatcaccgattcgggcacgcccttggagcgggcggtgcggatgtagtcctggctcagctcgccgatcatctgcgtgcgggtgaccctggtgtagccggcggcgctgagcacggccagcaccagccacggcagcagcagatgcgtgaaccagccgacagggtcgtcgtggaagttcacgtacccgccgctggggaatatctgcagcaccagcgaaaaggcgatcaccgtcagcaggccgatcaggtatgacggtgccgaaacgcccacgatcgacagcccgagcagcgtgcggtcgatcagcgtatcgcgcttgagggccgcccacacgccggtcgccacgccgatgaccagccacagcacggccgcgccgaccgcgatcgacgcggtgatcgggaagcggtcgaggatcagctggctcaccgattcgttgagacggaacgaatacccgaggcatggtgccgagcagaccacggcgccgccgccgctgccgaaggtgcgcccgacgaagatgcccgccacgtaattgcccatctgctcgtaccacggcttatcggtgcccatgaaggcggagacccgctgcagctgctcgggcgtgcacggcttgccgcacgacagctgcgccggattggtcggcagcaggaagaagatcaggaacagcgccagcgtgatgagcaggatgacgacgatcgagctcgccacgcgcttgccgatgtattgcaggattctcatgcacgcacccccttgcgcgggtcgatggcgtcgctcaggccatcgccaagcaggttgaagccgaaggtcagcaggaacagggcggcgcccgggaagatcagatacatcgggtcgaccagggcccactgcacggcgtcggagatggaccggccccatgagggcgtcggcgggttcatgccgacgccgaggaacgacaggcccgcctcggcgccgatgcgcccggggatcgacagcgtgatgttgacgatgagcagcggcatgaggttcggcaggatctgatgccacagcacatgggcaggcgaggcgcccatcaccttggacgcgacggcgaaattgcgcttgctcagcgtcagcgtctgcccccggacaagacgcgcgatgccgggccatccgaagaatccgagcactagcgtcagcagcaccggcctcgggaagccctgcggcaccaccgccgacagcgcgatcgcgaagatcaggaacgggaagccgaagaagacgtccatcgtgcgcgagatcagcgcatcgaccaacccggggaaatagccggccagcagcccgagcgccacgccgatgaccagcgagatgaccgacgagacgacgccgatgcccagcgagatccgtgagccgtacgccacgatggagaacaggtcgacgccgcgcagcggggtgacgccgaaccagtgccgggcactgatgccgccgccgaatccggccggcaccgacccggcacccaaggcctcgggatgctcggcgtacgggtcgttgccggtgatggccgacaacggcccggccagcggcgccagcagcacgaagaacagcacgatggcgccgccgaccactatcgatgagcgagcgccggaacggagaacgcgccgccgtctttccgccttcggcgcggctttcgccgtcgcatccgtcatattgtcatccccattttcacgctgaacataccgataatcatcaatccgcgcaggtgggcgcccgtgagccgggtccccctgcagccggtgtcctaacattaaggtttcgcagcaggatgacatgctgtggccttatcggttatttggatagcaggttatcaatggacggcaatcggcggataaggcatgccgcggggaca

SEQ ID NO: 1083 - DNA, 17888 bp, Unknown
  R13_10m  MAG No. k141_7367
acgaatcgaaaccatcgaggcgctgcaagtgctcgaacagaccgccgccggcgaactcagccgggcggtaagcgccaagacgttgggcattacggccgactccgacgccatccaacggttggcccgcatggatggatacgacgacgtcgcaccttcgcctgtgccttcctcggctgccgatgaaggacggcatgcacccagtcagggcccggctcaccagtcggaccagaaaacggacgcacaatgaaactctccaaatcaaaaatcatcggactgatcgccctgcttgcggtagtgggcgtggtctgcggcacgctggtgtggcggcaatcgcaaccagcgccggccgaaccgaccgaacaggtgagcatcaccggctacctgggcggcgagaaaatcggcctgttcgatgacgccaagttcaaggcgcttgccgccaagcaaggcatcgccatcgactatcgcaaggccggatcgctggccatgatggatgcggaccggaaaggcatggattacctgttcccctcctcgcgcgcggccgtcgaatacggcaatgcgaaaggcgtcaaggccacccaaagcgacatcgtcttcaactcaccgattgtgctgtacacgcacaaggccgtggcggacgggctcgtgaacggcggacttatgaccaaggacgattcgggcgcgtaccacatggatatggccaaagccgtggacgcgatggtcgccaacacaacctgggccgacgtcggatacacggcaggctacgggcagttccgcatcgactcgaccgatccggtgaagtcgaactcaggcaacgaatacgcggcgctgctcgccacggtgctcaatggcgggcagccggccacggtcgattcggtggcgcgcgacggcaagaccatcgcctccatcttcgccaaatccggttggatggagacctcttccgaggattcgttcaaccagttcctgaccttgggcgtgggctccaagccgatgatggtgggctacgaatcgcagctgcttgatttggccgtgaaccaaccggatgcgttcaagcagatcaaggacgacgtggtcatcgtctacccgacgccgaccgtgtggagcacccacgcgctgatggccttggacgagaaaggcggcacactgctgaacctgttgaaaacaccggcggtgcagaagctggcgtgggagcgccacggcttccgcgcggccaacttcgccggcaccgattcgatcagccgattcggcgtgcccggcacgctcgaccagatccccgccgtatccgaactgcccaacaacgacgccatgcaacaactcatcgccaccctccaatccacgcaataactcttttgccagcccccaatcggtgtttttattaaccccctctgacgagctgagtcgtatagcaaacagcccagtgggctgtttgtagacgaaggcgagcgagagcgagcaaataagaaatcggctgtaagccgtccttaattgcgttcgggctcccggcaaagccgggtgggggggagacccaaacataactatcaaaaaaggaaccagaatgccccaaaacatcaccctcgcagacctcaccaaaagctccgcaacccccatcaccaacccgttactcaacaccaaccaagccgcccccaacaccaccctcgtccccaccgccgccgaagcccaagccgccgcggccctgaccccggaccagcagatcgccaaattgcccgaagccgaccaggccacggtcaaccagatggccggccagatcgacttcactcgcgacggcatcgaatccagctacggcaaggacgcccagcgcgccacctccaccttcgccgacgaaatcctctccgacacccgctccaaagacaccggcgaggcgggcggactactgaacaccatgctggtcaccattgacgaggctgacctcggcggcttccgcaccattccgatcatcggccaggtggccgtcagcgtggataagctgcgccgccgctatcagaaagtcgacgcgcaaatcgacgaaatcatcgtgcgtctcgaatccgcgcaagccaaactcgtggccgacatctccatgtacgacacgatgtacacgcagaacgcccagcaataccgcgagctgaaaatgaccgtactggccggcaagaaggcgctcgccgacttcaacgccaaccagctgccagcgctggaggccgaggccgccgccagtggcgacgccatgcaggcgcaagtgctgaaggacttcaagtccaagctcgaccgttttgccaagcgactcgacgacctcgaccgcatcagcgtggtcaccttgcagaccgcgccgcagatcaatatcatccagaacgcggaccagaccatcgtggacaagatcgacaccaccatctccaccacgattccggtgtggaagagccagatggtgatcgcgctgggcctgtccaaccagcgcaaggccctcgacctgcagaacaaggccgacgatgtgaccaacaagctgctggcgcgtaacgcggccgccctgcacaagggtgcggtggacgcggaaaaggccaaccagcgttccgtggtggaaatcgacacgctggagaagatcaacgccgaactcatcgccaccctgaaggagaccgtgcagatccagaaggaaggcaaggccaaccgcgaggccgcccaggtcaagatgcgccaaatcgagtccgacctcaaaaacgccttgctcgaaaacgcccagcagatgtgagccgttcgcgcgccagcatgctcccgttggcagaggtatatgagtacgcctactggtgtgcgtatatatgctcccgctggcgggagctggcagccgtaagactggctgagggtggtcacggcgctcggctcggccggctttaccggcaaccattccccgccgcaatttctctgtgggcataatcccggaatgattgccgcgctcgggaattgggtgaagtgaaggttaaaggttgagagcccgggagggttccggaaccggccacgataaccgctgctagccccgcgatacgggttggcggccggcatccaagccgattctctcctaatcaaggagtaccgattatggcaatgtttccggctttgatgaatgacacgatgttctcggatctgttcgatgatccgttctttgagggttggcgcaacacggacaacacgatgagtgccgcaatgcctgccaacatgatgaccaccgatgtgcgcgagaccgacaagggttacgacgtcgacatcgatatgcctggctttaagaaggaagatatcaaccttgagctcaacaacggctatctgaccgtgtccgcctcgcgttgcagcgagcatgaggacaaggctccggccgctgagggcgaggcttccgacagcaagtgcgcttgcgcgtccgattcgggcaagtggctacgtcgcgaacgctacatgggctcctgctcgcgtagtttctacgttggcgaggacgtgaaggagtccgacatccacgccagctaccggaacggcacgctgtgcatccaggttccgaagatgcaggcccagccgcaagtcgagtccaagcaccaaatcgcgattgagggctgacgatacttgattcgtcccgaagtcccgcttcgagtagctttgccccctctgacgagggagctcccgcgaagcgggtgggggagagataaatcgtaaccaaaccatgcttcccacgccgcctgccctacgctttcaacgccgactaacctgacagacggcgggaaacatagccaatgcaaatgccgggtagggatttaccctacccggcattttgctgtttcaatcaccgaaccccaccctgttcgcgcgccggtcgtgtgccgttctgcagctgtacacatccgatgagtagaatgccttcgaaacgaggcaagagaggcggacatatggcgaacggcgcacagaacgcaagcggcacgccggccccggcggcaagccgttccggcggccacgtcgtatccgcgcgcgccacgaccatcggcctgatggcgatcctgctgtggagcttcatggccggcaccgtgcgcatcgtctccgaaaacttcggtgccacgcttggttcggccctgatctacacggtcggcggcatcctgctgctgatgttccggcgcccggccccgattcgcgagttccccaagaaatacttgattatcggcggcctgttgttcgtattttacgaatcgtcgatatccctctcgctgggtctggcctctaccgacgcatcctcggtggaagtgagcctggtcaactatctgtggcccacgatgatggtgctgctgtcggcgggcgtatcccatcgcaagcacgcggtcgtcaaggtgctgccgggcgcgattgtggccactgccggcgtggtgctggcggtcggcggtaattccgggctcgactggcatgcggccgtgcagcatatcgccgccaaccctttgccctatgcgctggcgttcgcgggcgcgctcgcttggtcggtgtacgcggtgttcacgccagccatgagtcatggggtggacggcacttcattgttcttcccctgcgtggccgtggcgttgtggattatccacttcgcgtccgggcaggggtggccggccgagccgccgagtctggtcgcatggctgtttgtgttgattgccgcggcggcgattggcggcggttatgcctgctggggctatggcattctgcatgggtctatggagcggctggctattgcgtcctatgccacgccggtgctgtccaccggggccggtgcggtgctgctgggtttggcgctgtcgctgccgttttggtgtggcgcgctgctggtggccgccggatcggtgctcaattacttggtcagtgcgcgcaaatagcggggtggctttgcttatggggcggtaataatcccatggggcggtaaaaccctcatggggcggtatcccaaaatggctttattctgccgtttcacaatttcttcaaaccgccccatgggccttttaccgccccatgggtaaattaccgcccgatgggcagcagcaacttactcgccgcggcgctcggacgggcggcgaatcgggtcaagcagcgtattcggatcggagatgccgaacatgctgcgcccgccggtggattcagggtgcttggcgagaacggccagcgaaatcgcccccggaatcataatgatcaccgaaagggccgccaatccccagttcacgaagaatccgagccccagtacgatggccaccacaaccaccaccgtgacgataatcgtcaacagtgctcgacgtgggttggtttccctggtccaagaggtgctggctgcgggttttgctgttgaactggccgcggcgtttgtggctgttgtgccatcagccgtgccggtcgtgggccttgccgccgcgctcgtcgcggggtcagtaggggcgtcagacacgttatcggcgacattgccggtcgctgctggacgttgttcgtttgcgtgagtcatatccaccaacatattccctgcttccggctaaagctgggacaagcctgcgcaccgctaatccagcgccgacactggccttgagctgcggacgtccaggccggatgtgaacaggagctgaacggagtctggggaaaccatgagaactcgcgacaatttttgtgaaattgggtgacgctctatgaatcgcgcgctagtattgcgtgagcttacaagacgaggagcctggagcgcggggacgaaggatgaagaactccgtttggaagacgttcatggaattgtcgctggtccgcggaatcgtgccgtggaccgtgttcggactgaccgcgatcgcggcaatcatactgattgttgggctggcattgagcaagaagcgcggcccggcagcagacggcccggcagcagacggcctggcgccggacggcgaatcgtcggcccaatcgcccgtcgacccagataaccagccggccaaccagcctacgaacgcggctgctacggcgtcatccgcagcttcgacggaagagacgtttatttcccatggcctgcgtacgccgcaacgtcgtcacttgcatccgctggccgccgcgctggccgccgccgtgctcgccggcgcgggcggactactggccacatggctgatgtccgacgtgttcatggtgttcggcgtatcgttgggttggccggtgatcctcaccgtcgcgggaggcttcgcgggcctcggcttcgtgctggccgccgccgtgacgttacggggggcccgtcgcgcgctggccgtcgtgctggtgccgctggtgctggcgtccaccgcgcttggcgtggactcgatctacggcgaataccagaccatcggcagtctcgtcggctatacgccataccccccgctcggttcggtcaccgtgcgcaaagcctcgatgagcgtcggcgagtggcgcgacaaggcgcgcaaggacgctctgccatccatgcccgactcgggcagggtgttcgtcgtcagcatcccgaacaccgaatccaagttcaaggcgcgcaaggcgatggtctacctgccgcccgccgcgctgtccgcccgcccgccggccctgccggtgatggagctgctcgccggtcagccgggcagtcccggtcgcctcatcgacgccggcaacatcgccgccacgatgaacgcttacgccgccgaacatgacgggctggcgccgatcgtgctcgcacccgaccaaaacggttcggccatgcacaacagcctgtgcgccgacaccacccgaggcaacgccgaaacctacctcaccaaggacgtggtgaactgggccagggcgacgctgccggtagccaagtcggcccgtatgtgggcgatgggcggattctcgcaaggcggcacctgcaccacgcagctggtgccgcgtcaccccgacatctacggtgcgatgctgccggtggatggtgagctcgagccgaccgacggcagcgtcgagacgatggtccggcgatatttcgccggcgaccgcaaggcctacgacgggcaggtgccggtcaacgccatcgccgccaccggcacggccggccaggcgctgttcgccggcgccggcaaaggggatcggaagtcggtcgccaacatgcgcaccatcgccgcggccgcccgcgcggccggcatggagaccaccgaactggtcgtgcctggcgccgaccatgactggcatgcggtgcaggcggtctggaaccccggtctcgactggttcggcgcgcgaaccgggctgggcgaaatgacgaaatcgttggaggaatacccacaagtggaggtgttgcaatgagcgaagaacaacagcatgggaacgcgcggccggcggccatgccgcagacgcggcggcccttgcgggacgcggaaccctcgcggacgaagcccgccacgacctcccgcgccaccaaaccgcatacggcaaggtccagccatgcggcggaaagctggcgtgaactggccggtgacgtgcggcagtgggcggacgaccaccggctggccgtcaccgccacggcggcgctggtggcgctgaatctggtggcgtggctggtggccgcgatggccggattcgcgtttccgctgcggctcagcaccagcatggccgcattcaacgccggcaaactcatctgctcgctgttcctggcgcgcggcgtcatccaactcatggtcgacgccgtcctgtggctcgtcatgctgtcgatagccgaaccatggctcggccgtgtgcgcaccgtcgtcaccgcgctcgcctgcgcggccggcggcgtgctggcgggcctgaccctgtgcgcggcggccggatggatgttccaggactccctgttcgtctcccgcatgcggttcgcattgagcccgctggtgttgccggtcggcgcgctcatggcggccagcgcgttctgcagccacctatggcgcaggcgcatccgactcgtcggctatgtggcgatcctggtcacgttgctctacagcggcaaccccagcggctactgcatactcgccgccgcgctgatcggccatgccgccggccgtgtgatggccggtccgcccgcgcacgtcgaagccgaatggcactggctgcgcagcacctccttcgaggcgcggcgcatattcgcggccatcgccgtggtactggccctggggccggtcatcgccatcacctcccataaccatgcgggcccgctcagcacgatcggcctgctcatgagcccggtttccgtcgacaacggcatgctggccaaatgcctggccggtgacacgcacggcggatgcttcctgcagttcgatctgttgcgggcctcgatgcccggcgcggtgctgcgctcgttgctgcccaccgccgtgaccctggtgctggcgtggggcctgtatcgcggacgtcggttcgcggccatctgcaccgtggccatcaacctgttcacggtggccatcgccgtcgcctactatctggtcgtgccgctgagcttcgcgccggacggcatggcctccctgctgcagcacggcgcgatcgtggcctgcgtggcgaacgtcctgcccccgctgctgttcgccatcgccctgctggcggcgatgaaacacttcccgatccgcatcggctggtgcaggctggtcggcggcatcggcgccatcgtgctggcctggctggcgtgcgccgccatatacctgatatacggcatcgcccaacccgccaccttctcgccacgcgctacggcctcgtcgctgctggccgagctgccgggacgcttcctgcccatcggcttcctgagccatatgaagctgtcgttcgtgccgcgcactccgatggcctcgatcgtgtaccaaggcgtcggcctggtgttctggatcgtggtgctggccgtggtgatccactggatgggcgacgtgagcgaatcgaacgagcgagcccgggcgcgcgccgaacgtctggtcgaaaccggcggcgaatcgatgagcttcatgaccacgtgggaaggcaacagctactggctgtcccccacgggcagatcggccgtggcgtatcgcgtgctcaacggcatcgccctgacctgcaccggaccgttcggcgatccggcggaatggatggacgatctgaacggtttctcccagcactgtgcggaacgttcgctgtcgccggtgttctacggcgtgcatcgggaacagcgcgacgcgttgctggaagccggctggaactccatcgaggtcggcagcgaaatggtggtcgacccgcgcggctggaagacgaccggcaagaaatggcaggacgtgcgcaccgccatcaacaaggccaagcgcgacggcgtgaccgacgtgcagtccacattcctggaagcgtcgcttgatgtgcgcgaacagatcgaggacatctccgaggagtgggcgcagctcaaggcgctgccggaaatgaagttcacgctcggcggcgtcgaggaactgcgcgacccgcgcgtgcggctgctttacgccatcgacgcggacgggcgcgtgctgggcgtcaccagctggttgcccacctggcgcgacgggcgcatcgtcggctggacgttggatttcatgcgccatcgcaccgacagccccaacggcatcatggagttcctgatcgcgcgcatggccgagcggctgcgtgacgagggcgaagccgatcccacgcacgccgtggagttcatgagcctgtccgcggcgcccctggccggcatgaatcccgatcgggacaacgccggggaggacggggcaccggccagcgaaggcacgcaggtgctccaacacgcgctgcagatcgtggccgactggatggaacccgcctacggcttccactcgctgttcaacttcaagcgcaagttccagcccgccgaagcgccggtctacgtgtgctacccggacccggcggcgttgccgcagatcgggctcgcggtggtgcgcgcctacgtgcccagcgtgacgcccgccgaagtggccggcatgctcagcacgctgcggtcgtgaaggtgtgcacacgggtacgcaggttagccgattcgagcctgagacggggtatctgctttcagagaggtacatttggccccttgcggacaactaactgccttcaaagaggtgcctgaactctgaaatctcgagtatgagcgttgcaatgacaacgtttgtactcggggtttcccgtattcggggcctctttgaacgaagatagcattctgcagaagcccgaatgtacctctttgaacggagaaagcctgacaaggagggcgcggcaagcgctatctccgtttcgaggggctgatttggtctctcccggaggtctactcccgtttcgaggggctgatgccgaagtattcacgctccaaaatcggcggaatggcgttgacgcggatgggtttttacatgcggtctagcggccgaccagccccttgaaacgggagtagacctccggcgggggtcaaatcagcccctcgaaagcggttttgccggtgcagaggtgtcgttgactgcatcgcgagccgcctcgacgtagtaacgtggggcgtatgagcgaacgtaacgaacacaatgacggaaatacgcaaaccgcatacttcgccggcggctgcttctgggggctggagcgctacttccagaacgtcgacggcgtcacggacaccacggtcggctacgcgcaatccaccgtcgaatcgccgacctacgagcaggtatgcgcgggcggcaccgatgcgaccgaaaccgtgaaagtcgagtttgacccggcacaggtcagcctgcggacgctgacattgctgttcctggaggtcatcgacccgttctccgtggaccagcagggcgaggaccgcggccggcagtaccgcaccggcatgttctacacggacgagacgcagcgcgccgtgtatgtggcggctctggagcagctggtcgaccgccagccgcagcgcccggccgtactggtcgaaccgctgcgcaacttctacccggccgaggcacaccatcaggactatctggtgaacaaccccggcggctactgccatgtaccgatcgccgcaatcgcgaacgtaaaacgccgtcaaaagtacgtggaacgcatctgggatctgacgcttgagcagttcgcggtcacgcagaacgccgctaccgagcgcccgttcgtcaacgagtacgacgagaaattcgagcccggcatctacgtggacatcgtcagtggcgaaccgctgttctcgtcgcaagacaagttcgattccggctgcggctggcccgcgttctcccgcccgattgccggtgacttgctgaccgagcatgaggaccaccgcattccgggccgcgaccgcatcgaagtgcgcacgtcggacacacagattcacttgggccacgtgttcaccgacggcccggccgaccgcggcggcctgcgctactgcatgaattccgccgccctgcgcttcgtgccgcgctcgcgcatggccgaggaaggctacggcgactggattgcggttgtggatggggatgatcaggcatgagcatggagaatatcgcgggcgctcgcaaacctgccaagcgtgaggatgagcggacggttgccggcgagcatcgcatgatgcgccgtgcggaccgcgaggtgaccgatcccgagcggatcgccgcgatcatcgccgcctgcgacatcgttgaagtggcctatgcggatgccgagggcctgactatcgtgccgctgaatttcggctttgattacgacgaggcgactggcaagctgacgctctggttccactccgcgccgcgcggccgcaagctcgacgcgattcgcgccgccgccggtggccgactgcccgtggctttcaccatgcagaccgactgcgaggtggtggcgggccgcaccacgtgcaattggggtgaggcgttcaagtcgatcgtcggcaatggcacggcgtcactggtcgaggatctggatgaatgccgccacggcttgcagacgctgatggcgcagcaggcgcatatgccgaatgtggaattcactgatgcgcaggtccgcagcgtcacggtgtggaagattgagtccgactacttcaccaccaaagtccgcaccaaacccgtgcccgcacacatgcatcagcgttagccggggatagcgcgccacctccccactggcgggaggcagcgcgcagcgccggtggatggcccacgtccggacccgatagacttgccgccatggcagcagtgacagtggtaattaccagctacaatcagggcccgttgattcacgaggcagtcgagtcgtcattggccccagacggttcgtccggaacggatcatcatcgtgaacgatgggtccgatgaccacgcatccgtcgagatgctgaacgccactctcgacgattgccggcacggggcgatggatgcgaatggtgtggccatcgacctcatcggccaggcaaacgccggtccttccgccgcgcgcaaccgtggcatcgccgccgccgaaacgccgttcgtagtggtgttggatggcgatgaccgtttgcggccggccttcattgagcgcacgttgtcgatgttgtccgccgacaaaacgatggtcgccgcattcggctggctgcagactttcggtgtcctggaatcagtggtccagccgactggtggcaatgccgccgcgttcgtgtcgcataattgctgcccggccacgtgcatgattcgccgtgtcgcgtgggagtgctgcggcggctacgacgagtcgatgcgcggcggcttcgaggactgggacttcttcctgtcgttgttggagtgcggattgacggtggaaaacgatatctgcggtgctggggttactggcggtactgagcatgtcggaggttttgggagtgcctgggatacagagaatcccgcaaaagacgcggcccatatcggcatcgcccccgagccgctgatcgagtaccgcacggccccggcctcctcaaacgtgaccagcatgaccaagcgcctcgatctcatgcgcttcctgatcgccaagcaccgcgatctctacgccgcgcacatcgccgacgccatcctcggcgttgaagccatctccatgagccgcttaaccatgtgggaatcgttgatgtgcggtgacacctccgccagccaagccttcatgacccaccccacctatggcgacggcgtaatggccgccgccgtacgcttgcggagttgagaggcatcagctgaccaaatgccgatagagctccggatcgattggccgggccaaccgcaggatcgacagtgtgaccttcacgctgccttgtccgcttgcgtcaggtttggtggtgagttgagggttgtcaaacgcggcaacgtggccaacgtagtagtacttaccctcggcctcttccgccttgcgcataacgaataacgggacgaaatgcgtctggccccaattcgggccaatgccgttaagcgcccattggaattcgggagactgcggagttcgtccattcttgctgaagtatttcatttcctgtgtgctcaggaattcatcttcgtattgacttgccgcgtatttcacgaagatgggcatggtattggtttccttgtcgaggaggtaaccacccacgttttgcggagtattctccttcttccatccgcacagtcgcatgacgtctgccatggaatatttgcgttcgtacaagaacatgtgatcaaagacctgttgcctggcggcggcctcacggaatatatctcggcaattggccataccggtgcgcagagtgtccgcaaagaagatacggaacgttctgttcgtggcaagcatatcggcgaatctgctgttcaatcgatatgcggtaccgtttcctgtgccggtgctgttcacggcttcgactaatggctgattgccgaaacgattgcagtttaggccggtgaaatatgagtaatcgagcacgctgatcgcagagtcgaattgcgtgtctgaaccatcggactgcgggaattcagtacgaatcgcatcgagcaattcgctgcggccgattggcgagcccgcactccaatgctgcggtacgtcgtcgtcgaaccgttcgctgacgaaatggcatagctgagcaagaatgaccaattcgtgcggtcgcaatccgggcagcagcagctccgctgccatcttgagtatcgcgtcttcaacgtcggtcaccggctccaactgatcctcaaatgtcgcttcatgatgtttgcctttgcccaggcttttttcacgggaacgcacgaaatcaagatagttgctgcgcttcgatgcgatggtatacggcagtgaggggtcgtagttatagatgtccgtaagcatggggatgcggcccagctcgtaacggacttggcgatactgttcggacagctttttcatgtcggaccagtcggcggtgtccaaagacttaaggatgcgctccttggcgatcgggtcgaaactgatggacgacaggccgattgactttctctgcaggttcttgcgagctctgtcgcggtcgccggtgttgccgtataacgccaccggaatcagatagttgttgttgtaattgccaatgaaatcgataaccacaacgctttctttgtgcgggaatttgcgcagtccgcgcccgagctgctgcgtgaagataatgctggattcggtgctgcgcaacatgacgatttggttgacggcgggaatatcaactccctcattgaacatatcgacagtgaagagataatcgagttcgccttcagtgagcttgcggacgtattcgtctcgctgcgtttgggacatgggcctgccgtcatcgtccgtgctggtaacggcagcggtgcgataggggcgttcagcttgttgattccactgttggttaaacagctgggatagcttatgggcttcctcctgtcggctgcagaacacgagtccggtgaccggaatgttgaactgcccatattcctgcaacttgtcaatgatgtagcggactcgcttttcggtggcaagctgctcgatctcgtacttgagctgtttcgagtccttcgcatcaaggcccttggagacatcgagacgatgggtgattccattcggatcgtcgttggagccaaggtattccgcaacaccgtagtagtggaatggacagagcatgttctcgtccaacgccttttgcaagcgaatttcgtacgcgatgttatgcccgaatagctcgaagatgttgatgccgtcggtgcgctctggcgtggcggtcatgccgagcatgaagtcggcatctttgaaatgattgatgacgcgctgatatccttcggctccagcgtgatgaacttcgtcaaccagaacgtagtcgaattcatcggatttgaattgcgccaaaacctccggctgccgcatcgtctgtaccgtggcgaatacgtagcggcggtcctgttgcttgctggtgcctgaatacaatcccaattcggattcatcgcagccgagcaccttttggtaagacttcattgcagtttgaagaatcatctgctgctgggcgatgtacagcatgcgcttcggctggcattcgcgtacgtcgaatgcggaaaggtacgtctttccggtgccggtggccgacacgataattgcgcggtgctcgccttgttcacgaatcttcttgagattcgccaacgcctcctgttgcatggcgtttggctgaatgtcatgcccctcaagcgactgcagaatctcatgacgcggtggggcgtatttcttgaaatcttcctcatactgtttgatccactcttcggtcagcggaacggaatcagccacctgtgagtcgatttcatcctggaactgcccgaccagctctccatccgccagcgatgagactttgagattccattcgcgttgcgtggtcaatgcggctccagtgagattggaactgccaacgtacaggtcgtaatagggtgtaccgtctttcatgcggcgagaaaagatatatcccttgggatggaatggttgtccttgagccattgcggaaactgaggtattacgggaaccttcccacacgcgaacgtcaacaccagtggtgttctgaagatgcagcagctcccagaatgccctgggatcgttgaaatgatttttcgttgaggtaatcagtgtgcccgctcgggtcgctgtttcatggtgacttctgaagtcttcaaataagctgagcacggcctcagccgagacgaatgcgacagaaatgtcgaaggaatcgctagtagccaaggaattgccgatttcctcgtgcatggtcaatccaccggggcgatttgcgatgagggtcggcttatattcgccgggagcatctgagcgcggctcgatcagacctgagatgacatcttcgaggatcgagggggttggatcagaatcgtgatgttgcgtgttggctggagagtctgaggtgctgaccagatttatagacatgttgccctgttcccttgcgattcggatcgtttgatgactgcctgactgcgctgtggcgcgttcattggagcgtcagttgtttgttcgcgataatcgcgactgcttcgcgatctaccggagcccagttcaatgtcggcatatcagtaggattcagccatcggatatcggtgtgctcggtgagatgcggcgtaccggcgatgaggtgacagatgaatgtggtgagccgcacggttccaaagtcgtaggcgtattcgctggtacatacctcttccgcgacctcaacttcgcataacagctcttcttcgatttcgcggtgcaaggcttgccgcgctgtttcataaggctcaattttgccgccggggaactcccagtatccggccaacgactttcccgggccacgctgggcgcatagtacggtgccgttggtgacgattgcagctcccacgacgttaatgattttgcgttcccgctccatggacaaccaggatacaacgcttcaagatccacaagcgatccacgatcctcggcggttttgtaatatcgatcctgatgcttttgattatgcgatcggacgggtcgaaaatgtcggtgtggacgctgccgactattgtggtagccaagagaagcagtctgtttccgaggtgagattcgggaacggtccgactctcggcagtgatttatctacgcagacaagccaaaggagcctcgccatgatcctcgtcaccaccaccccgtccgtcgacggatacaccatcaccaattaccagggcatcgtcttcggcgaagtggtatccggtgtgaacatgttcaaggatcttggcgcgggcctgcgtaacatgttcggcggccgcagccagggctatgaggaagagctgatgcgtgcccgcaacgaggccatcgccgagatgcagcagcgtgcggaggcgatgggggcgcacgccgtggtcggcgtggacatcgactacgaggtgctcggcgccgacaacggcatgctgatggttaccgcgtccggcaccgccgtgcagatcgcgcgtacggcctgagtccatcgagcacagcctgggcccggactcgtccatcgagccgggctttgtcggttatcgtgacgcattgcactgacgctcatgaccatacgaatcgaagcatacgaccggctgcccgacgcggcccgcgccatccgcgagcaggtgttcatccgcgaacgcgactggcggccggagttcgatgaatgggatgccgcgtccgtgcatctgctggcgttcgattcggtcgattcgtccgatcgccccggcccttccacgcaatcgccctcgccgattcagtccggccagcccgaccagaatcgccccgtggcgacttgccggttctatgcggaccccgaccatcccgaccaacccgggcgatacatcatcgcgcgactggcggtgctgcccgaggcgcaaggcaggcacatcggctcgcggctgctggccgacgccgaacgccgcatcgcgcaagccggcggaaccatggccgccgtgcactcggagaacgac

SEQ ID NO: 1084 - DNA, 14551 bp, Unknown
  R13_10m  MAG No. k141_7525
aatcgccgccttcttcgttcgggtcgcccacaccgtccaccgcgacgaaccgcatcgccggtaccatgacgatggccggcatggtcttcggctgatacaggtccttatactccttcttataatcgaacgccatcgctcatttcccctccgccaccgcatcgatctcgtcctgacgccgccaccgcttgaggtttggcaacagcgccgacatgcagtcctcggcctgttcgacgctgatatggcaggattccgccatcatcggcgcgcatgcggcgaccaattcatcgctattggcatagtcctgaagaaaaacgccgtcttcatagcagtagttgcaataatctccgtttcgcgttccatccggttcggtgccgtgatcttccgggcggtaaaacggcatggcacaactttggcaaaaaccattgtccggcatttccataagcctcgccatcggcacctcaaaacgggtgctgatcagccgaatcatgtcgatgctcggctctgccgttcccttctcccagcgggaaagcgcctgttgggtgacgaacagctcgtgcgcgaactgcgactgcgtaagacctcgctcctcgcgcacgactttgataacctgaccgatcgacatgactacctcccgacatcggaaaacgattcgcgcgtctcgctgtgcgcttgctgattccagtctaagggcatgtcccgttcgccaagcgcgggtacaacaaaccgttgttcgcgcttgtatcccggacgaagaaacagctcggtcgaacctatttcctctccacccccttcaattctcccggttcctctgactcctttgcgagcgccgcggatgggatgagcacgcttacgtatggggttgcgccagacaggacgtcgtcgtagaagcgctgtttggcgtcgatgaagtcgatggaatcctggatttccgcgagctgctcgaccagccgcgcccgcttgccggcgagcatctacttgcgttcggggatgctcggctcgtggaggagcgtaaggggcgcgagtaggagttcgcggctttgctgcggtctctccctcacccggctatactgggagctccctcgtcagagggagcttaaattcggtctggttataggcccatgggcttcttgggctttttgtcgctcatgagcatgaggaagctgcgggactgggcggtgatcatgaagcccgcctcatagctcagttccggcccattcgggttgtgcgtatccacgaccagctgccatttgcggccgtatcgctcatccggcagggtgaacataatcggctcgtaatgcgcgttgaagatcaggatgaagtcattgtcgaccatccggttgccgtaccagtctacctccggaatatccgaaccgttcagatagatcatcatggagaacgcatgcgtgttctgccagtcgtccatatccatgatcgaaccggtgtggtcgaaccattcgacctgcggaatcatgttcgaatcgtcgccgggctcacggcctgtgaagaagcgacggcggtgcaacaccggatgatccaaacgcagatgaatgagtttggaaacgaaggcgagcagttccttgcgtcccttgtcaagatgccagttggtccaggagatctcgttgtcctgacagtaggcgttgttgttgccctgctgggtgcgggccacttcgtcgccaccgcaaatcatcgggataccctggctgaacagcaacgtggcgaacatgttgcgcatctgacgctgacgcaagtcgttgacgtccggaatattggtcgggccttcaacgccgcaattccaagagcgattgttgctctcgccgtcgcgattgccctcgccattggcttcgttgtgcttttcgttgtagctgaccaggtcgttcatcgtgaaaccgtcatgcgcggtgatgaagttcacggacgccaccggtcgacggccgttgacctgatacagatcggagctgcccatgaggcgtgatgcgaattcgggcaacgtggagggctgtgagcgccagaagtcgcgcaccgtgtcgcggtagcggccattccattcggaccagctggacgggaagccacccacctgatagccgccggagcccagatcccacggttcggcaatcagcttcacgcgcgagatgatcgggtcctgctccacgatgtcgaagaacgcggacagcttgtcgacctcctggaactggcgtgccagcgtggcggccagatcgaagcggaagccgtcgacgtgcatttcggtaacccagtagcgcagcgaatcggtaatcaactgcaacgcgtgcggcgagcgcatgagcagcgagttaccggtaccggtggtgtcgaagtagtgctgctggtcgccttccaccagtcggtagtaggaggcgttgtcgatgcccttgaagctcagggtggggcccatatggttgccttcggcggtgtggttgtacaccacgtcgaggatgacctccatgccggcgtgatggtaggccttgaccatggacttgaattcgttgacctgctcgccgcgctctccggaggaggagtaggcgttgtgcggcgcgaagaagccgatggtgttgtagccccagtagttcgacaggcccttctcctgcaggaaggagtcgttgacgaactggtggatcggcatgagttcgatggcggtgacgccgagcttcttcaggtattcgatgacgctcggataggccaggccggcgtaggtgccgcggatgtccggcggcacgtccatgttgaggttggtcatgccgcgcacatgcgcctcgtagatcaccgaatcgtggtacgagatgtaggggtgctggtcgttgccccagtcgaaatacggattgatgacggccgacttcatggtgtgggcggccgagtcaaggtcgttcatcgccgaggtgtcgtccgggcttttgaaccagtaggagaacaggctttcgtcgccgtcgatgttgccttcgatggccttggcatacgggtcgagcagcagtttgttggggttgcatctgaggccgtgcatcgggtcatagggaccgtagacgcggtagccgtagcgttggccgggctggaggccggggatgtagttatgccatacgtatgagttctgttcggtcatttcgatgcgcgtttccgcatcgtgctcgtcgaacaggcatagctcgactttctgcgcaacctgtgagtacagcgcgaagttcacaccggcgccgtcatagctggcgcccagcggatacattgatccaggtctgatctgcatagttttcagtatcccactttcttgtgtcactgatgtgccggggagttgaacgtcaggagaacagcgacggcttgtctttgtcggagttcctggcgatgagtctgcgtaacgcctcatgctggatggcgatcatcgaattggatgaggtgatgcgcgtggcggcaaggtcgctccacggaatccacgcggattccacgtgctcgtccgcgtcgaaatggcgctgctcccgtctgaacgggcccaaatgcaacaccatgatgtgggccagttcgtcggtcatgccttcggacgagtagaaatcgcccacgaagtcaacacccatggtgtcacggtccggcaccacgccggtttcctcggccagttccctcagggccgcgtccatgatgtcctcgccctcgtccatgagaccggcgggaagcccgtaggcgaacatgtccgatccggcacggtattcgcgttcgatgaggtaacggtcggtggacatgtcgtgcacgagcatgaccacacagggggcgtgacgcagcacctggcggccgatctcgtgttccttgccctgcttgtcggtcagagcgatgcgcatgtcgtccacatggaagatgcgcccggtataaacggtttcgctactgatcactttggcgggcacgtccatgtcgatgccgtccgaggaggcgttcagcttatggtcgagccgatgctccagttgttcctgcttgcttcccccaaacatgtcatctcctcggaaaaaacgttttcgccacgtcactatagcgccttaatcccgatgcgcggtaatggacagcgtccatggatcggtcgtgtcgtggaaccactcgacttcaggccttgctccggtcgcttgttcgatggcggccggcacgtcatcgatcgcgtagttgaaccacatggattcgatggcggcatgaggggtgttgatgaagcagggacgcacatggctctcccccgccattccatggccgagcatgatgccttgggtcctcatacgggcttcataccgggcttgttcgatggcgtcggtcaccgggtggtgacgcaaatcgctggttacgtacacgtccgcaccggtggcacgcacctcgttgaacagggagtcaccggagccaggcagaatggccacatactgaacagaagtgtccgaatcgccgcatacctggatgccgagcgcggtggtcatgccatgatcggacacttcgtcgaatacacactgagcgaaatccttcagggcaacaggcttcggcaaacgacccacacgccccaagccgaccggatgagaggcgttggcatcgtcaatcggcacgagtggtttctggtcgatgagtccgaagtagtcggccgccgcctgccccacgccgcgatacgcagcgtcagcattggtgtgccctacccacagcccgcagccgtgctggtagagcctgcggacgatgtcgccccggaaaccgagtccgctcgtctcgtgtacggaacggaagaacaacgggtgatgggtgatgagcaggtccgcgccggtggcgatggccttgtcaatgatggcggaggtcgggtcggcggcgaacacgatgcggtgcacgtcgtggctcagatcgccgacgatgagacccggctcatcccattcctcggcgtagcgcaatgggtacagggtctcgagaacgtcgatgacttgcttgagattcggcatatgtcccattgtagtgggctattgcggcaagggactcattctgcaattgcggacaagccatgctcgtgctcttcattgctcgactatcggctcgtcttcgcctacaaacaatccactggactgtttgctcaacggctcagcacccctcacccgaggggagctagaaattgtcagtgtgcggcgagctgccagtcggaaccgatgccgcacgatacgtccagcggcacggcaaggtcgacggcgtgttccatggcgttgcgtaccagttcggtgacctggtcgccttctcccggcgcgatttccactaccagttcatcgtgaatctgcagaatgatacggctcttgacgtgggcctctgccaaggtctgctcggcgcgaatcatcgcgatcttcatgatgtcggcggcagatccctgaatcggtgcgttgagtgccgcacgttcggcggcctcacgcgcaacacgattggtcgaatgcagggccgggaagtagcgacgccgtccgaaaatggtttccgtataccccttctctcgggcattggccaccagcgattcaaggtaatcgtgcaccttgccgaaggtatcgaaataccggtttttcaacgcttccgcttcacgtggcgcgatcttgagctgctgggcgagaccatacgtgctcagaccataggccaatccgtagctcatggcttttacgtggctgcgctggtcgccggtgatctggtcgaccggcagcttgtagaccatcgaggccacgtatttgtggaagtcggctccggagcggaacgcttcgatcagcgcctcatcaccggacagatcggccatgatgcgcagctcgacctgtgagtaatcgcagctcatcagggcctcgtacccctcccccggcacgaacacgccgcgaatctcacggccggcggcgttccgattggggatgttctgcaggttcgggtccacggagctcaatcggccggtggccgcgacggtttgctcgaaagtggtgtggatgcgctcatctgatgtattggtggcatcgatcagcgtttggacgatctgcttgagcttgttgatctctcggtggcgcagcaacgccccgaggaaaccgttggcccgctcattgtccactgatttgacatacagatcctgcaatgcggccgcattcgtggtgtatgagccggacttggtgcgtttggtgggcttcaaacccatatcttcgaacagcaccttctgcaactgcttgggactttgcaggttgatttcggtgccggcatactcccaagccatttcctgcgcctgacgagcctcggcggcaaactggtcacgcatggaaacgagtcgaacgctatcgactttggctcctgtgtgctccatgccgtgcagcacgcgggaaacaggaagttcaatcgcgcgcatcagccagcattgttcacgctcgtcgataatcggcccgagcgtgacggcgaggctgcggataatggccaaatcgcgcagacgatgttcgttcggatcttcttcgacctgatcgtcatcgaagtccaacgtgccttgcgaaggctgttcggtttcggtgaagtggatgtcgaggaagtgctcggccgcctgcttgaggctatcggcgtggaaatccggttgggtcagatacccggcaagcttggtgtcgaacatcggcaggtccatgtcaagatctaccgcgcccagaagatgcagcaattctttatacccatgcacgatggtgcgggagtgttcgcttttcaggaaccgcgcaagctgtgctcgcagggtatcggtgattggaaggggcactatggccgctgatgttgccgtggccacggcaatggtttgtgccgtggcacgccccggcctttcgtcgccccatgcggccacggtccaagcgcggccgaccgcgtcgccgcagacggtatgccgctgcgatccatcgccatagtcggaaaccgtgaaatcggcgatttcaccgggaacattgatctcgacgcgatgggccttgacccattcgtcgaactgctccgaagaggtgatgctcgtgggttccggcaggttcagatcgagactgttatcctgctcgtcctgttcattattcgtagactcgccggctccgtatgtgttggaaaccttggcaccggtattgaaggttttcagcacgcgactcctggtacgcggtccgaattcaagttccttgaacagggcgtcgatttgtgccacgtccacggtgccgaatgtcagatcctcaatatcgacgccaagatcgacatctcgtaccagtgcgttgactttgcgattgagcttgacctggtcgatattggcccgcagtgattcgccttttttgccgccgatttcatcggcgtgctcgcaaatgccgtcgagggaaccgaattggttgatccacttggccgcaaagccatcgcctacaccgggcacaccgggaatattgtcggcggtttcgccgcggagcgccgccagatccggatattgtgcgggagtgactttgtatttgtcgatgatggactgcggcgtcatatgcttcaggtctttgaagtgatgacccgggtacaacacggtgacgttgtcatccaccagctggaaggcgtctcggtctccggacaataccagtgtgtggtagccggccttgtctcccatggtggcgagggtggcgatcacgtcgtcgccttcgaatcccggcttctcgatgtaggtgacgccgagggccgtgagcatgcgttgaatcaatggcagctgggtgagcagctcttcgggagccgcctcacgggtgcctttgtattgcggaagcatctcattgcggaatgtgccgcccttcacatcgaaggcgacgcccagatggtcggggttctccgcatcgatcacctgcgcgagcatggtggcaaaaccccagacggcgttggtggcctggccgctggaagtactgaagttgtcgaccggcagggcgaaaaatgcacggaaggccagcgagtggccgtccaccaccagcaatgtttcattggtgggtacggtcacgctggcctctcccatagtgtgtttgtgttgctttacgactcagcacggtgatgccgataatcagcgttcgcccgaatcagaaggcttcggatcgccgtacttggcgatgatggcctgagccaggcgcttcttggggatgcgctggtccatggaggtcttctgaatccaacggaaggcaccctgctcagagaagtccgccttgtccatcagcagacccttggcgcggtcgacgagcttgcgctcctcaagcgtgtcttcggccttcttgagcttctcttcggtttccttgagctggtcggtggtttccttgagcttgcgttcgctgcgctccacgttgtccagcagatcgttgatctcggcgaaacggcccatggccacctcgagggtcggcagcaacttggattcctcgtacggcttggtgacgtatgccatggcgccggcaccggtggccttcttcaccagatcggtctgggagaatgcggtgagcatgacgacaggggcgatgttctcatcgcagataatgccggcagcggcgatgccgtccatacgcggcatcttgacatccatgcacaccacatcagggcgatacttgcgggtcagttccacggcttcctcgccgttggcggcctgaccaacgacctcataaccgttgtcttccagcatggcgaccagatccatgcggttcacggcttcatcctcggccacgacgacggtacgcggaccatcctcggccacggccttgcgctcagcaggttcgctttcatcggctacggccttgagttcttcgtcggtcagcacctcatcgacgttgatactcggttcttcggacttcttccttgcagccatgccaacctctttcttgaattacccaacaatggggttcgtaataatttcagcgaactcctagctaaagtgccctcggtgggactcgaacccacactgcgcagattttgaggctgcttcctctaccaattgggatacgagggcgtgcctaagcactctgaagagagtagcataccgattcgactcctgcgacacaagacacgcgccagtcctccattccccccggtaaaacaggcgaaacacgtcgatatcgtggacggcgtacccgtgtgttgcccgttcttctgcgtggtttcaccgcttacaatgggctgtagtttcgatgtatcgcttttgttaggagggcttatgagcaacgaaacttaccgtcagttcgatccctggcgcccctctccggtcaaggagatttcccgtagacagattgtggagacgcattatttcaatgtcgatcacgtctcctatgagtcgaatcagatcggttcgtttgaacgctactttgttcaggagaacaatggcgacactgtggctgtgctggccgtcaccgatgacggcatgattccgctggtcgagcagtatcgcatcgccaaccatcgttggacgttggagattccggcaggccacgccaacaacccgtccgaacgcccgaccgatgtggctaagcgcaagctggccgaagaggctggtttcgatgcctccaagcttacacagttcacccgttttatgaacacgccgagctattccacccagcacaccgcaatcttcttcgccaccggacttaccccggcttcccgtcaggaaatcggcccggagactccgcgttccgacgtgcgtatggtgtcggtggacgatgcctatgagatggtggtcaatggcacgattgtggatgccaagaccatggtcgccattctgcgtctgaagagcggcacgctcgatcatctcaacgactagtcaccacgctcgatcatcgcggtgactacgtgccattgcaatcaccgcacaatcgcaacataacggataacgaaagccccccatccactttctggatggggggctttcgcgtgctatgtgctagctgtcagcagctaccagcggcctgaaatcagtcgcaagcgccaacggtgtgcacgtagatggagtcggtgcggcccggctggtgatcgccctgagcagagctcaggatgacgatcttgtcgccgtcagcaaccttgccggcgtccttgaggatcttgtccgtgtagatcatgagatccttacgggacttgtcgtggtagtcctccttgagcaggaaggcttcggtgccccaggacagagccagccagtggtaggtgtgctcgttgctggtcaggccgtagatcggggcggccggacgctcacgggagacgcggtgcacggtggcgccggtctgggtgtaggcgacgatggccttggcgttgagcttgtcggccaggtccacggcggcggaggagacggcgccggtggaggacatgtcgaggttcttgagctccgggatgcggtcgaagccgtggtcggtggcgtagccggagatgcgcgacatggtggccacggtcacatccgggtacttgccgacggcggtctcgttggaggtcatggtggcgtcggagccgtcgaggacggcgttggcgcagtcggaggcctctgcacgggtcgggaccggggagttcaccatggagccgaggacttcggtggccacgatgaccggcttggcatactggcgggccagctcgatgatgcgcttggtggccagcgggacctcttccagcgggcactcaacggccatgtcgccacgagcggccatgacaccgtcgaaggtcttgacgatctcttcgaggttctccagagcctgcggcttctcgatcttggcaacgatcgggatgcgacggccttcctcgtccatgatctcgtgggcgcggtcgatgtcggtggcgaaacgcacgaaggacatggcgatgatgtcggcaccggtgcggatggcccaacgcaggtcagcctcatccttctcggtcagagccggcagggagacggcgacgcccggcaggttgatgcccttgtgggaggacacaggaccggccacgacgaccttggtgtacacgttgttgccctcgaccttggtgacctcaagacgaaccttaccgtcatcgatcaggatcgggtcgcccgggtggcaatcgcccggcaggcccttgaaggtggtggaggtgatgtgctcgtcgccctcgacgtcatcagtggtgatgacgaattcctggccgagctgcagctgaaccttgtcttcgccatcggcgttcttcttgaaccaaccgcagcgaatcttcgggccctgcaaatcaacaagcgcggcaacgttgcgaccagtggcttcgctggccttgcgcacgttgttgtagaccttgaggtgatcctcgggggtgccgtgggagcggttcagacgagcaacgtccataccggcttcaacgagcttcaggaggttgtcgtaatcctcggtggaaggaccgatggtgtctacgatcttggctttacgcatgaatgcctgcctattcttgttcaatttggttcgaggcacgattgccccatttgccgaaacccagtctactagcgcgagccgactcatgacaagttttcttcacggtgtgttgtgagcgctcacattgttgtgttgactaggtttaagggttgtattctctaacggtttcaggccttttcagcgctttccatgctcttcatcttgatcacggaagccacggatgcgccgccaattgcgaccacaatcacagccagcgacagccatgtgggcacttccggcacccaatggatgccttcgccgccgttgatgaacggcaaggtattgccgtgcagggcctccatgatgagcttgacgccgatgaagcccagcaccacggacaggccggcaggcaggtagacgagcttgtcgagcagagcacccagcaggaagtacagctgctgcaggccgagcagggcgaacacgttggaggtgaacaccaggaacggatccttggtcaggccgaagatcgcgggaatcgagtcgaaggcaaacatgacgtcggtggtgccgatggtcaggaacacgatgagcatcggggtccagtaacgcacgccgttcttggtggtgcgcagcttctcgccgtcatagtcgtcggtgatcttgatgatcttgcgcagattacggatgatgccgttttcgtgatattcctcgtcttcatcgccgccgagcaccagtttgacggcggtgtagatcaggaaggcaccgaacaggaagaacacccacgtgaagcgggcgatcagggccgcgccgatcagaatgaaaatgccacggaaaatcaaagcaatggtgatgccgatggacagcacatacttctgaatctgcttgggcaccgcgaagttcgacatgataatgacgaacacgaacagattgtcgatggacaacgagtattcggtgagccagccggaatagaactcgatggcgggcctggagccggcgaagaaccagatgcatccgccgaagatcaacgccataaccacgaagaaggcgatatgctgcacgcattccttggtggagggcacatgcggtcggcgcccgatgacgaacaggtcgacgatgaagaacagcgcgagcaccacgaaggtgatgatttcaaatgcgagtggggtttctgccatgattccctacactaacccatgtatgtgacgggtcatcgccccgcctcggtcatctgccggagctccttcttgagatcacggatctcgtcgcgcagacgggccgcgagttcgaactggagttgttcggcggcggtgtgcatctgttcgctcagttggcgaatcaggtcggcgaggtcctgcgcgggcaggccggccttcaggatctcctcgtggcgtttgtctgcctcgttgggatcgagtaccggcacgcccaggtgtgtgttgccggccttgcccgcgttgcggtagccaccttcaagcaaggtctgggtgtccacatcctccttggcgagcatatcgttgacatcgctgatcttcttgatcaggggcttgggatcgatgccgtgttcccggttgtaggcaatctgcttggcgcggcggcggtcggtctcgtcgatggcttgccgcatggcttcggtggtctcgtcggcgtacatgatcaccgtgccggacacgtttcgggccgcacggccgatggtctggatgagcgaacgataggagcgcaggaatccttccttgtcggcgtcaagaatcgccaccagcgatacttccggcaaatcgaggccctcacgcagcaggttgatgccgacaatcacatcgatcttgccttcgcgcaacatgcgcagcagttcgacgcggcgcaacgtatccacatcggaatgcaggtattcgaccttgatgccgcgttccagcagatagtcggtcaaatcctcggccatcttcttggtcagggtggtcaccagcgcacgctcgttcctggccacacgggccttgatctcggcgagcagatcgtcgatctgccccttgaccgggcgcacgtcgatcttcgggtccagcaggccggtcggacggatgatctgttcgaccaccccgtcggacaagcccaactcgtagtcgccgggcgtggcggacagatacacggtctggccgacgcgctgcaggaactccggccatttgagcggtcggttatccatcgcggagggcagacggaagccgtgttcgaccagcgtgcgcttgcgggaggcatcgccctcgtacatggcgccgatctgcggcacggtgacgtgtgattcgtcaatgaccagcaggaagtcatcggggaagaagtcgagcagcgtgtgcggtggggtgccggcggcgcggccgtcgaagtggcgcgaatagttttcgacgcccgagcacacgcccacctgggtgagcatttccagatcgtaggtggtgcgcatgttgaggcgctgcgcttccagctccttgccttgcttacgcagttctgccaggcgttcgtcgagttcctcgcggatggttttgagcgcgcgttccatgcgttcggggccggccacgtaatgggaggccgggaagatgtggatttcgttttcctcgtcgatctcgtcgccggtcagcgggtgcagcgtggagatgcggtcgatctcgtcgccgaagaattcgatgcgcacggccagttcctcgtagacggggatgatttcgaccgtatcgccccgcacgcggaacgtgccgcgggtgaaggcgatgtcgttgcgcttgtactgcatggccacgaaccggcgcagcaggtcgtcgcgattgatctgctggccttccttgagaaacagcatacgcccggcgtattcctcaggagtgcccaggccgtagatgcaggagacggtggccacgaccacgcagtcgcgtctggtcagcaggttggccgtggcctgatggcgcaaacgttccacatcgtcgttgatgttggagtctttctcgatataggtgtcggtctgcggtatgtaggcctccggctgatagtagtcgtagtaggaaacgaaatagctcaccgcgttgtcgggcatgagctcgcggaattcggcgcacagctgcgcggcgagcgtcttgttcggctcgatgatgagcgtgggacgttgcagccgttcgatcagccatgcggtggtggcggttttgccggtgccggtggcgcccatgagcaccacgtcgttctcgccgttctcgatgcgc

SEQ ID NO: 1085 - DNA, 25718 bp, Unknown
  R13_10m  MAG No. k141_7603
ataatccgcaaggtgcttttgcgtaggaccaaggcgccggcgatgacacgggacaaccacaacagcgaatgacgcacaacgggccgtccgggacacccccgtaaacggtcgcgtcgttttccattggtgtcattacggggtccgggtcccgcaaaacgttggaaaatcagcgtttcttgaacggtaaggtaacatatggctgaatttgtgtttcagatgatcaaggcccgcaagtcttacggcgaccgcgtgattctcgatgacgtgaccctgagcttcctgcccggcgcgaagatcggcgtcgtgggcccgaacggcatgggtaagtccaccctgctgaagatcatggccggcctggagaccgtgagcaacggcgaggccacgctgaccccgggcttcacggtcggcatcctgcagcaggagccgccgctggatgacaccaagaccgtgggcgagaacatcaagatggcgttcggcccgattgccgagaaggtcgcccgattcaacgagatcggtgaagaaatggccaacccggacgccgacttcgacgcgctgatggaagaaatgggcaagctgcagaccgagatcgacgccgccgacggctgggacctcgactcccagcttgagcaggcgatggacgccctgcagtgccccgatccggacaccccggtcaacgtgtgctccggtggcgagcgccgccgtgtggccctgtgcaagctgctgcttgaggccccggacctgctgctgctcgacgagcccaccaaccacctggacgccgagtccatcctgtggctggaacagttcctgcaccagtacaagggcgcggtcatcgccgtcacccacgatcgttacttcatggacaatgtggccgaatggatctgcgaggtcgaccgcggccacctgtacccgtacaagggcaactactccacctacttggagaccaaggccaagcgtctggagatccagggagccaaggacgccaagctcgccaagcgactgaagaacgagctcgactgggtgcgctcctcccccaaggcccgtcaggccaagaacaaggcccgtctggaacgttacgaccagatggagaacgaggcgcgcaacaacaagaagctcgacttctccgagattcagattccggccggcccgcgcctcggttccaccgtgcttgaagccaaccacatccataaggctttcggcgatcgcgtgctcatcgacgacctgtccttcacgctgccgcgcaacggcatcgtcggcgtgatcggcccgaacggcgtgggtaagtccacgctgttcaagaccatcgtgggcctggaaccgctgaccagcggcgagctgaagatcggcgacaccgtcaaaatcagctacgtggaccagaaccgtgaaggcctggacccgaacaagaacctgtgggaggccgtgtccggcggcctcgacttcatcgaggtggccggcgtggaagtgccgacccgcgcctacgtggccagcttcggcttcaagggcgccgaccagcagaagctgaccggcgtgctgtccggtggtgaacgcaaccgtctgaacctggccctgaccctgaagcagggcggcaacctgctgctgctcgacgagcccaccaacgatctggacgtcgagaccctggaatccctcgaaaacgcgctgctcgagttcccgggctgcgctgtggtgatctcccacgaccgttggttcctcgaccgcgtcgccacgcatatcctcgcgtgggaaggcgacgacgacaacccggccaagtggtactggttcgaaggcaacttccaggcctaccaggagaacaaggtggcccgactcggtgaggatgcggcccgcccgcaccgcctgcacaagaagcttgtgcgcggctgagatacgccggcattagtgccacaacgcgctttatacgtcgaaagccgtccctcaggggcggctttcccataattgcccccatgactgccccgccccgcatcccataaaatcccacagtcacctacggcaacgcaccggcaacacaccggcagtgcagcagcaacgtagcggcaacgcaccgcataaccaaccgtttaccttccaaacagtctcgttacatttcgctcccggaactcttaacccccaccggatagactgccaaccataggttggaatacgataaccgaatatcgaacactgcagaacaggaatcgaggaacgccatggctcaggcaaccaccgtaactccattggaccatctggtgaaggtgctgaagttgggcgagccttccgcttaccgcaatcacacatacatcaatggcgagagtatgtacttccccactggccgcgtctacggtggccaggtcatcgcccagtcggtgatcgccgcgtccaaaaccgtgggcccttcacgcctgccgcattcggtgcatggctatttcattgccgccggcgatattcgtcaagacctgctgtttgacgtcgagaaccttcgcgacggccgctcgttctccgctcgtcgggtcaacgtcacccaagccgaggggtcgattctcacggccatcgcctccttccaggagaccggtcaggagggtgtggaatttgccgatccgatgccggaaaacctgcccgatcccgaaacgttgacttccgccaaggaactcatgcagccgttcgccgaaaagtcgccgttcgccaatttctatgtcgagaaatcgccattcgatatccgccacgtgacgccgaccgtgatgctgcgcgcagacaaggattccgccgagcatgattccggcaagcagatggtgtggatgaaggccgatggccacgtcgatgtgccgcaggtcatgcatcgtgcgatgctggcactcggctgcgatcaggtgatgatggagccggtgctgcgccgcgccggactgtcgatttccacaccgggcatttcctatgcgtccatcgaccattcgatgtggtggtatcaggatatcgatatcaacgaatggcatttatatgtgcaggatacgcctatcgccgcgcacggacgcggactcggcatcgccaaagtgtatgcgcagaatggcgacttggtggcggccatcgctcaggaagctatggttcgcgtgccgcaggagtagtgggaatcggcttggccgatggtgtggttttttcttctctcccccagtcggctacgcctacggcccctcgccagagggggcttatcacggattatcgcttgtaggcttgggctatgtcgctacggcgcttggcttccttgattttcgggttttcggggccttcgttcggcggtagctggcacaaccattcgccgataatgccgatgatcatgtcggcgatgcacaccacggccacgattgcgcactcggtgacggcgtgtgcatagaaatccgcctcgatatggctcaggctcatcacaatctgaccgccataccagccggcgagcgttgcgcccgccaatcccagtgcctttgccagcaccagcgtatacaccgcgatagtgggattgatgaagctatgcggacgcttcttggggtcggtattcgcgtatttatgcacttgcagggccaagatcagcacgataacgcccagcacggccagcaatccggtcacaatccaaggcgcaccaatcagcgacagtcccgagctttcgccgtaggaggccagaccgatacccgccaacaggcccagcacggcaccgatcacatactgccaccatggtgttcgccgtgttttcatgtccggcctccttatcgttgcgttgctgtttgctgtttgcgaacggccctcgcgcctgggctgttcatcttgatttggttttcgtcactgccgtgcccggctgttcgaggccggataccggtccgtcaccgtctggtttctagcctaccgttcgtaactggttctgccatcagctcaactgttcgacagtatccagttgtccgatagcaatccgacctgtccggcatccggtgccatggccaaaaggaaggccaccgggtcgccgcccagagaagcattcgggtccatatccagccaaggtgccaataccgacgcatggttacgggccgacggccaaggaatgctgcagttgggctcgtcggaagtcacgccttccatgtcgacaaggtcaaggtcgactgccagatcatgaacactttcgatgctgcccaatacggcaatcaggtcggcgggcggcaacttggtttcgatttggatgaccgcgctcatcgcgtccgggccgtcgaaatggctgacatggtagagcggcgagatgccctgtacctgattgccaggaacactgtcgatggaaacgatggtttcacggaacagccgttcggcatcctgcgaggtggaatccagcgaaataatcgccttgcgtgagacgggtgccgactccgacgctgatttttgcttgactgcatgcccgccgagcatccagtcttcgctctcgagctgcacggcgttacggtccggcgcggtggccagcaaatcggctacaggcccctcatgggctccggcgagtttggcgttcggattcagcgccgcccagggagccagcacaaacgcgcgctgccaagcacgcggatggggcaatgccagatccggatccgcgctggtgatgccatcaaagtcgataatgtccaagtccaacggcctggaatcccaatgattctcacgaattcgcccatggttcgcctcgatgctttgcaacgcggcgagcaattcgtggctgcccattgtggtttcaagctccaccacggcgttcaggaaatccggcgtaccgtcggccatgccccacgcggccgtgcggtaaagcggcgaaataccggtcacctgtgtgccgagcagcgcgtcaatctcccgaacggcggctcgcaaggtggattccacctcgcccacattgccgcccaaggccaccaccgcgttatggatggcatgctcttcagcagtacgtccattatcggtggcacgcacgcgcgagatggagaccgatacatctgcaaaagccacgacgatgggtgcgtgaggcttgtgcacggtgacgtcgatggaggcgacggccggcgcatcggcaaggatctcgtccgcgatacgttgggccagacgctcgatcaggtccacatgagggccttcgatgacagccgtgatgtccttggccacacggccgtaatcgatggtgtcgttgagatcgtcggattgaccggctgcggccagatcaaggtgcagggtgacatccacgacgaaggtttgtggccgttcgtgttcgaaggcgagcacaccgtgggtgccgttggcatgtacgccggtaagagtgatggtgtccattggtaaggctttctgctcaaatgctcccctcagtcgccttcggcgccagctcccctcgtccgaggggagccaagacctagaagcaaccaaaaaacggagccaggggaatcatgcgtattcgcgccaggtgttgccggcgatgacggcggcgcggcttttggccacgtcgtgtacgcgcacggcccatgcgccatgttcggcggacagggcggacaaggctgcggtcacgtcatcgcgctgggccatgatcggcccatcagcaccggcagcgcccgcctcggtaagcatcgccgagatgaagcgtttacgggactggccgatcagcaccggatatccagtggcgcggaaggtctcgagtccggtcagcagcggcaggttgtgctcgatgccgggcttggagaaacccaggcccgggtcgatgataatgcgctcaggctttacgccggcggccagcacaccgtcgacttggcgcatgagttcgtcgtgtacgtcggtcaatacaccgtgctcgtagacggaggtgtcctgatcggggttcgcgcccttggagccggcgagccaaccgcgccaatgctgcacgatgtacaggcagtcgtggtcggcgaccacatgcggcagttcggcatccagcgtgccaccggaaacgtcgttgatgatctgggcgccctcgctcagcgcagcggcggccacggatgcgcgcgtggtgtcgatggacagtatggcaccggccggaatcaatgtcttgacggcaccggcgatgcgggccagttcgtcggcctcggacacgcgcttggcgccggggcgcgtggattcggcgccgatgtcaatgatgtccgcgccggcggccatcatgtcgcgcccgtgctgggccgccttggccgggtccagccacaggccgccgtccgagaacgagtcctcggtgatgttgagcacacccatcaccatagtgtgcgtactgtcatgcaacgcctgcaaatcagtcattatgtttccccttctatgtaggtcccaagtgagctccctatgatgagggagcttagtagacactatttatccaaaatgaggctcatggcttcggctcgggtggccggattgcgcagcatgccgcgcaccgcagaggtcaccgtgcgggcggaagacttcttgatgccgcgcatagacatgcacaggtgctcgcattcggtcaccacaatcacaccacgtgcgcccgcatactcgaccagcgcgtcggcgatctgctgggtcaaacgctcctgcacctgcggccggcgagcatacacctcgaccagtcgggcgagcttgctcagccccatcaccccgtccttggcgggaatatagcccacatgggccacgccgtggaacggcagcaggtgatgctcgcacaccgaatacagttcaatgtccttgaccagcaccagttcgtcggtatccacgtcgaagtgcttctccagcacatcggccggggaagcctgcagaccggcgaacagctcgcggcacgcgcgggcgatacggtcaggtgtttccaccagcccctcgcgctcgggatcctcgccaatcgacttcaggaacagacgtacggcctcgcgcacgccttcctcgtcgtatgtgcgtttctcccgctggcaagactctatatattcgttcatctcatctctcccttgtcattgtccacaacgacgtcggcccggcctgcgtacgtgagaaaccacatgaacaggtcgggccgaatcgtcatcgtgtctactcttccggcttcatgccgaccgagcgcttaaggctttcgggaatctccaccggcggcttgtccgagtcggggcgacggtcgttggacagccacaccgggcggaccggagccttcttgatcggcgcgaagatcgccgcaagttccttctcgttcagggtctccttgaccaacagctggcggaccagctcgtcaaggatctcgcggttgtcgttgatgatggtccacgcctcggtgtgcgcggtctccaccagcttgagcacctcgtcatcaatcacttcggcggtgcgatcggagtacttgcgcggctgcagaccgtccatcacagtggtctggtcatcgtcggaaccccacttgatggcaccgagcttgtcggagaagccgtattcgatcaccatcgtacgggcgatgttcgtagccttctcgatatcgttcgaggcaccggtggtcgggtcgtggaagacgatttcctcggcggtgcgaccgcccatcgcgtaggccatctggtcgagcagctggttgcgcgactgcgagtagcggtcggaggtcggcatgacggcggtgtagccgagggcgcggcctcgcggcagaatcgtcaccttggtcaccgggtcggtgttgttcagggcggcggctaccagcgcatggccaccctcgtggtatgcggtgttgcgcagctcttccagagccatgcccttggacttgcgcttcggtccggcctgaacgcggtcgatggcctcgtcgatggcgcggttgtcgatcaactgggcaccggcacgggcgcacagcaacgcggcttcgttgagcacgttggccagatcggcaccggtgaagcccggcgtgcgcacggcgaccatgtgcaggtcgacgtccggtacgaacggcttgcccttggcatgcaccctcagaattgcctcacggccttccagatcaggggcggccacgcccacctgacggtcgaatcgacccggacgcagcagagcggggtcaagcacgtcagggcggttggtggcggcgatgatgatgaggttggtgtcgttgtcgaaaccatccatctcgacgagcagctggttcagcgtctgctcgcgctcgtcgtggccaccgcccatgccggagccacgcttgcggcccacagcatcgatttcatcgatgaagatgatggcgggggcgttcttcttggcctcatcgaacaggtcacgcacacgggaggcaccgagacccacgaacatttcgacgaagtcggagccggccatcgagtagaacggcacgccggcctcgcctgcgatggctcgggccagcaacgtcttaccggtgccgggaggaccgtacagcagcacgccacgcggaatacgagcgcccagcgccttgtacttggacggatccttgaggaagtccttgatctcctcgacttcggccacggcctcgtcttcaccggccacatcggcgaacttggtggtgggggtctggccatcgagtagcttgccgctgttcttcttgccacccatgccgagcatgccgccggcaccacccatgcggctcatcaggaaccagaatagggcgaagaagatgatgaacggcaggatcgaggtgacgaggtagctcagcatgctggtctgctcgatattcgaggtccagcccttttcgagatcaccgttctccacggccttggccacctgtgcgccctgcgcgaaggtgtagtagaactgcacgttcttgccgtagttggtcaccttgccggtgtcggcgtttttcttggtgtagtcgttcttcagcttaaggcggacgacctgcttgttgtccgtgatctcggcgtaggtggccttgccctgattgatcagcgcgaaaccatctttggtgtcaatggtcttcgtgccaccgccggcgaacatctggaacatcagcacgaccatgaccacgagtacggcaccccacagccagggggactgccatatcggccggttctcgttgttgttgcctttgccattgttcccgttattgccacggttgaacgggttggtgaacgggttgccgttgttacggttgttgttcgggttcggattattgccgttacccggcccttgcgggaagctcatgcttgcactccttggtagacggacggcttgaggaccgcgatcgaatcgaggttgcggtagcgttcgtcaaagtcgaggccgaagccgacgacgaactcgtccggaatctcatagccggcgtacttcacatcaacgtccacttctcggcgggaaggcttgctcagcaaagcgaagacctccacggaagcggcaccacgacgtttcagttctgcgaccagccacgcgagcgtgcgtcctgaatcaacaatatcctccacaatcaaaatgtgccgtccgcgaacatcggcggacaaatcctgcctgactgtgacctcaccgctcgacactgtgcccgagccatagctcgaaaggctcatgaagtcgatctgtacaggaatgctcatggcctgggtgaacgcgaccagcgtattcacggcccctttcagcaccgcaacgagcagcggattcttatcgcggtaatcctcgctcgcgagagcggccatctcgtggatcttggcatcgatctgttctttgctgaccagctcgtggtcaatatcttcctcaacgtcagcgattcgcatgcgctccatcttggcacacgcgaatgacgtgtttcttgcgattggctgaataacctctgggaagtgagacgccgccttggccatgccaatcgacgaccagccggtcgatggcggcaatctgggcggcactggcgttcacaccggcctggctcagcgcgtgagcgatgacccgcaaccgaatcgcctctggctcacgtgcaatacgtttgatgccgatcatcaggccgatgccatggcccggatcgttggtatcgtctgcagcacaggctcgtggcgtatcggtcgataccgctgccgacgatgccggccggtcaactgccgtaaccgcctcccccatcacctcgtcggatcgctgatccagatactccttgtccattctggccaaccgtgcgctttcggcgaaatggcgggtgacattgaatccagcgaatcgttcgatggccggcagcaggtcgtggcgtacccgcgagcgcaacggatagtcgtccggcaactcgccgtctaccgcatcgccattggtggggtcatcccaatattccacacccaagtcttcacagaggccggtggtttcgtctcgagtaagggtcagcagcggccgcgcaaaagtcacgccactgcgtgtgaagacctgcggcatgccggccaacgcatccacgccacggctgcgcagcagtccgatcaatacggtttccgcctgatcgtccatagtgtgggccaacagcacggcaatggcacctgattcacgcgccgcggcgcacagctcgttgtaccgggcctgccgtgcggccgcttcgaggccctcaccgcgtgcctgcacggttgtgttgcgcacgatgaccgggcccagtcccaacgcacggcaacgatccgcggcctcgccggcgacctgttcggaaccctcctgcaagccgtgatccacaatcacgacaccgcaacgcacgcccatggacgtgcatacgatatggcttaccgcggccagcgccatcgaatcgcgcccgcctgaacaggccacgagcacgagtggtgcatcggaggcaacggcatggtccccatgctgcgcgaattcgggagcctgcacatcgcatagttccacggcgctcagcgttgttcggaccgcgcctacggccttgcgcaatcgtgcggaatatgccatgtactcaccacccttttctggttataggcactcgtgcgtttatggacgtttacggcctttgtagcccttgatggcccttgatgcctcttttacagccccgcgagcttggtgatgaacgagtcgatggcgctacgcgcggcggcataatcctcaggattgttgaccaccacggcaaacgacaacgctcccccattggtacgggacacattgccggccatcgacgtgaccgtgccgaggctgccggttttgacgcgcagcagaccggccacggcatcatccgtataccgatcctgcgccgtgcccaccaaccccgcgatggatagaccttccgcaccagcagcaccgctctcggtggtcagattacgttgttggacggccgccagcgtgcgtacggtgagccgggagccgggagacaggccggagcaatcggccatggtcagaccggatgtatcgagaccgagatcgttcagagtggatttgaccgcttccgtgccgccttcaggactgtttgtcgctgatttcgccaaggcggtgagtctgccgaactcctcggccagcgtattgtccgaatgccgcaacgtgtatgccatgatttcggacagtgttgccgaactcaccgaggccaaaggcgtttcgccggatggagcggtgtttgccgtcacgtctccggtaacggccacaccgttcgattggagcagttcggcgaatttcgtggccacgtcgctggcggtgtgctgggacagttccgggtatccggccgaatcatcagggtcggccggcgcaggcgtatcggcggtgtattggcggcctccatcaatcgccattgatgagaccggcgtgaagtagacggtgtagtcgcttaagaccgcgccgccttccgacagacctgcgggaatgcgtgagtcgccgaatagggtgtcgtcgtactcgagattgacggaagtgatgcctcgctgggcgagcgcggccacggtggccttggccaaggtgttcagaccggcacgtccgttggtatggtttgcgtcggaatcgcctgcagacagcagcatgtcgccattgcctttgagggtcaacgtattggtgccgtcatcggattgggtcaggaacacttgggtatccaaggtggatgccatgttcagggtggatgaggcggcgagcgcggtcagcgttttcagtgtggatgcaggctcgcgtggagtgttcgactcatgttcggcagcgacggtgccttgggcgtcttcaatgatcaccgacgtatcgtttcccacgccttgcgccgacagcaattcgttgaccagtgcagaagcggccgtggaatcaatggccttgttcgcgttcagggcaccggcgatggtgccgcctgatttggcggtggccggattggcgaaaacaggtgcggtgacaggttttaacgtcaacaatccgggggccacgtcggtgatgtcggcggcgcagtaccccgcgaacagggcgatggtggtcagtgcggaaatgatgacggtcagtgttcggcgatgcgatcgttgggtccgccgttgcgcttcacgtcgctgacggcgtgataccgctgtagataccatcgtgctccttatgccaaggcaatcatttctgcaatgaggcgaacgagtcgagtgttgccacaatcgagagcattcgcgcatccatcagcttaccgcccagccatgtcccgagtgccagaatgccgatgccattggccagcgcgaccggaataaccgccagccacatgccgccttcggctcctgtcagcagcatgaccagcgccacgatgccagtgggcagcatgagcagcaggctgccaagcatgtagacgaacgggaagaagccttgggccatggcgcggccttgaggcgcggagaacggcttgtccattgaggcgaccgggtacatcagtacacaggaggtgacttcggccacgcccagtccgctcaaggcgatgcccatgcccgtggcgaggaagatcaggccggtagcgaggtcatcgggctgcgcccagcgtccggtcagtgcgccgaccagcacgatgccggcgagatagagcagcaccatgtagacgaccatgatgccgacgtagacgcgtacgcggccgattctgtcggtccggccacgcacgccggcgatgacttccatggtgaagccgcggccgtcatatgcgagcccgttgctttccacgacggacatgaaccagccgcaccagatcagcgactgccagacgaccgcgctgatgccgtgtgcctggaaggcgaagatgatcaggaacaggaccggcatggcgaaggtcatggcttgacgggggtctcgtttgagataggtgatcaggcgtgcggaaaccgcgccggatgccgaatcgggcatccatgcgaatgcgccgatgcctttggcggtctcggacggactgtttgcgccgatggtgagccgttcatgtctcagacaccaggtgcagacggcgaagcagacaatccatgtgacggcaaggatggcgatgcgggcgagcagcaccgcccaggctccggtaagcgcgtcgaacggtagttggaaggccgcgccgaacggcgtccatgcgacgatggtggtcgccgcgccccaggtttcggtgttgaggctgaaggccacgccggagttgaccagaatgttcggcaactgacagatgataacgaacgtcagcacgatgaagatatagaacgcgcctttgccgcgtttgctggtcaccagcgtggtggatagggcgatgagcagtttggagatgctcatcatggtgatgacggccagcactgcggcgaggagggaactgatgattacggctggtcccatatgccgataggccagtgtccagagcatcagtgaggccacgccggtaagggcggggatgccggacaggccggaaagcagcaagccgaattgcaggttgcggtcggcgatgccgtagagcgcgaatttgcgtgggttcatggtggagccttcgccaagcatcatgagctggatgaagccgatgaagatggtcatggtcgcgccgaccagcacgacgactatgttgacgatgcctccggaaccaaggatgttcagcggaaagccatccgcgttcacggtgaagggcggcagtatgccgatgaaccatgcgagcacgccggtgccgatgatggtgccggccgcgagtacggcggaaaagacataggcgacggtctgccacgccgattttcgcagggtggcgagcgtgagcgtccagcgcaggcggaccagggtgatggcgctgctgatcatcggcgggcctcatcggtgggtatggcgggcgtggcggttgtaagcggaatgggctggaccggctggaccgaagttggtgcttgggcttgggcttgcccgccgtcgagccatgcgagatgggcggcttcgtggcggccgccgaccagttgcaggaagcggtcttcgagttcttcgccggcggcgacctcgtccaccgtgccggccgcgcacaccagaccgttgttgattacggccacatgcgtgcacatcttttcgaccaatgccatcacgtgcgaagagataatcaccgtgccgccggtcttcgcgtattcgatgaggatgtctttgaggttggcgctggacaccgggtccacggattcaaacggctcgtccaggaccagaatgcgcgggctatgaatcatcgcggaggccaggcagatcttcttggtcatgccggccgaataatcggtgaccatcgtgttggcggccccggccaagtcgaaagcattgagcaggtcctgggcgcgacgcgtggtctcatcgcggctcatgccgcgcagcatgccggagtagacgagcaattgcaaaccggtcagtcggtctaagatctggtcgggctggggcatgacgccgatcatgcgcttgaccgtgttcacgtcgctccacacgtcatggcccaaaatcatggcggtgccggcgtccggtaccaatagaccggtcaccatattgagcgtggtggttttgccggcgccgttggggcctacaagtccatagaacgagccgaccggaatatcgagcgcgagtccgttgacggcgatcttccggtcgaagtgcttgaacaggccacgaatggacaccgccgcattcggattcggcggccatgcttgtggctgcggttgcgacggctgtgcaggcgcgggggcggcagctggcatcatcggcggctgaaatccgacattcctttgagtattgtctatgctcatacatccactctaccccaccagccaaccctcagcgaagcaaacccccgggttgctgttggattgccccgctgagcagctccaactagcggactcggtcaacccttatgcgcgatgggcttccactgggctttggagaagagggcctggaaggagatcggcacgtagctgagaatgtaaattgggaagctgagcacataggcgagcagctccttgttcgtggcaccgatctggtcgcgctcgacaatgatggtcaatgcagccaatgccatcaggcccaacaccgatatgatgatgccactggaccaactggccagcgattgcagctggctcggccaactcacgaagccacacgcggcgaacagcaagcccatcaccgcgcgaatcacgcccaacacggtaaacggacacagcatcaaggtgaagtcgatgcaggagaaatcacgttcgcgaaccgcgcgtttcagcaatgccgagccataataacggaatacctgcaggaatcccttgctccaacgcaaacgctgacgccaactttgcgagaaggtaaccggctgctcgtcgtagagaatcgcagtaccgcaatagccgatgcggtcgccatgcagaatcgaatccatagtgaattcaagatcttcagtgagcagatggaacttccatcccttgttccgcttcatcacctcgcgggagaacatgaatcccgtaccgcccacatggcaagaggaaccgagaatcatacgcgagttagacaggaatcgcgattcacggatgaaccacagcgcagaaccagaagacacccagttatccgccagattcaccgaattacggtagctggtcagaatcttgaatccggagcagaacgccttgttcatttcctcgaagtagtgcttgtccagcttgttatcggcatcgaacacgaagtaggcctcataatcatcggccacaccgatgtcgagcatatgccccaacagatacgtcagcgcatatcccttgccaaccagctcaagattgtggcgttccaccacatggcagcccaaagaccgcaccacgtcggcggtgttgtcggtgcagttgtcggccaccagccagatgtcgatgaggttggacgggtaggtctgatcgcgaatcgacccaataaggttgccgatcactttttcttcgttgcgcgcggagatcagcacggcataccggttggtcatcggggcgtcggggaagcgcacgggcttggcgaacagggacatcacgatgcacagtccctgatatatcatgccggcaccgccgacgatcatcagaagaatatcgagtacggaaagcagagtcatcagcgccaccctgccctaggattgctggaggcagattgatcagactgcttggtttgcttgcgttgctcgggctgctcaggctgttcggcggaccgctcaggctgctcgggctgctcagactgctgcgtatccgcggcaccacgctgcggaatcgccgccgtatccggctcatcaaagcttgcatccgcaccgactgtattatcggcgttatcggtatcatcggcatccgactccggctcagtgccgcgtaatcccttgcgagcgctggaggatagcacgttcttcggaatcgccacggtggcggaatcgtccaaatcggattctttcgtctcgtgcgacggaatcgcataaatctgttcctgcagcaaacgcagttcctcattcatcggcacgcggttggtggatcccctggccgcacgcggcatgtgctcgccgattggctgcaatacgtgctcgccgaacgcctcggacgcctcgacgatcttggacttcttctccggagtcggatcgttcatcagcggtgagtcaatcagctcatagcgcttggtgtacgcacggaagatggcctgcagcgatgcggtgaccggcagcgccaggaacgcgccgaatgcgccgaacagcgagccgaacgccagcaccgagaggaaggcgacggccgcgttgatatccatcgtgcgctgcgaaatcctcggcgagagaatcaggttctcgatctgctggtagacgatgatgaacaccagcaccgccacggcgtacgtccacccgcggttgccccaagcgaacagcaccggcagcgcaccgccgatataggtgccgaccgtggggatgaactgggataccacgccgcagaacagggccaacggcagccagtagggcacatgcaggatctccaagaagatggcggtgcaggtggcgttgatcagcgccagaatcgaacgggagaacaggaaggacgaaatctggccttgggccacggtccacaccagcaggaatcgacgctgcgtgttgggggccagccactggcagaaggagcggcgcagctttgggccggcggcggagatgtaatacgtggtcattaccacggtcatgaggttcagcaggaaggagaacaggccacccaccgtactcatggcggtgccggcgaaatcggtgacccacgaggtctggatattgttgaagatttccatgccaagattgctgatttccggcatcttgaacgtggcgtgctggtccacgaactcacgaatctgcccatacattgccggcaaaccgcggaccatggcaatcatctgctgtacgaacatattgccgaacagcgtgagcagcacacccacgaccacggccacgcccaccagactgacggcggaagccacgccacgcttccagccatgagccaccagcgccaccaccagcggttcgacggccagcgccaggaacagcgagatgatgatgtcgaacaccagataggagatgtcgccccacgagcgccagcagaacatgaatacgatgacggcgagggccacatacagcagcgcgcggccgaaccattccggtggcctgcgggaatctcccttggcggggaacaaagtaccaaagtcgatacgattctcgtcgtccgggtctgccccggcttctgcggcaccgcttctcgacgtgtcggtgctgtttatgtttcgcgcgcgttcgctcatggctccccattgtagcgaggggtttgaagctcggatacgccggcggcgtacacccgcttttctattgttgatgtcatgctcaacgtttcgatcatcatcccagcgtggaacgaagccgaacgcatccgcgactgtctgctgaacgccactcgccagaccatcatgccgcatgaggtgctggtggtggacaatcgttctacggacaacacctgcgcgattgtcgaacagttcatcgccgaacatcccgagaccccggtcaaactgttgcaccagaacgatgaacaggggctgattcccacccgcaactttggcctgaacgccgcgaccggcgatgtgctgggccgttttgacgccgactgtatgatccggcctgactgggtggaggtggtctccggcatcttcaccgaagacccggccgcgatgggtgccactggtccggtgatgtattacgacatgccctcacgtcatttcgggttgaaaggcgacaattccttacgcaagcgaatctaccgtgccgatggcggccagccgctgctgttcggctcgaatatggccttgcgcgcttcggcctggcatcagatcgcgaatgaggtctgccgagataaggccgatgtgatgcacgaggatatcgatatttccctgcatctgatgggcaagaatctgaaaaccgtgtactcgccgcgcatgatcgccgcgatgagcgcgcgacggatggacacgtcgctgagttcattcctgaactacatgcgacgttttaagaatacgtttgatgcgcatccgcaacatacgcgcacgcataagccggaggtgttgttcaccgccatgtatccggcgatgcatatgttctacccggtgtggcagaaagtgctgaattccgcggatatcaatcctgctgaagccgcgtggatcaacgagcagatgaaactggcggaggcgcaaggcaagcagctgtacgacgagacccccaccgacgaagtctacgacgaaaagcacgaaaagtagctggatatacgagccccctctgcttatgcaagctccctctgatgagggagctgtcgaacgaagtgagactgagggagagactgcgacgcagccgctaaaacattgaatcggccgcaggccgatacctattattcagcggctacgccgcaacttctctcccagtcagctacgctgacagctccctcatcagagggagctaatgtttaccgtcatcgactgatcacatcagcgacttgtaaatcgcgagaatgtcctcttcggtggcctgacgcgggttgccgggggtgcacacgtcgttgaaggcgtcgtgggccagcggttccagatcagcctcggtggcgccgacctcgctgatcgtggtcgggttcttcagatccacggtcagcttgtggacggcctgcacagcctcttcgcgcaccttctccaggtcgccggtgtaggcgtcctcgacgccgaacgcgtcggcgatgtcgcggtacttctcgcccgtgtagtccttgttgtattccatgaccggggccagcagaataccgttggccacaccgtgggccacgcccagacggccgcccagcgggtgagccatgccgtgcaccaggccgaggcccacgttggagtaggccataccggtgatgtaggaggcgtacgccatctgctcgccagccggaatgtcgccgtcggcggacttggctaggttcttggcaatcatgcgaatagtctgcatggacaggcagtcggacaggctccaggcacccggggtaatgtaaccctcgatggcgtgggtcagggcgtcaagtccggtggcaaccttcaggccgcgcggcatggagtcggtcagatccgggtccacgaaggcgacgatcgggatatcgtgcgggtcgacagccacgaacttacgcttgttggcggtatcggtgaccacgtagttgatggtcgtctcggaagcggtaccggcggtggtcggcacgccgaagatcgggacggacgggttcttggtatccgcgacgccttccagggacagcacgtcggcgaactccgggttggcggtgatgatgccgatgcccttgcaggtgtcttgcggggagccgccgcccaggccaatcaggaagtccgcaccggactcggcgaacttggcgacgccgtccttattgcactctaccggcgggttcggcttgacgttggagaacacttcgtagggcaggccggcctcatccagaaccttggtgaccttctcggcggtgccggtctccagcagtaccggatcagtgacgataaatgccttggtgaagccgtgctgcttggcgacggccggaatttccttgatcgcgccacgtccgaagtatgcagtctggttgaaaatcatgcggtataccatagggactctccttttgagctagtgtcttaactggtggtccactcactctttgagtggtccaacggttccccagtctactccgcgcatgagcattcacctgaaaacacgctgaaagaacaacactgaaaataatggcaagaaatggcggaattccgcacttgtcgaattattgtccattgaccaaaccagttcaatcgcccgagatctcaacgataagaccattttccggagtcgcttggtgctctccgagaaactcgtctctcatccgcttacttcgcgcgtacacaatcaatatgcgagatgcctaattccattcgtgtttcatcagccgaacgcgaactggttcaccagatggtgtattcaacggtttcagtctcttgaagaggactaagatacctcgacaattggggtgatcatcataagagaatgaggcagataatggcaaatggcaaggctatgacggtcggcgagatggcgtccctgtttctcgaccccgacactcccgttcgtatcgacgcttttgacggctcgcatttcggcccggcagacgcggatttgaaggtcaaaatcgccacgccgaactgcatgtaccagctgctcgcgcacccgaatgaaatcggcatcgtgcgcgcatacattctgggcgatttcgacgtggacgacattgactacgccgacccgtatccggcgatgcgcaagctggtgtcgctggccaaatacgttcgcccgctcgctcccgcatccattgcccgcgtatccgccggcattctgagtcacggcttcaagaagccgccggtgcccgccaccgagggcccaagcaagttcgcccgcatcaagcgtggcctgatgccgcacaccgaaaaggccgattcggaaaccgtcagcttccactacgacatgtccaacgagttctacgccgacttcctcggcccctccatgacgtacacctgcgcggtattcgacaacgagcacatgagtcttgaagacgcacaggccaacaaactgcgcctgattctcgacaaactggacttgcagcccggccagcgcttactggacatcggctgtggctggggttcgatggtcatcaccgccgcccgtcgcggcatcaaggcgctcggcgtcaccctctccaaggaacaggccgcgtacgccaacgaatggatcgcccgtgaggggctgcaggatctggccgaagtgcgcgtacaggactaccgcgaggtgcccgagcatgacttcgacggtatctgctcgatcggcatgatggagcacgtaggcgtcaagaactaccagagctacttcgaagagatgttccgtctcctgaagccgatgggccgactgctgaaccaccagatcaccatcagccatgacaagcctcacggcaagcccggcaccgacgaattcctcgaccgttacatcttcccggacggcgacctcggcgcgcccggcttcatcgaatcgtgcatccatgacgccggcttcaacgtggtgcatcaggagaacctgcgccagcactatgcgctcaccctgcatcactggaaccagaacctctccgagcattgggacgacgcggtcaagcaggtcggctttgaacgcgccaaggtatggggtatgtacatggccgcctgcgctctgaacttcgagctcgacggcatccagattcaccagttcctggctgtcaagccggatcgcgtgggccacccggacggcaagtggtaccctctgcgccaatggtggcaggcctgactccgtttctgtgggacggcacgcggtttttaccattgttcatctgccgtcccacagaagtgtgggatagcagatacatcaatcgtttgacgtatctgctatcccgcatgacataagccgagaaccgcagaatagagccgttctttgccctcagctctgagggcgttcttcgaacgctgtgggacggcacgtcgaaaatcggcaaaatcacgtgccgtcccacacgattcccttcgcacgcgcatttcgcaggtgctttttctgcaatactgactctatgagcgccacagccccagaaacggctggggcggacgatcgcaccgaccatgacacgcgcggataagacccacgtttctttatttaaccctaacccgatgttcgcattggtgctgttggcgtgcgtagttgcggcgaggaagacagttgttggcgaacgcgagcctttgcattgaccggccagcccgccggagtaggtacgtgacggatatgcaaaagccccacacaaggcggggcttcattgtggtggctccgaacggcgtcgatccgttgacctagcgattttcagtcgctcgctctaccaactgagctacagagccatgaacagtcaaaaacccggataatccgggtttcataaccattccagcgaccccggccggacttgaaccggtgacctccgccgtgacagggcggcgctctaaccaactgagctacggggccattgttctcacttgcgtgaggcaacagatgtatatattactgaaattcgccggtcgtgcaaatttcggcgtgttccgcgtaatttcaaggtttttgctatcaccagcacacggacacgtctgccataaacatccacaaacgacgaagggcgcgaccggaactccggtcacgcccttatgaacagaagcacttcacggcatccaccgcaaagcaatcgtcaatctcagtcagcctgcttccaggtgtcgatgtcgatgtggtgttcggggttggcctgccaggcatcccacgcggacttgacgatgtcttccacgtcgtacttggcgtgccagcccatctcctcgttgatgcgcttcggggagccgatcaggtgcggcgggtcgccggcgcggcgggccatgacagcctcggtgaacggcagaccggtgaccttcttgacttcgtcgacgatctggcgcacggaggtgccttcaccggtgccgacgttgaaggcgtcgtacttgcgctcgtcacggtcgaggtacttgagggcggcgatgtgggcgtcggccaagtcggagacgtggatgtagtcgcgcacgcaggtgccgtccggggtcgggtagtcgtcgccgaagatggcgggggccttgccctgcttgaggcggttgaacagcatcgggatgaggttcagaatagccgggtcttcgagttcgaccgggccgcagccggccacgttgaagtagcgcagcgcgcagaagcggatgccgaacggctgctcgcaggcgcgagccatccactcgccgaacagcttggtctggccgtaggggttgatcggcagcatcgggacgacgtcctcgggcaccacatcgaccggcggcacaccgtaggtggcggcggaagaggagaagacgagcttcttggcgttcttggactgggtcatgccggtgagcacgttgagcatgccgttgatgttctgctggtagtaccacagcggcttctccacggattcgccgacctgcttgcgcgcggcgaagtggatcacggagtcgacgccttcggcgtcgaggatttcggccagacgctcgccggcacccggagcggcgatatccatgccgtacagacgggagccttcgatgcgggtgggcttgccgtagctcagatcgtcgacgacgacgaccttttcgccggcctgatgaagtgcgtgaacgacatgcgcgccgatgtagccgcagcctccggtgacgagaactgtcatagttgacctttccttgtgcgggttgcaagtgtcggccgtgtggagttcagcggctgttcacttttggtccgctttgttaccttttgaaacaatttgagtatatcacacgaacataatcgcacaaaacggtggtgtcgtccggcaatatctgcattcattaggtcgatctggcgttcattaggtaggtcggcccggagccggcccgcacgaacaccgggtaaatggcttgatatggtggttggtatcgcacaccacccacctaatgaacgccaaatcgacctaatgaatgaacagcggtgcggcgcacaaggaaaatccgaggaatatatgaccgatcccgaatccacagcaatcgattccgtcaccgcgatggccgcggaccacaccgaggcaccggcgcaccccctgcacaaggtgctttccttcgtgcgccgctccggacgtttggacgatcgcctgcagcgcgcctgggacaactatgccgacacatatctgttggatattgcggccggcaacctgctggacgtgcgcgaaggcgtcacgctcgaccgcgcgttcgtggagtcctcatggggcaacgacaatccgctcattgtggaaatcggcaccgggcagggagaaaacgtggcggccgcagccgcggcccatccggagacgaacttcctagccttggaggtctatgaccccggtgtggcccacacgctgctgctcgccggcaagcaggggctgaccaacattcgtgtggcccaggtcaatgcgcccgagctgttcaaggtgaccgcgcccggcaccgtggccgaggtatggaccttcttccccgatccatggcccaagaagaagcaccacaagcgccgcatcgtgcaggaggccatggccggcgacattcatcgcgcgctggtcacagacggcgtctggcgcatcgccaccgacatcgaggactacgccctgcacgtgcacgaggtgatggacggcctcgatggctggaagaacctgggcagcataaccgtcagcctcccgctggagcacgtgggcaagggcaatgccgacatggccgccgacatgccgcacgccgacttcaccgaatccgagcggttcgagggccgcgtgctcaccaacttcgagaagaagggcctggccgccggccgcgcgatccacgacttcacctatcaggccgtcgccctgaactgattgcgacacgccgaaatgccgtcgatttgcataaccgaacaacctcccgtagagtaactcgagttgttcgcccccatcgtctaacggttaggacaccagactttcaatctgacaacgagagttcgactctctctgggggtacttctttgaagacctcggtcatagcgaccgaggtcttttcgtattcgcgggaccaggcctgaaagcattcggcgggttataggccaaaatgtgtgtccgttttggcttgtgttcctttgtggcggtgggcgttcctcctgttcgagttgtatgggcggggaactcgaggtcggccagaatgtgtgtccggaatggccggtcaggccttgcggc

SEQ ID NO: 1086 - DNA, 10154 bp, Unknown
  R13_10m  MAG No. k141_8624
ggtgggtcgctgaccattggcggcgaccatcggatcgcgcatatcgagatatgcagacgacagatcaggcgcaggggcatccacgctggccgcggcagcggcagcagccgacgaaccggcggccgccagacgcacggcctgggcctcgggctgatcggcggatgcctcgggaggacgccgacgatctttgatggccagtcgggccacggcatccttgtcttcgggactcaatgccttgtcgagatccgggcggtcgtcaatacccgggcgcacgtacggttccaacatgttgctgctctttctttgctctcatcaccggcgggaggtaccggccagctccgactgagcatgacccgcaaccccgccacatgcaaaaccgcccgagcgcactagcttcagtgcactgcgggcggtttgttttccatggacccagcttacgccggacgcactacttggagcgcgcacagcggagtggcgtttatgggccaaaggttagtcgatatcggcaatcggcgggttgctcagcagatcatcagtctcgtggtcaccggcggcatcggtccaggcgaggctggcgaccggagtggtgttatccgtgccgagtccgcggccgggctcgaagatgagggcggccttggtcttgccgtcggcagcgatccagcggaaggtgatggatgtgtcgccgtcggcttcgtagctgaactcgccattgaatgcaggcagttcgttgcggaacttggccagggcgttcagggccttcaccaccgggcgctcgaggttttcgtcgatttcggcggtggagtagtaatggcgattgatgtcacggccgttgttggtcttgcgcagcagttccatgtcgttgcggccggcgagcgcgcccacgtagtagacctgcggcactccgggcaggaagaactggactgcgcgggcggccagatagtgctggtcgttgcagccgagcgcggagtagtacgtgctgttgacctgatagaggtcgaggttgctggcggcggcaccggtggcggcctgggattcgccgtgggtgttggcgtggatggtgttgaccagattatcgacgtcctcgtcgggcacgaggcccttgaggctgcggtcgagctgatcggagccgatgtcgatcacgccgatgccgtcgtgcgtatcgagcacggtgacggcgttgttcgggcggatttcggtccagtggaccacgggttccacgtgaccggtgaacagcgagtgcaggagcagcggaggcagggcgaagtcgtagacgcggtccaccttggaggcgatttcaacctgcttcttgtagtagctatgcacctcaatgagaatttcgaggcctcgcttgacgccttcctcgcgtaggcgtgagatgagcttaaaggtcttgggggtcatgaagcagctggtgccggcctccttggcgccgtagcccacggcgtcgagacggatgtagctgacgtgggatgcggccatctgatcgaagatggacatgaggtattcccagccctcgtcggaatcggtgtcaatatcaacctgctgcggagtgaagctgacccagaccaggcgggtcttgccggcgaacttgtagtgggtgaacggcaggcccgggcgcgggcggtagatgccggccagttcctcttcggtggcgccgttcgggaagacggagctcatggtcagaaacatcgggtaatactcggattcctcacctttttcaagcacgtcttggaactgcttggattcccagctcatgtggttgacgatggcatcgaccatgatgccgtgggtcttggaaagttcagcgacgtcgtcccagctgccgagacgcgggtcgactttggtgtggtcgatcgggtcaaagcctgcatccgcaccatcgaacggagtgaagaacggcaggatatgcacgccgtcatacacgccgtcgaagcgggtgcgcaggatgtcggtcatcgagctaagagtgccatcgccgagacgatcggcgtaagcgatgagctgcactttgtttttcatgggacctcccttggctcatggatgcaggtgcaatgtgtacgcagtgtatgcgtgcttttacatacttatacgtatcgaaccggtttgatattacctcgaaagggacgttgatgtctagtaataccgcaaaatgcgcgtgtcgaaccggtttgatgcggtgttctacacaacccagcctgtccgaccccaatgtgtccgttgctgcaaaatcggacatccaaacgtctcacgcatcacacatgaccgattctccggaatcggacacacagaacacttctttcggaacttagacgtccgattcggcagaatcggacacatgtgcacaagtcggatgatgagcacgaccatcgacgggcgtccgctggttgtggacgccgatgaaatcgatgcgatccacaccgggcacacgcatgaagacgcgcagcatcaacgcgtggtatcgcctggcaccagcgtcatgggaataagcacgttcggctcgaacggcttggggatgtccctgcgtgaagcgttagccgcggccacttcctcattggcaatagcctgcacgatatggtcggccgtcgactgtgcgatcgccgagaaatcctgcgcgaccgcggtcagcttcatgccggccaaatcagtcaaatacgtaccatcgtaggcaacgatctgcagctcgtcaggaatggaaattccgcggctcaacgcttcgcgcacgcagaacgacgcaccaatgtcggaactgaccacggcatcgacgccgtcggtcgccaccttgtcgagcgcattgctgaccgcacgatgacagccggcaaaatccatcacttcgccagcttcaacatactcgtatttcacgcctgcggaggtcaattcctgttccaacgtgaggtaatagcgcaccgtcgggaacgtggtctttcccaaatcgaacgatccttcctcgacttctccgcgcgcagccaaatcgaagaattgatctcgcggaccgccaatcatcaccacatgtttggcaccattgcggatcagcatctgcgcaatcaatcgcccaccctgctcgtggtcggatccaatcgacgaaataccgtctccaagcacacggtcgaacgcgacgatcgggcgatgaatcgacgtccaataatcgccgggatgcgaagtgtgcgcacacatgacgatgccgtccatcatgtgccgacgcaacatgtcgacatactggatttcgccctccgcctcatctgcggtagagcacaacatagtgcgtaatccttgcgcggcgagcgcatgctgcagatgtgcggtaaacgttgcaaagaacgggtggcggatggtgggcacgatgacgccgaccagattcgtacgatcatgatacagattgcgggcaagctcgttcggcacataattgagcagttgcatggctttgcgcacacgttcgcgcatgtcatcagacacgtacccgttgccgttcaccaccagcgagacggtgctcagagacaccccggccttcttcgccacatcgcgcatgccgaccatgatcgcaccttccctatcatcactgttctatcgccgtattctcacgtgcttaccgcgaatattacattcatttacatgctctcgaacctgttcgacagtccggtgtgtatatcgtctgacaggagcacccctaactttatttccatcatatgattttcgtgacgcccccttgaaatcacattcatgagccacttttgcgctgcattcgataccgcatcgatggaagatatatcatgcgcaacatcttgcaaaacatcacaatttcgtacaacgaaagaaacggcgcaaagcttgcgatatccacactcactttgcgccgtcttcttgtattgataatggcctacattgcgatcatcgcgatcagtcggtcggaacgtcaccagactgcgtgtggtcaaagaccggcttgttgtctttgtcaaaggtgtagacgccgatatttgcagaactcggatcattgttcttgttgaacggcccaataccggtctggccctgatactggatatccttgccatccttcagcagagcgaggcaggccttgtaggaatcgcacttctcgccgccgtcagcaccggaaaccgcagccatattggcctgaatggtcttgccgtcagcactgccgcccttctgcgcggcgagggctgcgaggatgatgccgtcgtaggtttcagcgccataggtggtggtgtttttcagatccacaccggtggattcaagacgcttgacgaagtcgtcggacgggttgacgccaggaatggtgcctttcgagccttccagcaggcccgcgtcgagttcgctcgaatagtcggaggtgttgccgtcaacgaaatacagcttcttagtgtcgactcccgcggaggcgagggccttcagcagcggcttggtctggtcgaaggcgatgacgagcgtcgcgtcggggttggacgccttgatggcggtggcgattgaggagaagttcgtctcggtcggatcgaaggtgtccttttctccgtagacaatgtcgacgcccgccgcggaagcggttttgacgaccgtgtcgcgcagaccggtgccgtattcgtcgttgaagaccgcgatggcgagcttctgcacgccgtcctgcgcgatcagattgcccatgaccgcaccctgcacggtatcaggtgccacggtacggaagaagtagtcggacaggccggagaagccggccgaagtggcacccatcgacagcatcggaatattctgcgaagtaatggacttgtacgtgttcttcaccacggagctggaagcggggccaataatgaacgacggattcttgctcaacaccgactgagccgcggacgtgttctggtcggcatggtcggcgtcggacgtatcggcgtccacggtggtgaccttgctgccaagtacgccaccagcgtcattgatgtctttgactgccagcttttcggcggccagttcaggcggtgccagataggccagggatcctgtttccggccacagaccgccaagcacgaacttggtggttttggcaccggaatcggatgtgtcggagctggagcttccggagccggagccacagccggcgagcgccatgaccgcggcggccactactgcggtggcggtgatggacagctttttcatgcccttcatgtttgtcttcttcatatgaatcaccatttcctctcttggctccgctgattgccgaacccttggtgacgattgccgagataggttgctcgaacatcttgaggtgcactataggctgcgaggaaaccgaacgtgtatgcgtgaagttaaccggagatgaagtatgaaaactgttggaaacacaaggatttgtgtcagtttacaggcatggcggaaccgccggcggggggtattccgccccaccggcggaaacttgattcagagccagaaattccggctcgtagggggtcgcgtaacgtgtacggagaccgacatccgagttctaaggcactctaaagcacacgaaggcgcttcgagcggagaggatgacgggccttatacgctccgttctgcgatttaccggggctacctgccctcttcctggacctcctcttccagattgcccaagtacaaggagacaaccttcggatcgttcatcaaatcacggcccttgccggagtaggcgttgcgaccttggtcgagcacatagccacggtcgcaaatctgcaggcaacggcgggcgttctgctcgacaatgaccacggagacgccggccttgttgatctgacgcacgcggatgaaggtttcgtcctgaagcattggcgacaggcccgcggaaggctcgtccagcaggaggactgaaggcttcatcatcagggcccgggccatggccaccatctggcgttcgcctccggaaagctggccggcaagctggttcttgcgctgaccgagcttggggaagatggagcatacgtagtcgaaccgctcctcgaacagtttcggcgcctgaaacgcgcccatatgcatgttttccgcgatggtcaggctggggaagacgttttcagtctgcggcacgaagcccacgccacgggaaacgagcttgtctgcacgcaggttggtgatgtcctcgcccttgagcagaagcttgccggaatggatatgtaccaggccgaacagcgacttcagcagcgtggacttgccggcaccattcgggccgatgatgccgacgatctcaccttcatggagggtcagggaagcgccattgagaatgttcacgccgggaatgtatccggccacaaggtccaccgcgtcaagcagtggctcaccttccggctcacccacatgaatctgcgcgcgggtcagcggcttgtctccgccgccttggatgtccgattcaccagaatcggacacatggggtaccgagaccgcaccagacactccagccgcacttgccacacttgcgttgtcgctcatttcaggcctccttcaaatcttccagcacggagtcgtcacccaagtcgatattcgcatgggctcccagatacgcgtcgatcacggccggatcgttcatcacgcccttcggctggccttcggccacgatcttgccttcagccatcacggtgacccaatcggcgatatgacgcaccatgttgatgtcatgctccacaaacagcaccgtggtgccctcttcacgcaacgccataatgtggtcgagcaatgactgcttcagcgcaggattcacacccgccatcggctcatccaacatgaccaactgcggatcagacatcaatgcacgcgccatttccaacaacttgcgctgaccaccagaaagcgcacctgcataatcatccttctttttgatcagcagaaaacgttccagcaatgcttccgccttctcaatattcgctttctcctgcttcttccacatgccggggaacagcgcgcggaacatgccctcgccaggctgcacgggagcgccaagcagcatgttgtcaagcacggtcaaccggctcataaccttggtcaactggaaggtgcgaaccatacccatgcgcgccaccttttcaggctgcacgtgggccatgtccttgccgtcgaactgccaagtgccggtgttcggcatatcgaaaccggtcatcagattgaagaacgtggttttgccagcaccattcggtccgatcagtgcagtaatgccatgcctttcgatttcaaaatgattgacatccactgccgtcataccaccgaatttgcgggttacattatctgcgatcagaatcggatcgggcttgtgcacacccggcttgttctccacaaatttcaaatcctcggtgactttgtcacggtaggccgtggaaatgagggtctcgccttccggcgctttggtggcccatttggtcaggtcatggaacggcactcccggctgcacgccagatggctgctgcgcgccggtggtcggggtattcgttgtatcaggcatggaaagccaactcctttcggtcgcccaacaggccttggggtctgaatatcaccagacacatcagcgccacgccgacgatcacccagccgagggcttcgatctgattggaggagatcagggtttcgggaacggtgttgcgcataacctccttgacgaaggtgagcagcacccacagcacgcaggagccgagcacaggaccgagaatcgtggccgcgccgcccagcagcagaatcgtccacacgtagaacgtaactgtacggccgagcgaatcgggctgtacggagcgcggcaggacgaagatgatgccggccatcgcaccgaacaatccgcccaaaatcagcgattccatcttgtatttcgtaaccggcttgccaagcgaacgaatcgcattctcatcctcacgaatgcccttaagcatacggccccacggcgagtggaaccatcgccagcacaggaacgcagcgatcgcaaccaaaatccaagccacgatacgcagccaccaggaattcgcgatgttgttgctgtacgtccacagcaggaacgtggtcgagccgtcgggcagtggggaaagcgcttcgaacttttcagtgaaatcctgcggcgagatgcccgcggaaccgccggtgaagttcgtcatggctgtggaacggccgacgatgcggatgatttccgcggccgccaacgtgaccatggccagatagtcgggcccaagcttcagcgtcggaatgccgagcagcagcgcgtagatgacggcgagcgcgagcgccgcacagaccgaggcgaacaggttgcagcccatcgactgcgtgatggcgaatccgtaggcgccgaggagcatgaagcccgcctggcccatgttcatcaggccggtcatgccgaagtgaatgttcaaaccgatggcggccagtacatatgccgccgtggtgggggcgatcagctcgcccgccgcgttggagatgattgtcatgacatccatgaatcagcccaccctttgctgcttgccgaagatgccctgcgggcgcaccagcagaacgatgatgaggattgccagcgcgctggcgtaacgcatgtcgttggggatgacgagcgagctcatatccgccacgatgccgatgaccaacgagccgataagagcgccgttggcggtgccgaggccgccaagcgtcaccgcggcgaacatcagcaggatcagggtcgcgccggtgttccaagagatgccgttgaggtatacgccgaggagcacgccggatagggcggccatggcgcacgagagaatccataccacgcggaccacctgatccacgttgatgccggacgctgcggccagtgccgcgttgtcggaaacggctcgcgtggcgcggccgagccgcgtcttgtagaggaacagtgtgacgcccacgatcacgcagatggcgatgagcgcggacagcagcgtcggcatgtccgtggtgatcgggccgatttggaagctgttcggcacggatttgacgatacccttaatgtcaccgccgaagaagaactggaacgtgtactgcaacgccatggacaggccgatggtcacgatcatctgttgcatggtgccgacgtggcggcggcgcagcggaccccatacgatctcgttttggatgaagccggtcagcacgccgatgatcacggcgaagatggcggaagccacgagcggcatgtgcagcatctgcgtgcccacgaaggccatcaggccgccgagcgtgacctgttctccatgggagaaggactgcagtccggtagtgccatacacgaggttcatacccacggacatcaggcccagcatcagaccgaagataatgccggaatacagttgctgccagatacgtttgccgatattggagccaccttttttggctgacgatgctgcggcgtccgccgatccggctgcatccgccgtcccctgcttgctgtccgccgattcggccgcgccgttgccagcggtatcgtcggcctgatcgaagcggatgacgccgcgctgcttgtcgaagctggctttcttgatggtgaccgtcgcactgctcgacttcaggccatgctctttcgcaacggcatcgtcaatcgtgacggtgtagtcgccatcatcggcaacggaaaacgcccacttgccatcggctgcggttgtggtctccgccgtagccttgccggacaacttgacggtggcgccggcgatcggctgtttgccggcatcctgcagaatgccgttgacgcaaccgttgtcggatgtcggattgcattcatccacggcttgagcggtgccggctgcggacgcaatggcgggagggagtacgaaaagcatcgagagaacggcaaaaatcgaacatagcattgcgattcccggtcgacgatgccgtgtgaaatacgttacggctgtcattggtttttcctctcttattgttttcacaacgtaggagaggaaacagcttgcgcggttgcgctcagatttctttcacgttactcagcgaccgtccgtgtaacgtgaaaattacgccggattggcaagcagcgcaatgccgaaaccggcggccacacaaatgagaggcaccgcgacggttgctattccatagcccagagccagcgtaaaacgacgctggcgaatcaatgaaaccacttcgttgagcgccgtggagaatgttgagaaaccaccgagaaatccgacaacgaacatcatgac

SEQ ID NO: 1087 - DNA, 3925 bp, Unknown
  R13_10m  MAG No. k141_9364
ctacgacaccgcttctgccatatcggtcaccatcaatccgtccaccggccgtccgctgcccgtcgccactgacttggtggtgcctctggccgtgctggtggtcgttggcgtggtggcctccatgttcgcgatgcccttggtctccgcgctgtccgaccgcacacgtattcctctgggccgccgtaccccgtggatggtggcgggtggcgtgctgtgcgcgctgatcacgctggttctggggcggaacacaggcctcgtagtgctgtgtttcttctgggcgctcatgcagtttgcctatgcgatgatttccgtgccgttggccagcgccatcagcgaacgggttccggacaaattccgtccgcgcattgagcgctggcacggtatcggcgtgatgcttggccaagcgcttggtgtatgcatgggtgcgctcggcgtgatgttcgactccttcacgccgtttgcctacaccgccgtgctgtttgcggtttccggcatcctgaccgtgatcatgctgcccaaggagccttccagccaggagcagccacatcaacgattcgagtcgagccaggtgtttgaccagctgcgtccgccggcacatgcgcctgcattcgcccgtgtgttcgccgctcgcgtgtgcatgatgacgggcgttggactgaccggggtctttctgtggtatctcgtgcgcttttgggtgtatggcaaggctgtggtgttcacttccgcgccattgaccattcccgcgggcctcctcatcgccggcatggccgcggcaacgctcatcggcgctgcgctcgcgtcctgggccgctgggccgatctccgagaagatcgaggaacggaacatcgccaccactgcagtggtggcggcatcctgcctgctgtatgccatcggcgtggcggtggcatggggactcggcgtctggtccaccggcacggcacgcgaaaacggcatgctgctcttcgcgttgatctccggattcgccttcggcgtctacgatgcgttaggccttgaactggtaatggactctttgcccgacccgcgccgagccggccacgacctcggcatttatgcgctcgccaactcggccggtctggcgctcgccgccatcatcggcgcgctactggtgaacgccttcgagcgcagcttcggctattacctgctcttcccgtccgccatcgtcatggtgctgctggccggaatcgtcaccctcaccgccgagtccgcgcaatgacgggccggtccggctccccggccgccggcggcgttcctccccgcggcgggggcgttcgtctcggcgacgtggcgtccacaatgtgaacccttgctggattggcaagacagccaaacctatgtttacattccagttcaggtcgaacggcctgaggaaataccgaaaggaggccacgcgatgactggattcaatgcttctgcgtttgtatccgcacgaattattagcccgtcttcgctggcggactaattcggcattgatgcttgaagccccgtcaacgaaggcagggccaatcaagctgacacaatcggtaaggccctgcaagttgcggggctttttttgttgcgctcacaaggcttacggcagaatcccgcagacggaaacggtagcggacagtacacggcaacaacacagcaacagaacaacaacctccctgtgagacgaaataatcgcccgccaatgagagtgaacgagagcaaaacaggagtaacaatgactgcagcagtcgaagagactggcttagggcaggcggcaggtaaagccgctaccttggtacgcgattcggtcaagaccgtgatcgccgcatcgatggtcggtaccgccatcgaattctatgacttctacgcctacggcaccgccgcggcaaactacttcccgcacatcttcttctccgcgaaggacaaccccaccgtcgcactgctgatgagcttgctgaccttcgccatcgccttcatcgcccgcccgctgggctcgctgatcttcggccacttcggtgaccgcatgggccgcaagaccacgctggtcgtcagcctgatgaccatgggtgtcggcaccttcctgattggctgcctgcccacctacgatcaggtcggcgttggcgcagtcgccatcctctgcctgctgcgcttcatccagggcatcggcctgggcggcgaatggtccggcgcggcactggtcgccaccgagaacgcgcctgaagacaagcgcgcactgtacggctccttcccggagctcggtgccccgatcggcttcttcctgtccaacggcacctacttcgtgctcgaatccttcaacaatcaggacgcgatgctggcttggggctggcgtgtgccgttcctgctgtccgccatcctggtgatcgtcggcctcgtggttcgcgttcacatggaggagaccccgatcttccgtatggctcaggagcagaagaaggtcgtcaagtccccgctgaccgaggtcttccgcaagtcttggcgtcaggtgctgcaggccaccttcctcgtggccgtgacctacacgctgttctacacgctcgccacctggtccctcgcttggggcaccaaggagcagggcgaaggcggcggcggccttggcttcaccaaccaggaatacctgctcatgctcatgatctccatctgcgtgttcgccctgttcatcgtgctgtcctgcctgtacgcggacaagatcggccgcaagcgcgtgctgaccttctcctcctgcgcactcgtcgtgttcgccgtgctcttcccgttcctgctggacggtggtctggtcggccagaagaacttcttcgccaacatggtgttcctgtgcgttggctttgccctgatgggcgtcgccttcggcccgatcggcgcgttcctgcctgaactgttcgaggcgaacgtgcgctactccgggtccggcatcggctacaacctggccgccatcgtcggcgcggcgttcgtgccgaccatcgccacttggctgagctcccattggggcgttcactccgtgggcctctatctcgccgtgatggccgtgtgctgcctggtgtcggtcctgacctgccgtgagacgaaggacgctgactttaccaagtgaaatcctccataactaaatatcgccaagttcacaacgtgaaaaatctcaattccacgaagtgaacccctacgaggcttttccggtgcaacaggactaaacctgcatatcggaaaagcccacaaggaaagccacaactaaaaacagtttctgcagaaccagcagagcacaataacaattaaagatttcacccccataaacaaataaataaaaggagcgccaaaaatggcagcaactatctggtacgagaaggacgccgatctgtccgtgttcgatggcaagaaggtcgccatcttgggctacggctctcagggtcacgcccacgcactgaacctgcgtgactccggtgtcgacgtggtcgtcggcctgcgtccgacctccaagtctgtcgagttcgccaaggagcagggcctcgaggtcaagccggttggcgaggccgtcgccgaggctgacgttgtgatgatccttctgcctgaccagtaccaggccaaggtctacaaggaagaagttgagccgaacctgaagccgggcgctgccctggccttcgcccacggcttcaacatccactacggctacatcaagccgtccgaggatcacccggtgttcatggttgccccgaagggcccgggccacatcgttcgtcgtgagtacgccgctggccgtggcgtcccggtcgtcgttgccgtcgagcaggacccggacggcaagacctggccgctgtgcctggcttacgccaaggctctgggcgctctgcgtgcaggtgccatcaagaccaccttcaccgaggagaccgagaccgatctgttcggtgagcaggacgtcctcatgggtggcatc

SEQ ID NO: 1088 - DNA, 46549 bp, Unknown
  R13_10m  MAG No. k141_9741
ccgtctgcgcttcgacttccagtggtccaaggccccggccaagtccgtgatctccgcagtcgaggagcgcgtcaacgacaagctgcgcgacaacctcgccgtgaccaccaaggaaatgaagttcgacgacgccatcgccctcggtgccatgcacctgttcggcgagaagtacggcgacatcgtacgcgtggtctccatcggcgaagacggctggagccgcgagctgtgtggtggtacccacgtggaccacgtcggcaagatcggcatggtcaacatcctgtccgaagcctccatcggctccggcgtgcgtcgtgtcgacgccgtcgtgggccagggtgcctatgacttcaacgctcgtgagcacgcgttggtctcccagctgtccgacaagctcaacgctcgcccggacgagctcgccgagcgtgtgaacgccctgctcgccaagctcaaggaatccgatcgtcgcttggcctccatgtacgagtcccagctggccgcctcggttccggcgctggttgctgacaccaagaactccgcggccccggtcaaggtggccgtcaagaacgtgggccacttcggcgcggtcgacgccctgcgcaagaccgtactcgacgtgcgcgcccagctcggtgaagacgcccccgtggtggtggccctcgccggcgtgaacgaggatgacaagccgatggtcgccgtggccaccaacgaggccgcccgcaaggtcggcatcaaggccggtgatctggtgcgtggcgcagccaaggtcctcggcggcggtggcggcggcaagccggacttcgcccagggtggcggtgtcgatgcctccaagatcgacgaggccctcgaagcgctcgagcacgaggcgcagaaagcctgattccgccagtggtgtggttaggcgttgatttgggtaatgcccgggtcggactggcactgtccgacccggagcttacctttgcacaccctgctggcaacattcatgttgccggcgactatttctttgctattgacgaggtcctgaacgtcatcgaagacgaacatgtggaccatgtaatcgtcggactgcccctgcagatggacggtacagaaggcaaaagcgccaaaaaagcgcgcaggtgggcggccaatctggagaagaggctgcaagcagagagtgaagacagtgattctacggagtatcagattccgcaggtgtcattgatagatgagagattgacaacagtcagtgcgcatcgtcaactgttcgaggcccataaagcttcgaacaagcacaggccggtggttgaccagcagtcggcagtggtgattttgcagacggcactcgaccgtacccgggagcagtgaggtatcggttatgaccgatgattttaacgagttctttgatgacaacacgcattgggtcgaacaggggtcagaaccaatgcgcgggaccgagccgccagaaccgccgaaatcccgcaaggagatgcgcaagcgacgtgcacagcgcaagcgcaagcgcgtcagtggcattatcatcgctatcgccatcgtcgccctgcttatcggcggcggctatttcggcgtaaccaagctcatcgcatggcgcgacagccggagcaaccagtcgacggccatcgcggactatcggggaccgggctatggcgaggtcgaattcaccgtgagcgagggccaaggcgcggcggagatcgccgataatctgctcaaggccgaagtcatcaagtctactgccgcgttcaccagcgtggtcaacgccaatagcgcgacactctatccgggaacgttcacattgaagaagcatatggccgcatccgatgtgatcgccgttctctccgacaccaaccaggcggcgggcttccttgaggttcatcccggtgaacgtgccaccgatgtgttcgccgacgccgcgaagctttccggcatttcccaaagcgaattcgacacgattatcaagaacaagggtaaggatattctgcccaatgaagcgggcggtagctttgagggatggctggagccgggaacctacaacgtcaagagcatgaagagcgcttcggaaatcctcaaggccatggtcgataagcgtatcgccaagttggatgaattgggcgtgccgaccggcagtgaccgcgaacgggtgatgatcatcgcctctatcgccgaggccgaggtcaacaaagccgattactacggcaaagtgacgcgagtcatcgagaaccgtttggagcagggcatgtcgttgggcatggattccaccgtggcctatggcaataacgtcaagcccgcgcaggtgaccaccgagatgacccaggacgagtccaacccgtacaacacgtacaagatctccggcctgccgcctacgccgatcagcaatcccggcgatagcgccattcaagcggcactgcaccccgaaagcggcaattggctgtacttctgcacggtcaatctggacaccggcgaaaccaagttcgccgcaaccgccgatgaacatgaccagaacgtggccgaactacgcaagtggcaagccgaaaaccagtagtcacctcattggctcccctcgccgaggggagctgtccgcaaagcggactgaggggagtaatacgggattaagccccaaccaccaccgccacaatcgcgcccgccaatatcaccggcacatacggcaccttgcccgcatgtgccggtgatgtgcgttgcgggtcgaatcgcgtccacaaggcaagccatgtgatgccggcaacgcccatcgccagccaccagaccaccacaggcaacaggccaaacagtccgacagacaatcccataggtatcaaggcggtcacatcgccgaatcccaatgaccgcggcaccagcaacgccaacgcgaactggatcaggcaacatagcacggtgaacaacagcgcctgcaacagcacgaacaggtcgttcgccaccactccatgcgcgaaatcggcggccaactggattaacgcgcccacggccacccatgcgatcggcacccgccgatgacgaacatcctcaatggacagtgcaagcccacatagcagaccgggtagcgtgaacaggtatggcatggcttaacattaacccctagttagacgtacacatagacgtacacacatgaaacgagggaagttatgctgcgttggcagacggcaggggagtctcacggagaagcattggtggccatgattgaagggttaccggccggcgtgcgcattagcacggacgatatcgtttccgcactggcacgccgtcgacttggatatggccgtggtgcccgcatgaagttcgagcaagacaaggtccgtctgctgaccggtgtacgccacggcctgaccctcggctcgccggtggccatcgaaatcgccaacaccgaatggccgaagtggaccgaggtcatgagcgccgatgcactcgaccatgacctgccgcgcgaaggccgcaatgcgccgctgagccgcccgcgcccgggccacgccgatctgaccggcatgcgcaagtatggttttgacgacgcccgcccggtactggagcgctccagcgcccgtgagaccgcctcccgtgtggccttgggcgaggtggccaagcagttcctggatcaggcgttcggcattcgcaccgtagcccacgtggtggcgctcggtggcgtgcagaccaaccctgatttgccgttgcccacacctgacgatctggaagcgttggatgcctctcccgtgcgtacgttggataaagaggccgaggcccgcatcatcgaacgcatcaacgaggccaagaaggccgccgacacgttgggcggcgtgattgaagtgctggcttacggcgtgcctgccggcatcggcacctacgtggaatccgaccgtcgtctggacgcggctctggcctccgcgattatgggcattcaggcgttcaagggtgtggagatcggcgacggcttcctggaagcctcccgccccggttcgcaggcgcacgatgagatcgtggtcaacgccgacggccgcatcgaccgtctgtccaaccgcgcaggcggcattgaaggcggtatgtccaatggccaggtgattcgcgtacgcggtgccatgaagccgattccgtccatccccaaggccctgcgtacggtcgacgtgctgaccggcgaatccgcacaagccatcaaccagcgttccgacagcaccgccgtgcctgcggcatccgtggtggccgaggccatggtgcgtctgactttggcgaagtacgcgctggataagttcggtggagacagtgttgccgaaacacggcgcaaccttgagtcgtatctcgcctcgtggccggagcacatgcgctgaacgaagtggagtatggttccgagacgactgccgcggaaccatcagcaactgtacccgccaatcgtcgagaggattcgtagattatgaccgcatgcccccgcgccgtcatcatcggcatgatgggagccggcaaaacacgtgtcggtaaggaagtggcgcatatgttgcgtctgccgttcgccgatgccgatgtggagatcgaacgtgaagtgggcatgaagattcccgcctacttcgatgaatacggtgagccggcattccgcgaggtcgaggccgatctcatcgccgatatgcttgaggatttcgacggtatcttttcgctgggcggtggcgctcccatgacgccatccacccagcatgccctcgcctcatacatcgaccatggcggtcgtgtggtctaccttgacgccgatccggcggaggccatggaacgcgcgaaccgcgggggaggccggcccatgctcaatggcaatgccaactcccgttggaagaaactgttcaagcagcgtgacccggtattccgcgaggtcgccaacgttcatgtccatacccgggggcttacgcctcagggcgcagcgaagaaagtgattgatatggtatctgagcgagcagtgcatgttaccggatcggcaattgagccgtatgatgtggtcattggcgaaggtgccatgaatcatctggtcgacgtgctgggacccaagcccgccaaaatcgcgcttatccatacccagccggtgcagcgacactccgatcgtgcccgcgccctgttgcgtcagggcggctatgaggtttccgacatcgtgattccggatgccgaacccggcaagaccattaccgtggccaacggcatttgggaacgccttggcaacgaaggtttcacccgatccgatgccgtggtggggcttggcggcggtgccgcaaccgatttggccggttttgtggctgccacgtggatgcgcggcgtgcgctatgtaaactgcccgacctcgctgctggccatggtcgatgcctccaccggtggcaaaaccggcatcaacaccccgcagggcaagaacctcgtcggctcgttctacacgcctgccggtgtgctggccgacaccaagacgctggctacgctgcccaatgacatcttcattgagggtctcggtgaagtcgccaaatccggtttcatccgcgaccccgaaatcctgcatatcctcgaagaccacgcagctgaactgcgcgctttcgacggctctacattcctcggctcgccgctcgaagacgtggttgccgagctcattgagcgcacggtaaaggtcaaggcctaccacgtctcctccgatttgaaggagaagggtctgcgtgaattcctcaactacgggcacacgatgggccatgccatcgaaaagctcgagcacttccgctggaggcatggcaatgcggtggccgtcggtatggtgtatgccgccgagctggcccatctgatcggttacatcgatcaggatctggttgactatcaccgttcgttgctcgcttcgctgggtctgccgacgtcgtggaatggcagctcgttcgacgacgtgctcgcattgatgcatcgcgacaagaaagcccgtggcaacgaactgcgtttcgtggtcctcgacgagattggtcacgtcgtacacctcgacaacccgcccgccgaagccgtagaagaagcattccgtcgtatccagcagtaattgaacggccgtaggccgtgccgttcgccatcccctcagaaaaagtacttggctcccctctaacgaaggtgccccggagtcggatttaccttctacctccctctgatgagggaggtgccccgaaggggcggagggagagaagcacaaacaaaaggagtcccaatgaccaaagtcattgttgtcaatggccctaacctcggacgtctcggcgtccgccagcccgacgtctacggtcgtcaagacctcgacaccctgcgcaagctctgcgccgaatggggcaaggacctcggcctcgaagtcgaggtgcgtcagaccgacgacgaagccgaaatggtgcgctggatgcaccaagccgccgacgagaaaaccccggtggtcatgaaccccgccgccttcacgcactattcgtatgctctcgccgacgccgcgcacatggtcattgatgagaacctgccacttatggaagtccatatttccaacccgtccgcccgcgacgagttccgcaagcgttccgtaatcagccctgtggccaccggcaccatcaccggcatgggtttctacggctacaagctcgcgctcgatgctgtggcgcacttgctgagcgaatagaaccaagccctccagccaatcccgggtatcagtcgacgttgagcccgggattcctgttccgacgaatcggaccagaatcctcgtcctggtacgccttatggacccgaagtacgccgtgtattcgaccatatgctggccaaggcagaacgagatgggctgcctacgcacgactacaccggccacgtcatgaacacgccgggtcatacacggatgatagagtgaaattccatggttagaagaacacatggtaattctcaagaacacgtcaccaagcatattttcgtcactggcggcgttgtctcctctctcggcaagggcctgaccgcatcttcgctcggtcgtttgctgcgcagccgcggtatccatgttctgcagcaaaagctcgatccgtacatcaacgtcgacccgggcaccatgaacccgttccagcatggtgaggtctacgtgaccgaagacggtgccgaaaccgatctcgacatcggccactacgagcgtttcctcgacgtcttcctgagccagaaggccaacgtcaccaccggtcagatctatcaggaagtgctgcgcaaggagcgcgccggcgaatacctcggccagtgcgtgcaggtcatcccgcacatcaccaacgaaatcaagtctcgtatgcgcgcccaggcttccgatgacgtggatgtgatcatcaccgaaatcggtggtaccgtcggcgacatcgagtcccagcccttccttgaggccgcccgcgaagtgcgtcgcgatctcggcccggacaactgcatgttcgtgcacgtttccctggtgccgtacatttccgccgcccacgagctcaagaccaagcccacccagcactccgtgatgatgctgcgtcaactcggcatctccccggacgccctcgtgttgcgttccgaccgcccgctcaaccagtccatcaaagacaagatctccctgatgtgcgacgtcgatgccgaaggtgtggtcaactgcgtggatgcgccgagcatctacgatgtaccgaagatcctgttcgaagagggccttgatgcttacgtggtgcgtgagctcggcctgccgttccacgatgtcgattgggatgaatgggcagacctgcttgagcgcgtccaccaccccaagcacgaggtcaacatcgccatcgtcggcaagtacatcgatctgccggacgcctacctgtctgtcaccgaggccatcaaggccggcggctttgccaactgggccaaggtcaacgtcaaatgggttgctgccgaccgttgcgaaaccactgaaggcgcggccgccgctctcgacaacgtcgacggcatcgtgatccccggcggctttggcattcgcggcatcgacggcaagatcggcgccctgaagttcgcccgtgaaaccaagctgcccgcccttggcctgtgccttggtctgcagtccatggtcatcgaatactcccgccacgtgctgggcattgaagacgcgaactcttccgagttcgagcccgattgcgccaacccggtgatcgccaccatggaagagcagaaggacatcgtggccggcaagggcgacatgggccacaccatgcgtcttggctcctacccggccgagctggaggaaggctcgctggtcgccgaactgtacggcaccacgcatgtcaccgagcgccaccgccaccgttacgaagtcaacgtggcctacaaggatcgtctgcgtgaaggcggcctgcgcatctccggccagagcccggacggcgagctcaccgagttcgtggaactgccgcaggacgtgcacccgttctatgtggccacccaggctcacccggagttcaagtctcgcccgaccaagccgcacccgctgttcgccggtctggtcaaggcggcgctcggccatcaggcggcccgctgaccgtggatcccgcgcggtcggtccgcgcacgatgaaggcgtgacggcacggcatctcaggatgcttcgccgccacgccttcgccgtttggcgccatccgtgatgccgcatggcccgatggcgcccgcatgtaatcaagcccacagccaatatgcgtcaggacagctagtgtttgcacttgggttctgctaggttttcataggattaagtgtgatacaaggaaggcaggatggtgaccgaaaacacagcaccaaacgccgccgctgacgtggagatgagccagtatgtggctgatcgtacccgcgtcaacgaggacaagatcaagaaggatgacgagatcatcagccagttcggcgactacaactatggttggcatgattctgatgccgccggcgaagccgcaaaacgaggcattgatgagaacgtcgtacgcgcgatcagcgccgacaaaggcgagccgcagtggatgctcgacatgcgtctgcgtggattcaaggcgttcctcgaaaagcccatgcccgattggggcgtggatctctccggcttcaacgccgacgacttcaagtactacgtcaagccgatcgagaagcaggcgaagtcgtgggaggagctgccggacgacatccgcaacacctacgatcgccttggcatcccggaggcggagaagaaccgcctcgtctccggcgtggctgcccagtacgagtccgaggtaatctacaactccattcgtgaggacctgaagaagcagggtgtgatcttcgtcgacacggacaccgctgtgcgcgaataccctgaactcgtcaagaagtacttcggcaccgtcgtgccccctgaggacaacaagttcggcgccctcaacaccgcggcatggtccggcggctcgttcgtatacgtgccgaagggcgtgcacgtggacatcccgttgcaggcatacttccgcatcaacaccccggccatgggtcagttcgaacgtacgctgatcatcgcggacgaaggctcctacgtgcactacgtggaaggctgcaccgccccgatctggtccgaggactcgctgcacgccgccatcgtcgagatcatcgtcgagaagcacgcccgcgtgcgctacaccaccgtgcagaactggtcgaacaacgtctacaacctcgtcacccagcgtgcctacgtgcgtgagggcggcacgatggagtgggtggacggcaacatcggttccaaggccaccatgaagtacccggcctgcatcctcgccgaaccgtacgccaaggcatccaccatgtccctcggcttcgccggcaagggccagtaccaggacacgggcgcgaagatgattcacctcgccccgcacaccagctccaccatcgtcgccaagtccatctcgcgcggcggcggccgctccgcctaccgcggtctggtcaaaatcgtcaagggcgcgtacggttcgtccaactcgaccgtgtgcgatgccctgctggtcgacgacttctcccgctccgatacctacccgcacgtcgacgttcgcgaagacgatgtttcgatggcccacgaagccaccgtttccaagatttccgaagaccagctcttctacctgatgagccgaggactcacggaggaagaggcgcgaggcatgatcgtgcgcggcttcgtcgaaccgatcagccgcgagctgccgatggaatacgcactcgaactcaacagacttgtggaacttcagatggaaggatcggtgggctgattccgatgaccgacaacacaacacccgtcaaggaaatcaagattccggtcgccgaccccaacgacccgtacgcgattccggctgccatgccgtcctccgtggaccatgccgtgcgctcgttcaacgcaggcgactacccggagcccagccgcaagcaggacgaatggcgctacacgcctatcgagcgcatcaacgagttcttcaccgtgttcaagccttccggcgaaacgcagatcgaagtctccatgattgacggctcgccgttggccgaaggcgtgaagctcagccagatcaagctcggtgagggcctgtccggcactgtgtccaagcccaacgaccgcgtctccgcagtcgaatgggaatccggccacaccgcaaccattctggaactgtccggtgagatcgcccagcccgtgctcgtcaaggtgcacggcgcgggggaggaccttgacgccttccatctggtgatcgccgccgccgacaaggctcatgcggacgtcgtcgtggaacacgacggtgacgcacgactggccgaaggcgtggaaatcaccaccggcaaggactcgcacgtctccaccacgttcgttcaggaatgggccaaaaccgccaagcatgtggccaaccaccgcatccacgtcggcgaaggcgcatccctgcgccactccgtcgtgaccttgggcggcgacatcgtccgcatccgcatggatcaggacttcggcggcgaacagggcgacctcaacatgctcggcatctacttcgtggaccccggcgagcacatcgaacaccgcacgatggtggtacacaaccaccccgactgcaagtcccgcgtggtctacaagggcgcgcttgacggcaagggcgcgcactccacttgggtgggcaacgcgctcatccagcccaccgcccccggcaccgactcctacgagctcaaccgcaacctggtcctgaccccgggtgccatcgccgattccgagccgaacctcgaaatcgaaaacggcaacatcatcggtgccggtcacgcctcttcggtgggccgcttcgacgacgaggaactgttctacctcgaatcccgcggcatccccgaaaccgacgcccgcaagctcgttgtgcgcggcttcttcggcgaactcgtcgaggagatcggcattcctgccatctccgaacatctgatgaccgtgattgaccgccgactggcccgtggcgaaaacgacgccatggcacaggtcctcgaagacaagtaagaacagcatttttaggagcacaacaatgtcaacactcgaaatcaaggacctgcacgtccacgtcgaaaccaaggaaggcatcaagccgatcctgaagggtgccaccctgaccgtccactccggcgaaacccacgccatcatgggccccaacggttccggcaagtccactctcgcctacacgttggccggccaccccaagtacgtggtcgactccggcgaggccctcctcgacggcaaggacatcctcaagatgactccggacgagcgcgccaaggccggcctgttccttgccatgcaatacccggtcgaagtaccgggcgtgtccatgaccaacttcttgcgtaccgccaagaccgaaatcgacggcgaggctcccggtattcgccagtgggccaaggacctgtccgcagccatgaagcgcctcaagatggacccgaagttcgcctcccgttccgtgaacgaaggcttctccggcggtgaaaagaagcgcgccgaagtgctgcagctcgaactgctgaagccgaagttcgccatccttgacgaaaccgactccggcttggatgtggacgccctgcgcatcgtgtccgaaggcgtgaaccgtgccaaggaagccaaccagttcggcatcctcatggtcacgcactacacccgtatcttgaagtacatcaagccggacatcgtgcacgtgttcgccgacggccacttcgtcaagaccggcggccctgagctggccgacgaactcgaagagaacggctacgaccagtacctgcccgaaggcgccgactccgagtccgcgctggcctgagtccgtgaccgtgggagcctgacatgccctattctcgacacgctccgggccgctcaggccaagtcgttacggtcgcgaacaggccatgtccgactcccacttgtttcgtacaattgttacgtaagtaggggaacataatggttgattttaaggagattcggggcgagttcccgattctgaatcaggagattcacgggcacccgctcgtgtacctggattctgcggccacctcgcagaagccgaatgcggtgatcgacgccgaggcgaacttctaccgtacgatcaacgccggcgtgcaccgcggtgcccacgagctggcggcccgtagtaccatggctttcgaagaggcccgtgccaaggtcgccaagctggtcggcgcgaatgcagcggaaggcgaagaagagatcgtcgtcaccggtggtgccacggccggactgaacctgctcgccaccgcattcggcaatgcgtcgctgggtcgtgggggagaagccgccaagcgttttgccctgaagccgggcgatgagatcgtcgtctcgcgtgcggaacatcattcagtgctgttgccattccaggagctggcctaccgtaccggtgccaccttcaagtggatcgacctgaccgaggacggccgtgtgcgtacggacaacctcgacgaagtcatcaccgaacgcaccaaggtcgtggccgtcacccacgtgggcaacaccacgggtgccatcaccaacatcgcccctatcatcaagcgtgcgcatgaagtaggttcgatcttcatcttggacgcgtgccagtccgtaccgcacctcaaggtcgatttccatgcgcttgatgtggatttcgctgcctggagcgcgcacaagatgtacggtcctaccggcgtcggcttcctgtacggtaagcgcgaactgctcgaagccctgccgccggccaacttcggcggctccatggtcgaactcgcctacatggaccacgaggcccaatacatggcccctccggcccgcttcgaggccggcacccagccggtcgcccaagtggtggccgcaggcgtcgccgccgaatggatgatgaacatcgggctcgagaacatcgaggcccatgagaagaccatcgccgccgaactgctgaagctcggcgacatcgatggcattcgtatcctcggaccgcgcgaaaacgtggaccgcatcggcaccgtggcgttcgacgtggccggcgtgcacccgcacgatgtgggccagttcatcgacgcccagggcatcgcgattcgcgtggggcaccactgcgcccagccggtacaccgccacttcggcctatacgcatccaaccgtgcctcctccggtgtctataattcggtcgaagatgcccaagcattggtcgaagcggccaagggcatccgtaagttctttggagtggagtaaaacagaacaccatgaacgaattcggtatgagcggggatgacctcgaacagatgtaccaagaggtcatcctcgaggcgtcgaaacatccgcatggcaaggaatcctttgcgcccaacgcggcggtcgaacagtccgcggacgcggcggccaatgtcaccgtgcaagccagccacgaatactgcacgcccggtgaatcgcaccagttcaacccgacctgcggcgacgaggcgaccatccatgtcgaagtctccgatgacgaaccgcacaccatcaagcgattggtgtgggacggccacggctgctccatttcgcaggccagcctgtcggtgatggtcgatctggtggacggcaaaaccgtggacgaggccatggatctggaacagacattccacaagctgatggaatcgcgcggtgccggtctggacgacgagaacctggaagaaaagctcggcgacgccgtggtattccaaggcgtgtcgaaataccctatgcgcatcaaatgcgctctgctaggctgggaagggctgaaggattccatcgccaaagccctcgctgcaaagaactgaggaaatatgtccaacgataatttggtccccgaaccacagccgtccgttttcgatgccgtcaacggcgtcctgcaggacgaggaggccgctcgccgcgtgatggccaacccggccttggccaagggcttcccgaacggacgcccgatcgagcactctgctgcgtccggcgatgacacctgtgcgtgtggcggtcaccatggcaaatgcggttgccgggatgacgaacagtccgatggcagcgagattccgatcaaggcgattgacgatatcggccgcgccactgccgaagacgtgcgcgaggcactgcatcaggtgattgatccggagcttggcatcgacgtgatcgatttgggtctggtctacggcattgagatcgatgagctaggccgcgccattattacgatgacgctgaccacgccggcctgcccgctgaccgaccttatcgaggacgaatgcgcatccacgctggccggtctggtcgaggagttccgcatcgactggacgtgggacccgcgctggaccatggagcgcatcacgcccgaaggccgcgaccagctcgccgcccttggcttcaacttcgacaacatgccaaagtactgatagcgcttagtaagctccctctgatgagggagctctatacgagaaaagccccgcatgatgcggggcttttccaagtctggactggtcaatcagtcatcgacgatggtgttcttcgggacaaccgtaatgccgtccggcgtgacggtgaagccacgggccagatcgtgctcggtatcgatgccgacagtggagttttcggtcaggaccacgttcttgtcgagaatcgccttgtacacgcgggcgcggcggttgatgatcacaccgtcgaacagcacagaatcgacgatctgtgcccacgagtggatacgcacattgggggagagcacggagtggtgcacttcaccgccggagacgatcacaccgggggagacgatcgaatcggtggcgtggcccagacggtcgcggccggcgtgcacgaacttggccggcggcaggttgccggacatcgtgtaaatcggccaatcctggttgtacaggttgaactcgggcacataggcgatcagatccatgtgcgcatcgtagaactgcttaatcgtaccgacgtcgcgccagtaggcgtgatcagtgaccgtggaacccggaatctcgttcgagttgaagtcgtagacgccggcctcgttgcgggaagcgaagtacggggcgatgtcgccgcccatgtcatgcttggtgtcggcagccttctcatcgagagccagagcctcgaacagggccttggtgttggcaacgtagttacccatggaagccagaatctggttcggattgtccggcagaccggtggtggtggccggcttctcctggaagttcctgatcatgttcgggtgatcgggatcgacctcaattacaccgaactggttcgattcctcgatgggctggcggataccggccacggtgaactcggcgccggactcgatgtgctgctgtaccatctgctcgaagtccatgcggtagacgtgatcggcgcccacgatcaccacgatgtccggctggacgtcctcgatgatgttaatggtctggtagatggcgtcggcggagccgaggtaccagtgcttgccgagacgctgctgcgcgggcacaggggagacgtacgagccaagcagcggggagaaacgccagacctgggagatgtggcggtcaagcgagtgagacttgtactgggtgagcaccacgacctgacggtacccggagttcaccagattgctcaacgggaaatcgatcagacgatacacaccaccgaagggaacggcgggcttcgcgcgatcgcgggttaacggcatcaggcgggtcccctcaccacctgcaagcacaatcgacagaatcttgggattcttggccatcgtaactgtcctctctgttactgagcgtctttcgacaccgcactgctgggccggatgcttccttgcattcggtttacatagttaataattgcagaaaaattcgaacatgcaaggctttccccccgcgtgccgtgaacttgcgatgaacagtttcgtagatttgtttaaggatccggccttttcggagcgcgtgcgattccttagcgtgtcgcgtagaacgccactgcgctggatgccgccacgttcagactatccacgccgtggctcatcggaatcttcacggtcaaatcggcgcgggcaatcgtatggtgggacaggccgtcgccctcggtgccgaagatcagcgcgagcttgtcgatatgcgtcggatcttcggcaggcgcgtgcagacggcgtgtcagctcgtccaacgaaatcgaacgatcctccaatgccatggccacggtggtgaagcccagcgacttcaactcgtcgatgccctggaacggccagtaatgcttgttttcggtaccgtcgtcgttgaacccggtgatacgggtccacggaatctggaatacggtgcccatcgacacacgagcggctcgtcggtacagcggatcaccgcaggagggcgtgaccagcacggcatccacatcgagcgcggctgccgaacgcatcagtgcgcccacattggtgtggtccacgatgttttccattactgccacgcggcgggcgctcctgcagacctcggctacggagggcagcggccagcgtcgcatcgcgcatagggcgccgcgatgcagacgatagccggtcagtcgcttgagctgctcaggtgaggccacgtagacgggaatgtccgtgccccagcgcccgtcgatgaagtcgaaggtgtctttcatgccctccagccaaggttcctcgaccagcagtgacagcggttcgcggtcagcggccagcgcgcggtcgataaccttgggggactcggcgatgaacacgcccttggctggttccaagcgattgcgcaactgcatttcggtgaggctcacatacgcttcgacgcgcgggtcgtcaacggtgtccagcgtgatgaactgcattggtggcctttcgtgtgtgcagataacgaaaaaccccttgcaatgcaaggggtttatctgtgcccgagacgggacttgaacccgtacgcccgtataaaataggcactagcacctcaagctagcgcgtctaccattccgccacccgggcaggtgtcgtttggacaacgagtaaatagcttagcatgaaattacagggatgcaattcgcgcgtgtgcccggcgtgtcgcgtgtagccttgaagtcatgactgatgccctttttcttttcgacccgcaggtcgacgatgtcccggtgaacagcgacgaacttcacgccggctggaagctaaccctgcccgcgcacatcaagcgccatgctgtgcaggctatgcgactcaaggcgggggacagcctgcaactttccgacggcaacggcttgagaatccaggcagtgatggccgatcctgaagccggacttgctgaagttgtggaagtggggcgcgaacccgagccgctcacccgtttggcgctgattcaggcattggcgaaaaccggccatgatgagcaggccatcgatatggctacgcagattggcgtcgaccaagtggtgccatggcaggcggaccgatccattgccaagtggaaggtcggccgtacggacaagaagtggaattcggtactggatgccgccaccgagcagtcgcggcgcgcttttaagccgcaactggaggcgtgcgcgtccagcaaggaggtcgtggccatctgccgcagggcctgcgtgcatggcgatgtggtgattgtgctgcatcaggatgctaccgatacgtggtccggcgtggaggagaaggttacgcagttggtggaacgcacgctccaggacggccggccgcggactgtcagtgtggtggtcgggcctgagggcggcatcagtgagcaggaggtagctgatttcgtcaaggccggagcggtgagctgcgtactggggcacaatattctgagagccgcgacggccggtcctgtagcgttgtcgctgttgtctcgggtgttgggacgttacgagtaacgcccacgcgctaagctggtgcgtagcaacatcaaaccaaggagcatgatgagcgaatccgacgattgcctgttctgcaagatcatcgcagggcagattcccagcagcaaggtctacgaggacgagacgacctacgcattcaacgacatcaaccccaaggccaaggtccacgtgctcgtggtgcccaagaagcactacgccaacgtcgccgaacttgccgccgacgacccgaccgagctggcccacatcgtctccatcgcgcagaacatcgccgacaaggaatttcacggcgcctaccgactggtgttcaacaccggtctcgacgccggccagaccgtcttccacgtgcacgcgcacgtgatgaccggcgaaaagctcgacgagtagtaggggaatatccgcttcgtggcaacgactacacgtaccatcaccatcccgccccaacttgaccccgtcgccgtgctcggcccggttgacgaggtcattcgcgaggtggagcgcgcctttccggacctgacgattatcgtgcgcggcaaccgcgtggcgatcgtctcccgctccaagcagaccgaagcccaggccgcacaggccgaggatttggtcaacaccatcatccaagccgcctacaccgcgcctatggacgccgacaccgtgcgtcgcatgctcgaccagaacgtgctcaagaaccacgtgcgcctcgaacatccaggtcacggctcggtgcatgacaaactggcgcaatcgacctcaaacgaacgcgcccatgcacgttctgccggctcccacgacccgacgtaccgcaagcccacggttcccggcgtcatcacctttgccgccggcgtgccggtccgtgcgaaaaccgccggacaagtggcctacgtgaacgccatcgaatcgcacaccatcaccttcggcattggtcccgcaggcaccggcaagacgtatctggccgtggccaaggctgtgcgtgccttccaggacaagcagattcgccgcatcatcctcacgcgcccggccgtggaggccggcgaaagccttggctttctgcccggcacgctgaacgacaaggttgacccgtatctgcgcccgctgtacgacgcgcttggcgacatgctcggcgccgaccagctcaagcggtacatggacgacggctccatcgaagtggcgccgctcgcctacatgcgcggccgtacgctgaacgacgcgttcgtgatcctcgacgaggctcagaacaccaccgaacagcagatgaagatgttcctgacccgtctgggcttcaacaccacgatggtcatcaccggcgatatctcgcaggtggacctgaccgtgccgcgctcgggactggccaccatcgaacgcatcctgggcggcatcaacgacatcgcattcgtgcatctcaaaaccgaggacgtggtacgtcaccagctggtcggccagatcgtggccgcctacgaccgtcactccgccatcgccggcgaccaccgcgacatcgagcgcaagggccgccgcaaccataccgacttcgatgcccgccagcaaacggattcaaccaaccaaagtgagacagacgatgagcgttgacgtcaccaatgaaacccagtgggtcatcgaccccaaggtcttctccgatttgggtatttgggtactcgaccagatgcgcgtgagcacccagtccgacctgaccatcatgttcgtggatcccgatcccatcgccgaattgcacatgcgttggatgaacctcgaaggcccgaccgacgtgatgagcttcccgatggacgagctgcgcccaggcgacggcaaaaccgtgatggaaggagtgctcggcgacatcgtcatctgcccgtgggtcgctgcccaacaggctgccgcagccgggcacagcaccatgcaggagatgctattgctcaccatccacggcatcctgcacctgctcggctacgaccacgtgacccccgagcaggagcgccagatgttcggcctgcagcgacagctgctgctcaccttcttcgccctgcgccacgatgccaacatgcaggccacgctgcccgccggcacacccgacgcgctggccctgtacgacgccgcgcacggtgctggccgcgacctcgattccaaataaacttccaaatcaatcacaccaaattcggattattctataccgttcaaggacattcaaggacaccgaaaaaacattatggagtattccagtaccacgctgatcgccgtcaccgtcattctcgtacttgtggcggccctgttcgtctggctttcgctgaccatggccgccgctgaaggcgccgtggcccgcgtaacgcgagccagcctcaacaatctcattctcgaggtgcagaccgactccgaagcaagccagttcctcaagatgaagaagatcgacaagattcatcgcgtgcaacggctcatcgccgaccgttacgccaccgccggcagctgtgcgttcttccgcatcgcctgcaatgtgctcgacggcgtactggtgtcttccatcgcatccctgtggggtgcggaactgtgggttgaactgctcgccggattcctgttcgcgattatcgtagccgtggtctccgtactggtccgcccgcgcaccgccggcatgaccaagccggtcgacatcatgatttccaactcgcgcatcgtgtcgttggccaccaagctcacgccgttcgcacgcatcggtggcgacaagtccggttccaaggggccgggccgccgctccaaggactccgatctgtccgatgacgaggagcttgagaagattcagctcgagcagggcaaggccgccatcgaccgactggtggagtccaacgacttcgatccggaagtctccgaaatgttgcgcaacgtgctcaccctgtctgatacgttgactcgcgagatcatggtgccgcgcaccgatatgatctgcatggagcgcgactccacactgtcttccgcgctgaaactgttctcccgctccggtttctcccgcgtgccggtgatcggtgaggatgtggatgacctgatcggcgtggcctatttgaaggacgccgtgcgcgccaccgccttcaacccggcggccatggagcgcacggtcgaatccatcgtccggcagccgctgcttgttcccgaatccaagccggtggacgacctgttccatgagatgcagcgttcccgccaacatgtggccgtggtggtcgatgagtatggcggcatcgccggcatggtgactatcgaggatgccatcgaacagatcgtcggcgagctggaagacgagcacgaccgcacccagcgtaccgagccggagaaaatcggcgacaacaagtggaagatgcccgcccgtacgccgattgccgatctggaggagatcttcgagatcgacattgatgaggacgatgtcgataccgtgtacggcctgctgaccaagattctgggccgcgtgccgattgtcggtgcttcggccgtgacgcgcggtctgcgactgaccgccgtggactccgccggacgccgcaagaaggtgtccaccatcgtcgtcgaaccggcgcacgtcgagggcggcgaggaaaatagcaggacccatgaggaaactgacggcgagcccgtcgaaggcgatgataccgccagcaaggagtgatatgaccgaccagaacaacagcacgaacgacgtcgatgacattgacgtcaccgatgcttccgatgttgccggcgttgccgaagtcgacgcgaccggtgaaacggagaatgtgaccaagcaggacgtaccgtatcgctccggattcgtggccgtggtgggccgcccgaacgtcggcaaatccacgttgatcaacgcgttgatcggcaagcagatcgccatcgcatcctctcgcccggaaaccacccgtaaggcgattcgcggcatcctgaccgccgaccacgcgcagctcgtgctcgtggacacgcccggtatccaccgcccgcgtacgttgcttggccagcgtctgaacgacgtggtcgacgaatccttggccgatgtggacgtggtggccttcctgctgcccgccgaccaggaaatcggccccggcgacaagcgtattctttcccgactgcgtaccgacttcgccaccaagcgtgaggacggtacgttcaagtggcgcatcccgctgattgccatcgtcaccaagatcgacgagcttggccgtcagcaactcatcaacaagctcatcgaaatcaacgatttcgccgatttctcggacatcgtgccggtgagcgccctgaagcacgacaatctggctgaagtgaagaacgtgctcattgagcacacgcccgagggcccgcagatgtacccggacgatcagatcagcgaggagcgtccggaagacaccatcgccgaactcgtgcgcggtgcgttccttgagaccctggacgacgagctgccgcattcgctggccgtggtggtcgattccatcgactatccggaagacaacgagaccggtcagggctatgacggcaaggcgcaggtcaacgtgtccatttacgtggagcgtgactcacagaagccgatcatcatcggcaagggcgcctcgaacctcacctacgtcaagaagaagctacgcaccccggtcaaccgcatcgtcggccaaaaagccaagctcgacctccacgtcaaggtagccaaaggctggcagtccgaccccaagcaactagaacgcctcggcttctaggaatcggccttcggccggttataacaaagggagattccaatggaatctcccttttgctgtactcgagtcctccttacttccgcttggtgtacatctgggtgttgaggagggtggagtagcgcttgatgaccttggggcgaatcaccttcatggaagcggtcatgaggccgttctcctgagtgaactcctcgggcaggatgatgaacttgcgtacggattcggcgcgggagacgccctcgttggcccgatcgacccactgctgcacttcggcgcgcacggcggcgttccttgccgcgtcctcgagggacatgttctcgtcaagccccttggcggcgagccacgggcgcaacgacttctcgtccaacgtcaccagggcggagataaacgggcgtttgtcgcccagcaccaacgcctgggagatgatctcgcaacgctggatgacctcctcgatcgggccgggggagacgttcttgccgccggcagtgatgatcagatccttcttgcgcccggtgatgtacaggaagccatcgttgtcgatacggcccaagtcgccggtggcataccagccatcttcggtgaacgacagctcagtggcctcgtcgttcttgtgatagcgcgggaacacggcacgacccttgacctgaatttcgccgtcctcggcgatgcgcagggagaatccggggaatgcgatgcccacggaaccagcgtggaacggcgtacccagcgggttgaacgcgcacggcgcggtggtttcggtcagaccatacccctcgtatacaggcacacccgcgccacggaagaaagccagcagttccgggtcaagcggggcaccgccggccacaatccacttggcgcgaccgccgagcacttcgcgcagcgaagagtagacaatcggatcgaaggcagcgcggcgagtgcgggtcagtgcacctgccttgccattggcggagacttccttcatatagttctgcgcagccaccacggcggaggcgaacaccacgcccttggggccgtggccggccttctgggacgcggcgttgtacaccttctctagcacgcgcggcaccacgatcatgagagtgggcttggccacctgcagatcgctgatcagcgtcttgatgccggtggcgatgtagatgcggacgttcgaggagacgacgatgtagttgatggcgcgggcgaaggaatgggcctgcggcaggaacagcaggatggtgttcctcttgtcgtgcagcagatcgggcatgtaggccggcagattcagcgcggtctggcagtagtgctcatgggtcatttccacgcccttcggcgcggccgtggaaccggaggtgtacacgatggagcacaggtcggtcttcttgaccgaatcgatgcgctcgtccagctcctcgtccgagaccgtggtgccgtaggccttgatttcgtccaagccaccggtctcgatggtgatgatgtgctccagggacgggcactcttcgacggacccatccgccttcttacgcatgtccgtgtcctgcacgatcagcagtcgggcatcggagttgttgacgatattgcgaatctgctcggcggaatcggtgtcgtagatggtggcgagcacgccgccgcacgccatgatcgccgcgtcggtcaggtcccagtcgtaggaagttcggcacatgaatgccacggcatcgcccttcttcaggccataatgaatcaggcccttggccacggcacgcacgtcagccaggaactcgttggcggtgacggtcacccaatcgttgccggacttgtaggtgtacagcggctcatcgcccatacgttcggcgcggtccgcatacaggtcgtagatggacgtaccttcgtccagcggcggattgccttcggtggaggtggtgagcaggccggtgatggggtcgatgtcggtgacggtcaggtggccgtcgtcccaatcgtcgctgtgaggcaaagcgatattggtctcgaccggcacgtcggcgttggacaggtaatcgggctcgtccggggtgtcgtcgtggaccgggtggacgaagtcggatcccaacctgagcgccttacgggtgagattgatagtgtgctgcgtgaaggaattgataaccgacaagtcttgctcctgtaaacctttcagtgtcgtccagccatgaggcgaacgcttctcaaagctcaaattgtaatcgcccaaaccgaactcgtcaccttacgcaaccgtaggattctggcgggttaggggagtgcgtggcaaaatattgcacaggtcccgatattgttgagtaaccgtgagctacgaaacggtgattgtcgataattactgagcggttggttgctaatcggtgccgggtgattgttggacgacttccgagcaattcatccgcaatgcacatggacacattcgtatttctcactaatttcaggttcgtttctgtttcgattggcggaatctcaagtcatggtctttaccttccgactacactttctatgcggataaccatgtccattttgaagtagaacaagaaagggctctcatggcgcaaaacccagaagccaccgtggtgttcggcgttttgaacgaaacgtccgaaacggaatcccgcgtcgcgctgacgccggatatcgtcacccggctgaagaggagcggtgtctcttcactgattgaagcaggtgccggcattgctgccgactacaccgatgaggattacgaaaaggccggtgcgaaggtgaccagccgtgacgaggtgctcgccgaagccgacgcgctcggttttgtggaccgaccgtccgccgagaccgtggccaagctcagggccggccagtgggtcattggcatgctcggttccttcaccgatgccgattacatggccgcgctcgagaaggccggtctggtgggcatcgccatcgaaaagttgccccgtaagctttccagcgcccagtccatggatgagatgacctctcagaactccgtgatgggctacaaggcagccatcaccgccgccgatgcttacggttccttcctgccgatgatgaccaccgccgccggcacgattcgcccggctaaggcgctggtgctcggtgccggcatcgccggcctgcaggccattggtacgctgaagcgtctaggcgcggtcgtcaccgcgtacgacgtgcgtcccgcctcccagggcgaggtcgagtccctcggcgcgaagttccttgatctgggacttgacttctccaagggccagggcgagggcggttatgcccgcgcgctgagcgccgaagagcaggctcagcagcaggctgccgtcgatgagaaggccgccggctttgacatcatcatcaccaccgccaaggtcccgggccgcaagcccccggtgctgctcaccgcagccggcgtcaagggtctcaagcgtggtgccgtgatcgtggactgcgcagcatccgacctcggcggcaacgtcgagggctccgccgtcggcgagcaggtcaccgagggcggtgtcaagctgatcggcgctccctacctggcctccggcgtcgccaccaccgcatccaacctgctttcgcgcaatgtggccgacatcctcgtgcacttcgtgcgtgacggcaagctcggccaggatctcaccgaagaacttgatgacgcgctggtggttgccggccgcgccgccgccccggcagctgctgccgatgccgagaagtccgagaagtaaggaagaaggaataccatgcctactctcgtcgtttccattaccctgttcgtcctcgcgctgctcatcggtatcgaggtcatcggcaaggtgcccgccaccctgcacacgccgcttatgtccggcgcgaactccatccacggcatcgtcatcgtcggcgttgtgatcgtggcagccgaagccaatagcccactggcctacgtgttcatcttcctggccgccgtgctgggcaccatgaacgtcgttggtggctacgtggtcaccgaccgcatgcttgagatgttcaagtccagcaagaacgagaagaagggggagtcgaagtaatgacctccgcaaccgttggcgccatcgacatcgtcgcatggttcgtctacctgttctctgccgtcctgtttgtggtcggtctgcatttcatgaattcgccgaagaccgcccgcaagggtaaccagatctccgcgttcggcatggtcgtggccgtgctcatggcgttcatcgtgcttttcgccaagggcttcgtgaacattgtcgccgtggtggtgctggtcgtcggcatcctgatcggtgccgtggccggtgtcgtctccgccaagaaggtgaagatgaccgacatgccgcagctggtttccgtgttcaacaccgtgggtggtggcgctgccgcactcgtggccctgaacgacatcctgaccaaggaaggcaccccggacatcgtggtgctcatcaccgctggtctcggtatcctcatcggttctgtgaccttcaccggttcgctcatcgccgccggcaagctgcagggcatcaagtgggtcaagaagctgaacctgccgggcaagggcgtatggaacattctgttcgccgtgctgtccgtcgcttcgctggttatgctgtgcgtccagcccgaacagcgcctgctgtggtcgattctgaccaccgtgttcgccctgtgctacggcttggtcttcgtgattccaatcggcggcgccgatatgcccgtcgtcatctctgtgctcaacgcctgcaccggtacggctgtggctatgtccggtctggcgattgacaacgttgccctgatcgtggccggcgcactcgtcggttccgcaggtgtgaccctgtccatcctcatggctcaggccatgaaccgtccgctgctctccgtcttggccggtggcttcggcggtggtgctgacgccgccgctgctggcgacggtccggaaggcaccatgaaggagaccacgccggacgatctggccgttcagctcgtctacgcgcagaaggtcatcttcgtgcccggcttcggtctggctcaggctcaggcccagcgcgagctcgctgacctcggcgaactgctcaagggtcatggcgtggaagtctcctacgccattcacccggtcgcaggccgtatgcctggccacatgaacgtgctgctggccgaggccaacgtgccctacgaggagctcgtggatctcgatgagatcaacccgcagttcccgcaggccaacgtggctctggtcgtcggcgccaacgatgtgaccaacccggccgctcgccgtcctggcaccccggtttccggtatgccgattctcgacgtcgacaagtcccagaacgtcgtggtcatgaagcgtggccgcggcatgggctacgccggtatccagaacgagctctacttcgaggacaacacccagatgctgttcggtgacgcgaagaagagtctgcagtccgtcatcgccgccgtcaaggaactgctcgcgtaaccattcttggctcccctcacagaggggagccaagctctatatctactacaacccaaacacccgcttaacaaagctgttaacgcgacgccaatagcggtccggatcggtgctggcgctcatcgtgtggtcggcgccgggaatcagcagcttctcgcggtcgatgctggcgcaggcgttgtaattgatgtccagatacttcggattgacaaaagtatccgctccgccgtgaatgaacatcatcggaatagtcgcgtgccgtaatgccttcacacaggaggcgtcctcaaaccggtatccagccttgcgtttagacacatgactggccactttgaccagcagcacggccaacgagtgcggcaaatggaacatcgcctcggcattatccgtaaactgtgagaccacggaactgtatccgcaatcggaaatcgcggcgacgacgttgcgggggattcgcgcatcgccggccgccatcatcaccgtggcggcgcccatcgaattgccatgcagcagaatgcgtgcatccggatcagctgcggtgatcagcgaaacccagcccaacagatcgtcgctttccagcaatcccatacccacgtagcgcccttcgctcaattcatgggcgcgctgcgcgggtagcaggaccgtaaaaccgagttgcgcatagcgatgcgcccatttggccatttccgcgggctctccggtatagccatggcagcagatcgcgtatagatgcggctgtgggtcggaacaatccgggtccaacagccagccgtggagtttccatccatcatggctgcgcagcgtgaccgattgcttggcctcctcgaaccaccggccggcctcaagctgctcggacatgtcgaattcgatgcctttcggcgtctcctcgtgcggcatgttgaacatcgaacgtttggccttggtgtccagcgcgaacatgaacatgacgttggcggccgcggctgtgacgccggctcctgtggcggctatcgcggcaagtgccgcagccatgcccctgacaacgcgagtgtgtgcggcgatgacgtcatggccatcctcattgatgacgtcgtccgaacgagtcatatcaacctcccgatatggtactcaccatcgtacgttattatcgaaatcatccccaacttcgtgaaagaccgtacactgagtgtcgctgagcgtacgtttttcacgaaatggcgaacgatttcgtgaaaaccgtatgatgagaacgggtaagcgtacgttcttcacaaagttagggattatttcgcggaaaccgtacgttgacgtagctgggacggcctatatgcagtgtcatcgaagcatcattacgcaaagtccggggttggcgtatacttgacaattgttgctttggcgagggaagtgtgcatgctgacacatgacacagattccgttatcgactcggcgtatttcactccttgtagggtgtctttcggcgcgtcgtggcgtctgagcgagacagtacgaaacgaagatacaaggagtatccattatggctaccaccattaagcttgagggcgaggcccgttccgagttcggcaagggcgttgctcgtcgtctgcgcgttgccaacaagattccggccaccatctacgccggcggcgaagagcccgccttcgtgaccttgccgatgcgcgagaccaccctggccctgcgtcacaccaacgccctgttcaccatcgccttcgacggcaacaccaagatggccgtcgtcaaggacgtgcagaagaacccggtcaagcgcatcatcgagcacatcgacttcctcgaggtcaaggccggcgagaagatcgacgtcgaggtgccggtgttcgtggaaggcaccccgaagggtgctgccgtggcgttcgtcgacattcaggagctcaaggtccgcgccgacgtcaccaacctgcccgagaagatcgtggtcagcgtcgaaggcctgaccgacggcaccaaggtgttcgccaaggatgtcgtcctgcctgagggcgtcgagctggacgtcgaggatccggaagagtccgtcgtcaccgtcgaggtgccggaggatgccaccgagtccaccaccgctccggaagctgctgccgccccggctgacgccgccgctgctccggctgccgacgccaagtgagtcggtcgcttcgatagcgaacaattcagaacataactgaaacgtggaagcccgcagccgttgagaacggtgtgggcttcttcgttttttcaccatgtgaactctgccacacgagtaacacatgggtgtgcaaaagtatgcaacagagttcgcgccacaagcgcacagcacacaccccatatggtggctttcgggccgccaaagtcaagaagaagtagctagtgatgactgaaaacacgcaccacgatccggcagcactcgacaagctcaccgaaccgttcaccgtactgccgaacgacaaccccgcatccgatgagaagcgccagtccctcatcgacaagccggctttcggccaggtgttctccgacaacatgacccacatgacttggaccaagggcgaaggctggtccgaccgccgcgtcgaaccgtacgcaccgctcaagatggacccgggtgcttccgtgctgcactacgcacaggagtgcttcgagggcctcaaggcttaccgtcatgccgacggctccacctggctgttccgcccggatgcgaacgccgagcgtttccagaactccgccaagcgtctgtacctgcctgagctgccgattgacgacttcctcggttccgtggccgcgctggtcaagcgcgacgccaactgggtgccgtcccgccgcgagtacacgctgtacatgcgtccgttcatgttcgcttccgagccgttcctcggcgtgcgcgccccgcaggaggtcgactactgcgtgatcgcctctccgtccggcccgtacttcccgggcggcgtcaagccggtgagcatctgggttgaagacaagtggttccgcaccggccctggcggcactggtttcgccaagtgcggcggcaactacgccgcctccctgctcggcgagtacaagggtgttgagaatggctgcgagcaggtgtgctttgtggacgccgccaccaagacctaccttgaagagctcggtggcatgaacatgatggccgtgcacaaggatggccacgtggagaccccgtccctgaccggcaacattctgccgggcgtgacccgtcgctctctgattcagctgctgcaggacaagggccacgacgtggtcgagaccatgatcgccctcgaccagctgctcgaggacatcaggtccggtgaagtcaccgaggtgttcgcttgcggtaccgccgccatcatcaccccgatcggtcgcttcaagtccgagaagttcgacgtcaccgtcgccgacggcggctccggcaagctcacctgcgaactgcgcgacgagctgctcggcatccagctcggcgaagtcgaggacccgcacaactggatgtggaaggtgtgctgaactagcaccttttgtttccgactaagaccccttagaatgtcaacaattccaaggggtcttggcgtattggaaatgttcctggctagagaggtacagatggatttagcaacatttcgcaacaaataatatgatttaggtcttctgcacgttgcgggggttggttatggttcatccagatgagaacaggagcaaacctatgagcaagatgagtgacatgacggaatactatgtttcagcctaccgtttgccgtcaggcttcgagcattgctcgaaactgaagccggtggcagaggcagcgacggcgttgcgtcggtggtgagacaagacatgagcttctggcgacgctgggggatgttcaatgtcagtaatggttcaaggtttggactgctgacgtcgctgagacaccttagcgtcgttaacgggtcaggttctggcgatcaaacgacggtaaaaaggggcttagcgtcgttagctgtacataagttggcacggcaacgacactggagcgcgtgatcgtcggtgccgtgccaaactttggccaacctccgacaaatgagaaggactaacgtcggtggctgctcaaagtttggcgcgctggcgacgctgtaagaaaaaaagtgtggagtcgaaccggcaatagcatttattcggtttgttctctagtccaattgcgtcaggcaaggcctgttgtaggctcgggtacgacgggctgtagcgccgaataaggatgaacgggaacagaacgaagacggactgagacgaaccgaagcggtaccagaggggagcggctcatgcaggtggtgttggagaacaacatcgtttttgtggtcatcgagtatttagcaatcctgtgttggggattgtcgggcggacttgccgccattcgcaagggctacgacatcttcaccatcatgctgtgcggatggcttaccgcactcggcggcggtcttgtgcgcgacgtgatgctcggtgccctgccgccggtcggcatcaccgacaaaggctatgtgctcaccacgctgttttccggcattatcgtggtggtggcccacccggagatcaccaaactcaaatggacgatgactgtcatcgatgctctgggcctcggactattcgcagtcagcggcaccgcaaaggctctggcctacggttcctcaggcatgacagccgtattccttggcatgttcacagcactggccggcggcctcattcgtgacatcttcatcggcgatgtgccaatgattattcgagacaaacacctctatgccgtgccctcgttcatcggttgcattctgaccgtgcttgtatggcgtggtgtgcactacggttggttcgacatgtgctcggaaatgctgctcgacgtgctgatcgtcatcatcgtggtggcgctgcgcctgctctcggtcggcttcaacgtcaccttgcccggagccgtcgagcgtcatcgcgtctacctgcccagcgaaagccgatatctcaagcgcccggtcatccatccgcacgccgataccgtcgatcccggcgataccaccaaggacgaagaagacaagcctcaggatgattcaagaccgcctcagggctaactgccttcaaagaggtacatttggtcttctgcaaaatgacaactgctttcaaagaggtacctgaagcacgaaacgtcgagtacaagcgttgcaatgacggcgtttatacttgggctttctcggattcggtacctttctgaacggagatgtcatttcgcaagaccgccaatgtacctctttgaacggagatataaaaagtcccgcaagccagatgacttgcgggacttgctaaaaccttaagaggcttatgctcacagagcgttgatcgcaacagcgaggccggacttgcggttggcggcctggttcttgtggatcacgccagcgccagcagccttgtcgagcttctgggcggcaaccttgtaggcggcctcggcggcagccttgtcaccggcggcgatggcttcgcgggtggcgcggatggcggtcttcaggccggacttcacagccacgttgcgaaggtgcgccttctcattggtgagcacgcgcttcttctgcgacttaatgtttgccacgtttactccaaacgatgtgtgttataaggacatacaaaaggtagaggatagcatgagccccggaaaaacccgcgcaatgccacgccgaatacagtccctcggctacactaggtgaagtttgagtatatgccaagaggaggaatgcgttggtcgtccaacacaatcagccgggttccacggatcagtcggtgattcgcaacttctgtatcatcgcgcacatcgaccacggcaagtcgaccgtggccgaccgcatcctgcagttaagcggcattgtgcccgagcgcgagatgcgcgatcgcttcctcgaccgtatggatatcgagcaggagcgcggcatcaccatcaaatcccaggccgtgcgcgtgccatggacctttgacggcaccgaatacacgctcggtatgatcgacacccccggccacgtggacttcacctatgaggtgtcccgcgcactggccgcctgcgaaggcgcggtgctgctcgtcgacgctacccagggcatcgaggcgcagaccctgtctaacctgtacatggccatcgaccatgatctggccatcattcccgtgctcaacaagatcgacctgccgtccgccgagccggacaagcatgccgaggagatcgcaggtctgatcggctgcgagccgagcgacgtgctgcgcgtctccggcaaaaccggcgaaggcgtggccgacctgctcgaccagatcgtcatggacgtgcccgccccgcacggcgaccccgaggcccctgcccgcgcgctgatcttcgactccgtctacgatccctaccgcggcatcgtcacctacatccgtatggaggacggcgaactgcacgaccgcgaaaaggtccacatgatgggcattggcatgacccacgatcccatcgagatcggtgtgatcagccccgatatgacccgtaccaaggcactcggtgccggtgaggtcggctacatcatcaccggtgcgaaagatgtgagccagtccaaggtgggcgacaccctgacctcggccgtccgcccggccaccgagccgctgcccggctaccgcgaccccaagccgatggtctacgccggcttgttcccgatcgacaacgcgcaattccccgaactgcgtgatgcactcgacaagctcaagctcaacgacgccgccctgatctacacgccggaaacctccgtggccttgggcttcggcttccgctgcggcttcttgggtctgctgcacatggagatcgtcaacgagcgactctcccgcgagttcggcctcgacctgatccagaccgccccgaacgtcacctacgacgtgaccgccgaggatggcagtcagcatcatgtgaccaacccgagcgaattcccggacggcaagatcaagaagatcgtcgagccgatggttgccgccgacatcatcacacccaaggaatttatcggtgcggtgatggatctgtgccaggaccaccgcggcattatgggcacgatggagtacatctccaccgatcgtgtcgagatgcactaccgcattccactggccgaaatcgtgttcgacttcttcgaccagctcaagtcccgcaccaagggctacgcttccctcgattaccatgaggatggcgagcagtccgccgatttggtcaaggtggacatccttattcagggcgagaaggtcgatgcgttcagcgccatcgtgcaccgcgacaaggcctacagctacggcgtgatgatgaccaagaagctgcgtggcctgattccgcgtcagcagttcgagattccgattcaggccgcaatcggttcgcgtatcatcgcgcgtgagaacattcgtgcgttgcgcaaggacgtgctcgccaagtgctatggcggcgacatcacccgtaagcgtaagctgctcgaaaagcagaaggccggcaagaagcgtatgaagatgctcggccatgtggaggtaccgcaggaggcgttcatcgccgccctgtccaccggcgaggactccaacgaccgcgacaccaaagacaagatccgcgccgctcagaagaccgagggctagtgttcgaggtctacatccacgtcccgttctgcttgcggcgctgcggttactgcgacttcaacacctacacggctacggatcttggtgcgggggcctcgcgcggcaactatgccaatatggtcattcgtgaaatggccctgaccaagcagtggcagctcgaccacggcatcgaggagccaccggtctccaccgtgttcttcgggggtggtacacccacgattctcgccgcccgcgatctggtcgccatgctcgatgccatccgcaagatctggagcatcgcgcccgacgccgaaatcaccaccgaagccaacccggacacggtcaacgaatattacatcaatgagctcgctgccggcggcttcacccgcgtttccttcggcatgcaatctgccgtgccgcacgtgctcaaaaccctcgaccgcacgcatacgccggccaacgtggccgcaggcgttaatgccgccaataaggccggcctgcgctccagcgtggatctgatttacggcgcaccgggggagagccttgacgattggcgcacctcggtcacgaccgccatcgacctcggcgtgaaccacatctccgcctacgcactgaccgtggaacccaccacgaaaatgggtcgtcaaatcgcggccggcactctgcccaaacccaatgacgatgacgaagcagccaaatacgaaatcgccgacgacctgttcgccgccgccggcctcgaatggtatgaggtctccaactgggcccgccccggatacgagagccagcacaacctcggctattggcgcaacgtcgattgggccggtctagggccaggtgcccactcccactacaacgcggtgaccgaggctgaccacccccagtcggcttcgctgacagcccccgccagcgggggcaagtccgaagccattgcctctgcctcagctgatggacaggccaacgccgaacttggagaaaccaacgccgaactaggtatgatcaacgcgcatgggaacaactcccaagaaattcatgcccccgctggcgggggctgtccggcggatgccggactgggggtggtttctgtctcacacggtctgcgcagctgggacatcgcgcacccgcgtttgtggggcacggccatcaacgagaaccgtgtgccgtgggccgatagcgagacgatcactcccgaggaaaacctcgaagagctcatcatgctcgggctgcgcctgcacgagggccttggcctcgaccgcatcaaccgcgccatcaacgatgcaggtatgagcagcacgccccagactctccgaaccgtttcggttgaccaactcgcccccatgatcagcgaaggcctgattaccgtatccgataatcatcgagtggtgcccactcgtcgtggccggttgctcaatgactcggtaatcgaacagttcttcgattacgtcggtgtatgagtcggtggtatggtgcgcggcagtcgccattacctgttcgctagttgtggttacaccgtcagagggagtttttttgttttaccggcgggggagggaaccgcgtaggactacgtccggggcgctttgcacgtagatcaggcggttggcagtgccgccggtggcctccgcgtcatcgcggttggacaggatgctgtccacggcggcctggcccatttcggccagcggcagatgcacggtggtcagtggtgggaacacgtcggcggagtaggggatgtcgccgaaaccggtgacgccgatttcctgacccggctcgatgccgttggtgcgcaacgcggtcatcgcaccgatggccatcacgtcgttgagcgcgatgattgaatcgatgcctttgccgtcgtacagtgcgccttcgcccggcttcagcagtccggatcgggccatttgcatgacggccgcatagccgtcggtgcggctgaacttaccgtttgccacggctttcgggtccacggtgatgcctgcctcgtccaacacttccatcacaccggccagtcgttctttggaggagcggtgtgcgtcatcgcccttgagaatagcagggcgcgtatacccggaatcgacgataagctttgcgatggcacgcgcgccgacgtcgttcgccacgtccacggccgggaagggcaggttgcggttgagtacgaacacggcatgtccgccggacgattcgtactggatgagttccgtctgcaacgcctggcgttccggcgcgtcggtgtattcgctttcggagatgatgatgccgcgcggcctggtggatacggacttacgcaccgcctccaactcctcgtgcggggtggctgccacgccgatggtcacggagatgccgcgttcggccgccgccttgaccacgccttgcgacacggatgcgaagtagggatcggagatatcggagaccagcagcacgatgttcggtgcagtgcctttggccactgcctgagcataggcgttgggacgatagttgagcttggtggctgcttccatcaccttgacatacgattggttgcgtaccttgcgggtgctgccgttgagcacacgggatgcggtggcgatggagacctgggcttctttggcgacgtccatcaatgtcgctggcgattgcgccttatcgttctgtacggccacgatcgaatcggtccttttcttccctgaaacggaaaacatgtctaaacgcttaccgcaatgatatcgcagttttgcttgcaatagtagcattgtggattggaaagcctgaattttgaacaaaaataatcacgcgaattatggaaagcgcttaccgttccgcgtgtcgtgcggtatgctcgaagcatgacgcgatacttatgtgcccctgactccttcaaagagagcctgaccgccatggaggcggcccgggcgatggctcaggggattgagaatgccgaccacgatgccgaggtccgttgcctccccatggccgacggcggtgaaggcaccgcacgtgcgcttgtcgacgccactggcggatcgatgcacgccgtgccggtccacgacccgctcggccgacctgtcgaaggccacttcggcctgctcgctgacggcacgaccgccgtggtcgagacagccgaagccagcggcctcgcactgcttgaagccaaaaaacgcaacccgttgattgcctcctcctacggcaccggcgaactcatactcgccgccgtccgttccggagccaagcgcatcatcgtcgggctcggcggcagcgccaccaacgacgccggtgccggacttctgcaggccctcggcgttcgtcttctggacgggaacggcaacgaccttaagcacgggggagcggccctcgctgatctggccaccatcgacatcagcacgatggacccggctctcaagaacgtctccatcaccgccgcctgcgacgtgaccaacccgctgaccggtcccaccggcgccagcgccgtgttcggaccgcagaaaggtgcctcccaggccgacgtcgccacactggacgccgcgttggcgcacttcgcgcaggtcatcgaaagccggctcggcgtcgctgtgaacgacgtgccgggcgcgggcgccgccggcggtatcggcgccgcgctgaaaggcttccttgacgccgaattccgtccgggcatcgccatcgtcatcgaacaatccggacttgatgcggccgcgcaatgggctgacgtggtgttcaccggcgaaggctccatcgacttccagaccaagttcggcaaaaccccggccggcgtggccgaaaccgccaagcgccacggcaagcccgtgatcgccgtcgccggacacatcggcacgggcatcgacgaactgcatgaggtcggcatcgacgcggtattcggcatcgcccccggtgccgccagcctcagcgaactgctggccgacgcggccgccaacgtgacccgcaccaccgaacaagtcgtacgaaccctacaactgaagcagcttcacaagctccctctgatgggccgagccgtgaaggaaacgccggaggcgtttccaggcgagggcttgacgacagtcaacccagccgaaggctccataattgcgggacgagctgccgcggcaaagccgtgactgagggggagacttatggcgcagccgcaaaaaatggcatcggctttcagccgatacagtcattcgtctgcttctctccctcagtcagctgcgctgacagctccctcgtcagagggagccacacaattcggaaaggaagatatgcgcaccatgctgtacaccaaggtgaccagcatgctgagcaccacgggcatcgccagcgagagatacgccttcggaatcggcgccttttcgaagggttcgttatccatttccgtcccttggtgttttcgttcttcagtcactgcgcgggatgccgttcggcgtgcatcacaggcattgtagaggcaacagtgtggacaacgggcgggggggagtatctcatgatgcggtgagggcgttgatgatgacgcatcgtgtattggtggccgtgtgcatcgtatgtgaacctgtgctggcacggcgtacacacgatgggaaaagaaagaatatatggaccccgttgtcccggttattgttcagttattactgtgttgaattattgcgttattcaattattgtggtgtgccggccgattgcggcctgcgggggattgccttcgtatgtgtcgtgcaatctcatgaatgggatcgttcgctagattcagcgagcgtccttgttggcggcgttgatgatgtcggcgaacatcttggagtcggcgtagccggcgcgggcgatggcgtccataccggagagggtgaaaccgcgaatcatggaatccatgaatgacataatgtgttccttgtcttgacttgcaaagccgtgggctttgcgatgtgttgttgtttacgttatgagacgggccgtgtgtgagcggcgagtcagggaagaggctcagcgagcgttcttatcggtgtcgttgatgatgtcgagaatcatctgggagttggcgtgaccggactgggccagggaagtggcaccgtacatagccagaccgcgaatcatggaatccttgagagacatcatgtttcctttcgttggtcaaaaccttgtggctttgagttttgtttatcggtttctttctgaaaccggtttcagaataacgcagtccgatgacaaacgcaaggggactattccgctctcggcgtttctggcggaatatcgccgttctatagataccgttcggtagttaagaggctgtctagtcgactttctgacggtcttgttctgggcgcatggttttcacgaaatggcctcatgtcgcggaaatcgtacgctgagtcgtcgtaagcgtacggtcttcacgaaatggggtctcatctcgtgaagaacgtacactgagtcgttctgggcgtacggttttcacgaaatggggcctatcttcaccggattttgggcacaccggccttgagcagcttggtctcaagattgatggggcgtagcagatcctcatagaacacatggacgatttcggtgacgccctgttcccggagatgccgatcacgtctgcggtcgtactccattttcgcctggaggcttgcgcgattcttgttgctggtgtcggcgtatttggccatgccgtcgtattctgccacgatgatgcggccgtctgcgagcttccaacagaaatcgacgcgatatggcattgcgggattgtcgggattcatgaactgcacctgcagcaggggaatgccgaaagacaattcggtgatctggccacgcatcaatgattcgccgccgttttcgctcaggggatccgcgtacttcagcagcttggtcacggagacctcgtcgcagacgctttgaatcatcagcgactgcacctcttcgatggtcgtcagggactttctcagagccgaatcgtatatgggcagcgcctgtgggaatgggaatgccgcgcagtcgagcagcgttcgcgccggagtcgtcaagagaatgccattatgcttccgcgtcggaatccgattgatatagatgcggttgagacgcgcctcgtctccgccgccgatgccggacttcgaggcgatgtgcactgtgccgtcgtgcagggaatagttgtgctgcagtccgtatacgcacgccgcactcaaccccgcaaatacccactgagggtggattgcggacagcgcacgtatgacctgcaatgactgttgctctctggtcatggtgttccaaagtattcggtcggcgtacaggttcttatacggtgacaccagctccccggcatgcaggcgacgtttcagggcgcgccgttgcgcatcactggtgccatagcagcagcgacgctcctgcttcgcctgctgcagcagtgcagaaacttccttgtgttctttcatatctcgacgctaagggtgattttgattgttgcgcaagctcaaccggcaaatgtgaatactatgtcacgcgaattgttggtgtggataacttgaatcgacgtcgacggctttgccgacggtcttgtcggaggcgatattagcctaggacaccttgctgcgccgccttccataccgagaacagtcatcagtgacaccgagggcatcttcagcgtatgttcttcacgaaatcagctgccatttcgtgaaaaccgtacgctcagaatgactcagtgtacgttcttcacgagatgaggccccatttcgtgaaaaccgtacgttgacgacgattcagtgtacgttcttcacgaaattagggatgatttcgcggaaaccgtacactcaccgcaactcagcgtacggttttcgcgaagttattgatttggatataggttccccgtcatgaactacaatgaatcgcggcgaaaaacggggaaccgaagtcggagcgcggctgaacggatatgggtgtgactggatgactgccatggtgatgccggttctccttgacgtacgcaacaacaacaactgacaacaacaggggagacaaggatggcgagaagtgcgggccgcacccgaccggtgatcaaggacgtggccagactggccggagtctcggcaccgaccgtctcccggtatctcaacggcaccgtcaatgtcaccgaagacaagcgtgaacgcatcgccaaggccatcaaggagctgggctatgagccgagcattgtggcgcgcgccctgtcgaaccgggagatggactccgtggtggtgttcgcggccaatccttccgccttctccacgtccgaaacgaaccatggggtcgaggccgccgcccgtaaacgtcggttcctgctcaatatcgtttctttggatgagtccgacatggactccgtcaaggctcgtgtgcgcatgggtttgtcgatcaggccggcgggcgtgatcgtctacgagtacgaccgggccggcatcgccgcactggaatacattcccaaagatatgccgatggtcgtggtgggtggcagcttcggcgacggcgaataccagatcatcaacgccgaaagggatggtggccgttggatgaccatgcatctgctggatctcggccatcgcaccgtgttccatgtggggcgcccggaaggaccgaccgataacacccgcaccaatgggtggcgtgacgcgctcaaggagcgcggcgtcacggtacctgacccaatcatcgtgcccgacgatgatttggaggagtcggtcaaggctgggcgcaccttgggccgtcgtggtgatgtgactgcgattttcgccggcaacgacgagaccgccatcgctgtgatccgaggtctaagggaggttggtcgccgcgtgcctgctgacgtgagcgtcgtaggctttgacgaccgcaacttcggtgccatgtggaatccggcgctgaccagttacacccagaacttcctggacatgggggagcggtccttccggatgctgttcgaacagattcaggccaagcgtgccggcgatgacgcgccgccctcgcaggtcgaagtggtgcaaggcaagccgtgtctgcgtgcctccgaacgcgcgtacggcgacggcgaaatcgcgtagtcgatggggcgtgcgtatcaatcgatagtgactgtagcgcattcatatcgtgacgaggagtctcccatgccgaactgtaagcgcttaccttaaatagttcgtaatgtgatttacgtcatactaatagatgttctgaatcatagtgttatgcaaggattccttgcggaaaatggctatttatcaacagttttcgaaaagtccgcatgatgggcgactgtgagcacgctttatggtaatcgctttccgtagtgttattgttacagtgtgacttttgaacaatcggtaactctgaagactcagccccagacctcgggcactatctcagcggcagacgccgcgatgcaatcggcccgcgacgaacgcatccccggcaaactcatctgcgcgatcgtggccgtcggctcactctcattcttcggcatcctgaccgaaaccgtgatgaatgtgctgttcccgcagctgatgggcgtgctccacatcagcgaggccaccatccaatggctcaccaccggctatctgctggtcgtgtcgattactgtgccgctcagcgcatggctgcgccgtcgcttccgccagcgcagcatcttcctggcggcaacgcgatgttctccacgctgcagcagttcacgggtgcggccggcaccactgtggtgggctaccgtgatctccgtgttccagtccggctcgggcaaggtgggttccgccggctatgccgccgccaccgtgaccggcgcatagattgactacgcgatcatggctgtggtcatcgttatcgttatcgtgttcgtcgccatgctccacgccctgcgtaaccggaagtagatggtaagtcgagtggcaccatgctaccgcgcaatggctgggcatggagttttggctaggaatcgttcgacaggcgttggcgcggccgctgagagcattcgcgtcgaaaggtttgccggagctcgttcggcgtggaatgggccgattcaccggtgattgttggtcaaacagccaatgctgacccttctgccaatggttagcgaggttcctatcataagcatttcggagagcgatctcgaaaaaggcgacatccttcacgaggatttgaccaaggtcaacattccactcgtataaagtaaggctgtaagcgcatcttggtggcaagcgtcaaggtatgtacggaatcgcggggcggaaagccactcctcaatccactgcggattggtaataacggatgattgtaacgcatgaatcacgaggcccccttacctgggttataggccaaaatgtgtgtccgttttggcttgtgttcctttgtggcggtgggcgttcctcctgttcgagttgtatgggcggggaactcgaggtcggccagaatgtgtgtccggaatggccggtcaggccttgcggcacaacggttgagtgactttcgagttggcgtggcagattgggtggatgaacacaccttgttgcgccgtgtgcggcgagccgatgaagcggaacggaaggacgagctcgggacggatcaggtggcggtgccggaacgccggctgcgggagctcacgcacccagtcgcgcgacaacagcgcccgtgatctgcggtgcggtctggattggctgttctcgaaacaatcgcaggccgagcaccggctgccggcacgcacgctgcgccgccggtgcgagctcatgtggagcctgtggccgcccgtgcccctggtggacgaggtgcatcatgtggtgcatgtggacggcatccacctgcaccgcgacgcggtggtcctgatcgcggtggccggcgggcacgtgatcggctggcacgtcgccaaaagcgagaaagcggcggcatggcagtgcctgatggcgcgcatcgcgccgcccgacgtgctcgtatgcgacggcgggggcggcgtcctcaaggccgcgaaggccacgtggccggatacgaggatccagcggtgcctgttccacgtgcaggccaacatcctcgagctgaccggcaggcggcccagactcgaggcgggcggacggctgcgccgggtggccctgtccctgccccgcgtcggggacgcgggcggcgcggccgaatggctggtctccgacgagaagagcgaatacgccgacggcggcgtgaacgacatgcaccaaaggctcgtcaaggcacggcgcatgatccgcaggcgcatccgcgagggccacctgttcacgttcctcgacgaggggctcgcgtccgtcggcccggtgccgtccaccaacaacctcgtcgaatcatggaacgcgcgcctgcgcgacatgctgcgccgccaccgcggactgcggctggtcagacggctgaaggcgatctgctggtggtgccaccagcacacggaacgtcccgagaccgacgcgtggctcgcggccaacgcgatgaccgacgaacgactcgagcgcctctaccggcaggcatgggaaaggagcccgcaaggccagtacgagacgttcggcatccccgcaagatacggcaccggcatcgac

SEQ ID NO: 1089 - DNA, 83805 bp, Unknown
  R13_10m  MAG No. k141_10270
gatctgctcttcggtgagcgatgcgatcttgttgtacgcgccgcgaatcttgaaggaaccggtgacctgcaggttttccggcttcaggagaatctcatgaccggtcatctcgctcaataccggcgaagggataatttccgtctgacgggcaggccctttgagacgtttggcggccagcttcagttcggctgcatgatcacgttgcagcgccttcaaaacatccttttgttccatagcttttaattgtatggcgcggggacaccgaaaacagtggcttatctcgctaacgagcgctcatttacggtaattcccgttcgtaatcagccccttgaaacggagataccgcctagcaacacttataggctgacgacgacgccctcccatggtgcaagctcacggccggcaagagcggccacagcgtgcgcggcgtcatacgtgctgatcaccacgttcgactcggcaaggccatcggccactgccaacagttcggcggattcgcgaggcaaatcaacggttcggccggacatgttgaccacgaccagcagcttctcatcgccgagggtgcgggtgaaggcgtagacatgcgcgtcatccgcatcgagcagatgccagtcgccggccgccacgacaggcatgtcgtggcgcagcgcgatgagctgcttgtagaaggcatacaccgaatccggatcgtcgaattcgccggccgcgttgatcgccgcatggttgggattgacggagatccatggctccttagcggcatccggcgcagtgaaaccggcatagacagagccgtcccattgcatcggggtacgcgaattatcacgaccgcgcgcggcgatacccgccaacatcgattcgggcgactgcactttggcttcctcaaccctttgacggtaagcgttcagggactcgaggtcacggtactggtctaggcgcgtgaagtgggcgtcggtcatgcctagctcttcgccctgatatatgtacggggtgccgcgatgcatgtgcagcatcaggccaagtgccttggccgaacgcacacgagattcctccgaggagtcatcaccccaacgagaaacgacgcgaggctggtcgtggttaccagtaaacaggcttgcccagcctgcattcttcacggccgcttgataaccggccataatgctcttgagcttcggcaggtcaagtggcagtggcttccatttgacgccttcgcagtcaaaatcaacgtgctcgaataggaagagcatgtccagctcgccgttggcggggtcggtgatgtattcgttgcgctgtgcggtaacgccgggagcctcgcccacggtgaggaagccctcacggccttcgaacacttcacggcgcatttcggccaggaattcgtcttggcgagggccgtccgcgcagaacggattcgggttggaatagccttcctcacccacgggcagatcgtccagctcggaaccgtactcgccgggcagcttgccagacaggtccgtgcgcttggaaatcagcgtaatcacatccatgcggaagccgtcaacgccgcggtcaagccaccagttcatcatgtcgtataccgcgcggcgcacagccggattttcccagttgaggtccggctgcttcttcgagaactgatgcaggtagtattcgccacgctcagggcaatactcccatgcagaaccgccaaagtaggagccccactggttgggctcggcaccgggctcgccggcagtggtgccgggacgggcgggacgccaccaataccagtcggcgtgctcatcatccttgtttttggacgcttcaaaccaggcgtgttcatcggaagtgtgattgacaacaagatccatcacgatcttgagcccgcgcttgtgggcctcggccagcagctcatccatgtcgtcgagtgtgccgaacagaggatcaatgtcctgatagtcggaaatatcgtagccattgtcgtcttgcggagacttgtataccggggatagccacagcacatccacgccgaggtcggccagatagtcgagccgtgacgtaatgcccttgagatcgccgaggccgtcgccgttggtgtcttggaaggaacgcgggtaaatctggtaaacgaccgcattggaccaccacggatttggggtggcaccgttggtgcggatggaatctggaattactgtgcgttgtgaagtggtcatcgttggctcctccattatttatggtctacattgcctgttgctcatagtctaaaaagcgctgaattacatttccattggggaactgcgttggtgtgccggaaacaaaaactgcaaagagccggaaggcactgctacggctcaattctcataagctgcacatgctatttagcaacatatgggccctttcgctgtttgtggtgggtgactgtgccgtggggtgatgttggtcgggtaggttggaggcatggatgcctctcacctgttcaccgccgcgcttcggctgcggtcgccttggagggtcgggtctgcggacttccgtgacgccgacggcgacgggcgggagccgcacatcacgatcggcttcgagcccggcagagggttcatgctcctgttcgaggcgtgggtgtggctatatcgcctgtgctcgtggatgatgcactcgaggctcgaacctatgaaggagctcgcccgcttgttccgccgccataatctacctgacctgcggcagctcacatattaacggttcttctgattgcgacgcgcaagagcaacttcgggcgcgcttggattgcctgcttgaacccactggtgcggggatagatgatttagttgacacgcctgcgggaatctggtggggatttcgctggcacaccggatttcaagcaaaccccgcctcgggaaccgctccggacttcggcgttggcccggttcgtatgtcaatcgattgccgtctgaaccgggacagaatccgctgtcccggttcgcgatttttgtccttttttacaaacagggacaagccaatctccgcagttcatatgctccgtaatacaaaatcggcggaatagagccgatcccggaatcaacatgttgtcccggttttcacataaaacgattgacattcataccgggacaatgaaaattgtcccggttcgtgaaaatcgcccgaaaccgcgaaccgggacagcggattctgtcccggttcgcgcgtcaaacggttgatatgtggaccgggacaagccagtggcacggcgacacagcagatgcgctcaattgcaccgtaagccgtacggtttcgtcactttttcattcgcacaacgagcaaaaccacatgacctttgtgcgccaccgccacatcaaccgaccgtcgcctttattgtggcggtttccagtatggcaacaggacagaagagcctcctccggtgagagccggaggaggcttgggtggaagcggacctttacttcacagagtcctgcaattcaggactggcctacggccagacccaacatgacctcgcgagtacgcgacctatccggccgcccgggccgggaaacagcccacggggctgtttccttaatcggctcgtctcgctcgacgcggtgaagtaaagcagcgcctgcgctgttttacttgaccgctcccctcatcacaccaccgacgacccacttttgggcgaagatgtagacgatgaggatcggggccatggccatcaggtagctggagaaggccatcgggtagttggtggcgaactgcgagctgaagacgtactgggcgagcgggatggtctggttcgactggtcggtcaggatgatcaacggcaggaggaagtcgttccaggcccacagtgcggtcaggatggcgatggtggcgttaatcgggctcatcagcgggaagatgatggtccagaaaatgcgccacgtggatgcgccatcgattcgggccgcctcttccagcgaaactggaatcgaacggatgaagccagtggcgatgaacaggttcgtgcccaggccgagcaccgtgtacaggatgatcaggccgacctggttgtccaggtgcagggagcccatctgcttcgcaatcggcagcatgacgaccgggaacggcacgaacatggcggcgatgaagaagtagtacaggaagcggaagaagcgcttatccatgttgcgggccacagcgtaggccacgaaggtgttggtcagcaaggtgagcaccacggcggccaccgtgatgatcgcggagttgagcgcggccttcgggtagttgaccttggcggaggcgtcggcgaagttgtgccactgccacgaggtgggcagggcgaaggtgccggcttcggccggggtcttcagcgcggtgacgatggtgaagtagagcgggatcagaatggtcaggctcagcacggccacggcggcggtcagccaccagttgatcttgtggtccctgcggaacttggcgggcttgccggacttggacggggtaactgttgcagtagtcatttcttatcctcccctaaatcagatctgttcctggctgcgggagatgcgcagctgtacgaaggcgatgatcgccagcacgatgaagaagagcacggcgtttgcggtctggtaggcgtactcgccaccggtcaggccacccttccagatgaggtaggtgacggtttcggtggaggagttcggaccgccctcggtcaaggcgacgacctgatcgaaggtgccgagcgcgttcttcatggacagcacgaggttgatggtgaagaacggtccgatcagcgggaatgtgatcttccagaacttctgccaggcgttgacgccgtcgatggcggcggcctcgtagatttcgtcgtcgatggtctgcaggccggcgaggtagatgagtaccgagtaggcgatgccctgccagacggcgaggaagacgattgggatccagctgagttgctcattggtcaacagcgaggtggacagccacttgatgcccagcgccttgccgagctcgggcagcgggttcatgaagatgtacttgaacacgtagccgatgaccagcacggagagggtgtaggggatgaagaagacggctcggaagccattcttgaaggcgatcttcgagttcagcagcaccgacaggaacagggcgatcacattaatcagcaccgtgatgagaatggcgatgaggaacgtgaacaggtaggcgtggcccacgcggttgtcttggaagagggcgatgtagttcttcaggccgatgaacttgtaatcgccgtagccctgcgagttggtgaaggaatactttacgccgtcaagaaatggcaggtacaggaagaaggcgaaaatgatagccgccggaaccaccatccagtagtaggcggggtccaccttgcgggtggagaaggcggagaccttcttcttggccggtttcttggcagcggtcttggttgcggttgcgtgtgacatgatgttctcctctcctaccgatcactcgaaggtcctggcttggaccttgtcccattcggtctgcatctggttcaggaagcggtcggtgttgccggaggtcaccatggtctgcaggtagccgccgatgttgatggacgaaggaatgtagtggtcgcagaagtcggccagtcggttttcctcgaagaacgggcgcacggtttccagcgcatcgttgccgaagtaggtgtccttcagcggcgtgatggcggactgggcgtcggcgtaggcgtcaagctgatccttctgcatgaggaactcgacgagcttcatcgcttccttggggtgcttggtgttcgcaccgatggtgagcatcacgtcgtcgccggcggtgaggatctgctcgctggcgtcatcggtggccggcatctgggcgaaaccaagttcgatatcggggttgatcagcaggatctgcgggatggcgtaggtgccgagcgggatgatcgcggccttgccttgggcgaagttctgtgtgccctgctggtaggtgacgccggtgtccgcagtggagtaggtgaagagctcggattccttctcgactgcggtcttccacagttcctggaacgtggtcttgccttgcttgagctcggtgtacttcgattcgggaaccagcgtgccggccagggaggcgagcggtgcctgggtggtccaggcgtcggccacggaaccctgcagcgggttgatgccggcgtccttgaaggtgttgagcatatcggtgaactcgctccaggtggtcggcggattctccgggtcaaggccaaccttgcggaacagagccttgttgtagatgtagccggaggcgttacccgcgaagggcaggccatacaggcgcttcttggaggaatcggtggtctgcaccagattcttggcgatctgcaccatgccggggttgagggtgtccacaatgggttcatcggtgaagtcgtagaacacaccggaggcggcgaagttgccgaagctgatgtcgccgttgaaggtgatcacgtccggcacacgattcttgacgaaacgggtgcgcagatcggtctgggcgttggcggagttgttgatgttgaccttgatggtcgggttctgcttctcaaagtcggcgaccatggacttgaactggtcggcggcctcggacttgaactggaagaaatccagcgtgacggtgcctgcggtgctggagccgcagcctgccaggccgaacccgacggcgatcgcgcacatcacggcggcggtgcgcacggccagacgcttcagtctaggcgttgcatgtggggaatcggacagcataattgttgactcctttatctttcttttcctccggcttcggtgccggcggttcttccactttccaaggtaacggttcggccatttcattcccagcgccagcgagcccacttgcgcaagcaacaaaaagcgcggtattttgtgattaacgcaataaatacagcgaaggggcttgcatgtctgatgtcaacgcgattccacagtggttttccggatccgagcatacgcatcgcgtggcggcggcaattgcccaatacgggccgatagcccgcactacgttggcacagatgctgggactgagccaaggggccttgtcccgcatcaccagcgatctgatctacgccggggtgatcgaggagcttccggccggggccggcccgtcaggcaagctgcccgagcgattcacgccaagggaaagttcggatcgtcgcggacgcccgcagacttcgctggtgttgtgttcgaacgcacgcaccttcattggtgtcaaggttcatgggatgtcgattgtggccgctgcggtgaacgcgcatggcgaggtggtgtccggccggcacgaggtgccgatcggggcggatcagtcggctgagtatgtggtgtcggccatcacgcggctggtgcgcgaatgttccgccgatatcgcctcttccggactgccctcccccactgcggtgggcgttgcggtaggtgggcatgtggtcgacgattcgattgtgacgttcgcgccgttcctgcattgggacggggccacggacttggggacgatggtcacagaggcgaccggcctgccgtgcggggtgttcaatgatatcgattctctgctggtggatgcctcctggttcgggccgggtgtcggcgtggatatgttcgccgtggtgaccatcggcgtgggtgttggttattcgctggccgtgaacggcaagccagtgcagtacccggataagagctatggtctggtgggccacgtgcttatcgatccggaggggccgcgctgcaccagcggacatatcggctgttcacaatgcttgactgacgattcgatcgccgaacagtactctgcgattgtgggtcgcgcggtcagttttgaggactttgcgcgcgatgccaagggacgtgtgccgcaggccacgcagttggtgaaccggacgtgtttccggttgggttcgctggtggctacggtggcgaacatcgcgatgcccggacatgtgatgattgccggggagtccgcgtttttggccaagctcggcaccgattcgctgcgcgatggcattcgtttctaccgtcacagccagacccagccggtcaagttcacgattatggaccacgactggcagctctgggccaaagccgccgccagtcgcgtaatcgtgaagcatattgggtaggccgttcttggctcccctcagagagggaagccaagaacgttgcttcgccacagttactccgccacgaccagcaattacggacttgcctatcggcaaggctcaatcccaccttcgctcagctgtcgcttcgctcaggccgtggctgctgacagcctactaggctgtcagcttaacgccacagccttgagcaatactgcctgctgggggtggagggacgggggacggatgccgtaacgctgcagggcttcgccggtcaggactacgccttcctcgttccaccagccgagagtgctctggccgttggccagaccggtcaaatccaagctcgggtcgagcgggctgacgcggtaggtgcgctcggggtcaagtccgggcaggtgcacgggcgcggccggataggtctggctggtggtcagctgggtgaagcggtagatggcggcgtcgcggttcggcatcaccatgccatccaagcgcacggccggatcgttggagtcggcgtgcacgcaggtgtcgatggcgaaccagtcgcggtgcttcttgaattcggccacccacacggccagcttggcgagcgcctcgtccggctccttcaacaggttccattcgatgcccatgtggccgaagaacgccatggccatgcgcagttcctggctggtggcacgctgggtggagtgcgcgggactggcacccacgtgctcgcccatcatcgccggcggcaccagcagcgaggtgtagcgctggatgtccgcgcgctcgaccgggtccacgcagtcggagacccagatacggtcagcgtgctctaggatgccgaggtccacgcggccaccgccggaggagcagctttcgatctcaaggcccggatgtgcggtcttgaggcccttgaagatgttgtagacggcgagggtctgcgcgtgcacggccgggcggccggagcggcgggaaccgggctcggtgacgaacttgttgtggtcccacttgatgtagtcgataccaagctcgccgacaagctggtccatgcagccgtagatgtagtcgaacgcatccggattggtcagatcgagcacctgctgagtgcggccctgcagcggcagtcggccggtggtgggcgaaagaatccaatcggggtggttgcgggccacgtcggaatcggggttgaccatttccggctcgaaccacaagccgaattccatacccttggcgtgcacgtagtcggcgagcgccttcagggacttcggaccatcgggccagacgtcctgcgcaatctgccagtcaccgaggccggaggtgtcgtcgcggcgggagccgaaccagccgtcgtccaccacgaatcgttccacgccggagtcggcggccttgtcggcgagcgccttcagcgtatcgaagttgtggtcgaagtacacggcttcccatgtgttgaggatcaccggacggccgtgcgagaacaggcgcgggtgcagggagcgcacgtaggagtggaagcgggcggcgatctcgttgagaccatcgccataggagccgaacagccacggggtgtcgtaggagttctggccttcgccagggccagcgagcgtcacttcgccgccgaacaggagttcgccgccgccgatcacgccggttgtgtagggcagacgttcggcggacagcacggagttgccgctccagcccacgtgcaccgaataggcgtcgccatgctcgaagccgaaaccgggcacgccggcggtcaggagcagggatgcgtcgaagtcagggcggccggcgagctgcggcttttcgaaacggccgacggtcagcggctggcgctgcggactgcgttcacgtagatggtgaccggtggtggtgaggatttcgccggcggattcgggcagcgggaagccgagctcgatcttgccgatctcgagcggggctccggcgtctgcaccgaacaggttggttacggtggccttctgacggaccaggccgccggggagcagttcgaggtgccactcgacttccacgccctgctcctcatcgcgcgcggtgactatgacgccgggcacgcggaccggaccggtggcacgggcatggccggccacatcggtgtagctttcgccggacacggcatcgagggtggcttccagcacgccgccggcctcgatattggtcacagtgaacttggggaagagctcgacgccggcgcggcgcagcaccacgcgctgctcgccgatccagctttcggcctgggtgggcaggatagacggccaggcggtgtcgtcgagcgcgccggacacgcgctgcggcttcagggcgtcataggcggccagcagggtgtcgggcttggccagcgggcggccccagtggacgatgtgcggcaggtcgctgccggcaaacaccagaccgatcgccacattggcggcgggctgggtcaggtagacggcggtgagtgcggtgccgtcagcggcggcgccggtgaaagtggaggtgttctcggccatattgtctccttcgacgtgtgtggatttgcattgcactactggcttcgatggtagaagaaatggaatatgttgccttggtgccgcgtgttggttgcgtgaggtaagtaatgcgtccgtgtctatcgccgctgggcgaagaaatcagtcaggatggactgacactcgccttccagcacgccgccgtgcacttcaggactatggccgatatgcggatcgcgcggaatatcccaaatcgaaccgcatgcaccgagcttgggatcccaggcaccgaacgcgatggtgccgatatgggtctggatgcaggcacccgcgcacatcgggcacggctcaagtgtgacggccagcgtgcaatcggcgagattccaagcgcccaaggcttgggccgcctgacgcatggcgatgatttcggcgtgggcaagcgggtcgccatcagcctcacgcgtgttgtatccgcgcccgacaatctggccggccgcatccagcaccaccgcaccaaccggtacgtcaccagcggctgcggcctgaccggccagttccagtgcgcagcgcatcgcctcgtcatattccataccaacgagtgtatgcctttttctcatatcgtctcatgatgtgcataatcggccgcaatcttaacgttttcttcatggttcccatatacttttggtggagaaaaaatacgagaaggcggcaacatggcggtatttgagctcatcctatgcatcattgcggcggtggtggtgagctcgtttgccagtcgcttcgtaccgaaggtttccacaccgctggtccagattgtgctgggcgtgctggttacgtatctgccgtttttcccggatgcaaagctcgacccggaactgttcatggtgctgtttatcgcgccgctgctgtatctggaagcgcacgaaatcgataagtcggcgttgctgaaaacgctggatctgagcctatcgctggctatcggactggctatcgtcacgatggcggcggtcggattcactttgcatgccgtctggccgtccatcaccttagcctcagccttagcactcggcgcggcactcggcccgaccgatgcggtggccgtcagctccctaggtaaagaagcctcgctgacgcagcgtcagcgcagcgtgctgaaaggcgaatcactcttcaatgacgcttccggcatcgtcggcttccagttcgctctggccgccgccttcactggcgaattcgccgtggggcaggccgccggcgaattcgtgatctccttctttggcggcaccttatttggcctggtgatagcagcagcggccaactggctattcgagaccgtgcgatccctcggttgggaaaccaccaccacacgtattctgatggaactgttcctgcccttcctgctgtatttgggcgcggaggaattcaatgtgtccggcattctgtcggtggtggccgctggcctgttcatccgattcgaccgtaccggcgtggggccgaatgtggcacgtacgaatatcgtttccacttcagtatggggtgtgctgagtttctcgctcaacggtgcggtgttcattcttctgggcatgcagctgccgcgcgccatgagggccagctggtctgacccgtatatcagcaataccgtgctgatcggcattattctgctggtcactctggtggtaatcgcgcttcgattcttctggattgcggccatgctgcgcgttgcgcgagatacaatcaccggccagcgccgcaaaatgacacccgaacgctggcgctcggccgcagtgatgacctttggcggccccaagggaaccatcacgctgtcattgatgtttaccatcccgtattacattgccggcggtgcgccgttcccgatgcgtgacgagctgattttcattgcgtcaggcgtgattatcgtgaccttgctgctggccaacttcctgttaccgctattggccccgaaccgtggcaaggatcccagcgcggaaatgattccggtgaccatcgatgtgttacgcgccacggtggaggaattgaccggacgcatcacgccagagaatcgccgtgcgattctgatggtaatcgaccaatacaccaagcgcatcggacgattgcagcagcgcatcggcgataccgatcctcagggattcgagcaattgcagatcgaagcgctgcattgggaaaaggaattcgtgcgcgaccgacttgccgacaccaaggcgcatccggcggcggatacggccacgcaagagctgaacgtcgaagcctgcgagcgcatgcttgaccagattatgaatacgctgcgtcacacttccactgatccgacttcggggcatgcggtatcgcagattcgcggtcgcttacgcatgttccagcggcagatgagcaattacgccaaacgcacggtgtccaagattcgccataccacaccattggtgagcgaggatcagattttcgcgcgcacccgcgaactgcaggtcgaggcgattcatcatgttatcggccggcttattgacgagatgggccaggatacgtacaacaccgagcattgttcggcgctgttgctggattatcgtcgcgctgaggcttcattgcaggcacgtccgaatatgagcggcactacggaaaccatcacgcaggtcgaggacgtaaagcgcgagagctacggtatcgaactcggtgtgattcaggacatgtacgaagccggcgacatcaaccgagcccaagcccgctccctgaggcgcaacatctacgttatgcaggtcgatgccgattccggcatctagtttccttggctcccttctctgaggggagccaagttggggattgctatttccgcatgattctcttcagtatgtgcagtagtgcttgcagtgctcacttcgctcatgggagaacagtctatgaccgcgccggccacaagcgccctcgatgtccgattgctgtgacggccgcgccaattccagtgatggcggctgactacagcacgccagaggtaatgtcgttgtcaagcagccactggcgcaaatcggcgaactcctcaagactcacattgtgatccagaccgtggtagctcttggttttcagccacgtatgctcttccaaccaagcggcggtggcgaacagttcgtatttcgggattacgccatcgttcttgccgtacgtatagaacacggggatatcgtaatcggccaggcgagagtcggcgggggccgtgccgggcacctgaccgggtgtgttgaagccggacagggagacgacggcccggtaccgctcggggttgatgcgcaacaaatgcacggcgaccagtccaccttgcgaaaacccaagcggcaccacgtcacggtcggcgggaatgttgccggccacccatcggtcgactgctgtggcggcggcatacgcgtcgtagtcacgatcatcgccgataggcagggcatcgtggaaccacgcgtagttgccggggtcgggactgccttcacgggccggcgcgagtgtcagcggcccgcgcaatgccacgaagtcgttatatggagcgatgaggcgcatgatgtccgccatgtcttcttcgctggatccccatccatgcaggcacaggaacagcggatgcgtggcatgctggtcgaagccgccgcgcgaggtgacgctgtgttccacggtgagtggctcgccaaaacgtccaggcacagtggtggattcgcggccgatcagaggctggctggcattcgcttctttgctcataccaatccaatatagaggtcttgcgcgctgtgcggaaaacgatggaccatgatttcagtcacattgggtaatccgcgccgaatcgccttgggactttccaggggataccggcaatctgtcaggcattaccgctgtttgcggctgcggtgtctgcggctgcggtgattgtctcaagttcgccgccccactgctgctgcagtgcggtcatcttgctgccctcgccgaacaccatccagcgtttgccgttcagcaatcgccaatcacctttcgtttgctcattatcagcgtattggctcagcagttcggaaatcttgctttcgataggtgcccggctgatggctgcggacgattccgattcaaaggacacgaaggccactctcggatcagtgcacatctgtacggtggtgatgcctggcaaaccgcccgcatcaagcccctgccatccttctttgcacgcgccggcagcttgttctatgccttgctccatctgtgcggtatcttcgacgggtgccttgtcgttcgactgctgaatcagtccttccgggaacaatacgcccatggccacgccgataaccaagcaaactatggcgcacaccagtgcgatgatgccgcccgcgcccactcccccgtgagtggcgtaccgaggcatggtgactcgcgcagcgatgaccagaatcagggtgatgctgataagcaccgccgccgtcaacgcaatgtatcgtcctggcactgccgtcataaaggaaatggcgtaaggcgcgatttcatgaaccgccgaggtggccgataccacgacggctagcagtccgctgacaacggcaagtctgcggcacaatatcgacgttgggctgctggcttttgtagcggcgaatcgccggccggcattccgcctggatgggcgtcgattctgtgcacgacgtgagctgcgcgaatcgtcatactgaccatcgccgaagaaatcgtagtcctcatcgttgcgggccatcggtgcccccttcctgccgattacacagccagtgtaccgctatggcttgggaatggcggtcattcgggggaatgattcagggcaaaaaagaaccccggcggttgcccgccggggagagaaaggagagagaagaagaaagggggttcaattgtcgggaactgctgcggctcctgatcagctttccgctgacatcatttatataaccactgctttctgggtctacctctaagtttctctgagaaaaacctgagaatacttgcgattgatggaccgcggaagcgtgaggagcctctcacgtttccgcccaaggcgctagacttgaaggcagtatttatttgcccaaggagtttttcacatgctgctgtccgatcgcgatattctcgccgcacagtccgcaggtcatatctcacttgatccgtggacccccgaaatggtgcagcccgcttccatcgacgtgcgattggatcggtacttccgtttgttcaataaccacgcctacacctatgtcgatccggcggaaaaccagggcgcgctcaccgaacagttcgaggtggatcccgacgaaccgtggattttgcaccccggcgagttcgcactgggttccacgtgggaatacgtcaagttggacccgtccattgccgcccgtctggaaggcaagagctcactgggtcgattgggtattctgacccattcgactgcgggcttcattgaccccggtttcgaggggcatattacgcttgagttgtctaatgtgtcgacgctgccggtcaaactatggcctggcatgaagatcggccagatgtgtttcttccagctgagctcgcccgctgagcacccttatggctccaagggcaccggctcgcattatcagggccagcggggtccgacgccgagccgttcctacgagaatttctaccgcgcgcacatcgacgactgagcgttgcgacgtaccattcggccggcggatgccggccatttgcttaatcccaaggagatgtcatgaccaacagcgatggtgggttccagttcgacttccagcagcacgaaaagccggtcaggccaacggttcctccgattcccgggcaagagacggcagcatatggcgcgcagccagcgacacaagccacaccggctctgcagttcccgcaatctgtgcaggcagcacagccgacgcagtttgcacagcccacacagcccatcgatccggccatgacgcaaccgttctcgccgcaattcccggctgcggttgccgcacaagcaccacagccggcggcagccacgcagccagtagtatccgaaacaccaatcgccgctgcgcccggccagcagcaatacgtttgggatcaggcgacgcaaagcttccgcccggtggaaccgacagcgccggtgacgccagccgcaccagcggcaccggcgacatcgcctgtttcggcagcttcaaacgccgcgacacaggcgttccaacccaatcaggccgagcagcctgcggtagatgccgaggcaacacaagcattccggcctgatcaggtcatggcaacacagcttttcgaagctcaggccatgccgaatgccgaaaccgcggccacacaggcattccagcctaattcagctgcggccacacaggcatacggcgcatcatccaccgtatccggtgagaccgttgccatgccggcaacgcaagtagcgtctgccgatgatgctgcagccacacaggtgttccaaccggccgccctggctgcttcggcacaggctcagcctgctgtgatgcctccctccattccgttgaatcaggtctccgatgaggacgattccgatggcgccgagcctcatcacggcggtagcggcaaaaagaacacccgcaaaatcgtcggcattgccgtagcagtagtcgccgtgatagcgctggttgtcgccggcctgctctggtggcattccaacagcagcaaggcgagccaagccgtggcattggccgagtgcaaggtagcggccaagcagtacacgaatgctcagaagaagctcaccaccgccatatccaatggccaaaccagcgcgcaaacatccaccagcgatgtggccgatgccaatacgctcaccacgctgaatcaggcgttgcaagacgccgacaatccgaccgacaccgccaagtgcgattccagcctcaacgccactgagctgaagtctcacactaaagagctgcagaatgatgccagcgacatggctgacaagacggatgccatcaacaatgcgatcaaggccgttaatacttcaaaggcgacggccgataccgacacactgaaatcgaacctgagctcggctatttcgcaggcgcagggcacactggataattccgcgggcagtgtggccgatgaaaacacccgcaccgcgctgcaaaacgccatcaccgaggccaatacggtgatgaacgggaccagtccgtccgaatccgacgtcaacaatgcgatttctagactgcagaaggccgagtccgacgtcactgcctcgatgcaggccaagcagcaggcagatgccgccaagcaagctcaggaagaggctcagcggaaggccgaccaagaggcacagcagaaggccaagcagcaggcacagcagaagtctcaagacgggtccacctctactgacggccccgacggcagccacaactgaggtctgcagcgttctcccatttcccatggggcggtaacttccccatggggcggttagcgcattttcctttttcgcggaataatgccgttttcagcgaccgccccatgaggaaattaccgccccatgggataattaccgccccatgaggagccgtttggatatagcagtgggccgggccctgaataccagagcccggcccactgctatatgcccacaatcagggctattgcgatggcttaacgcttggctatcgcgcgtagcacaatcttgcgtagctcggaggcaatcagcacgattgcggccaggcagatgcattccacccaagccatcgggctcaatgccacggtgccgaacggaccgttaaggaacggcacgtaaatcaccacgagctgcagcgccacggacaaaccaatcgcaccccatagccacttgttggagaacagacccacgaatgcggactgcagatgcgaacgggaggccagcgcgttgaacagctgggcaaacaccaggatcgtgaagcccatagtacgggcctcggtcatctgcgcttcatggccgatggcatccaccgagcggtcggtgaacaagccgccggataggtgcatgtccataccaatcagcgtgacgatggccataatgacgccgacgaagatgatgtcgccccacatggaggcgtcaatcacgcggtccgtcaccttacgcggtttacgacccatcacatcgtcggtctgcgggtccacgcccatagccaacgccggcgcggcatcggtcagcaggttgatccacagcaactgtgtggcgagcagcggcacggtgacgcccacggtttccggctggcggatgccgaggaagccagcaaacaccacaccgaggaacacggtgaacacctcacccacattggaactcagcaggtagcgcaggaacttgcggatgttgtcgaagatcacgcgaccctcgcgtacggcggccacaatggtggagaagttgtcgtccgccagaatcatcttggcgctctgcttggtcacttcggtgccggtgatgcccatggccacgccgatgtccgcggacttgactgccggggcgtcgttcacaccgtcgccggtcatggccacgatgttgccttgacgctgcaaggattcgacgatcttgagcttgtgctcgggggccacgcgcgcgtacacggacacttcggacgtggccttgtcgagtgcggcctcatcgggcagctggtcgagctggtcgccggtcagggccttgccgtccttggcgatgatgccaaggtcggaggcgatgcgggcggcggtcagcgggtggtcgccggtgatcatcaccgtgcggatgccggcacgatgggcctcggtcacggagtcgcgcacctcggtacgcggcggatcgatgatgccgaccatgccattccagatgagatcgatttcgatggcttcggcctgatcggcgatgtcggacacctggcctgcggcgttgacgcttacaccgggcacatcagccaaagaactggtttccagcggacggcaggcctcgccaagcgtacggtaggcctcggaggaaagacgttcgacggtggcgagaatcgactggcgatcgccttcggtgagcttacggacctgaccacccacgcggatgcgcgtgcagtagctcaacagcacgtcgggcgcgcccttggcgaacacggtgagcttgtctgaatcggcgctgtccttggcgatgatggacatgcgcttgcgttcggaggtgaacggaatctcgccaacgcgcgtgtagcgcttgatcttgcgatcggccttgaccttgcgtgcggccacgatcagcgagacttcggtggggtcgcccacgatctcccagcggccgttctcctcgcgtagttcgccgtcgttcgcgagcgtgccggccacaagcgtggcgacgacttcatcggccacaatctgggcctgctcggattcaggactgacgccaccggtcataaccatgcggccttccggcgcgtaaccggtgccggtgatctgcactgcgccggacggggtgaccacgcgctccacggtcatctcgttgcgggtcagcgtaccggtcttatccgagcagatcacggaagcggagcccaaggtctccaccgaatgcagtttcttgacgatggcgttgtgcgcggccatacgctgcacaccaagcgccagcaccacggtcaggatggcggccaagccttccggcacggcggccacagccagcgagacggccaacagcaaggaatcaatcacgtcatggacgtcgtcgaagccttccagcacggcgagcgccaccagcaccacgacagcgatgacgcacaccgcaatgccgaggatcttggagacgtaatccatctccttttgcagcggggttttctcatcttcggtggcggagagcatgtcggcgatcttgccgacctgcgtgttcataccggtgccggtcacgattgcgcggccggtgccttgcgtcacggaagtgccgttgaagatcatgttggcacggtcgcccagcgccttggcttcggtgagtgtgtccggcttcttaccgaccggcacggattcgccggtcagggaggcctcggcgatgcgcaggctggccgcattgaccagtcggccatcggcggagactgagtcgccttccgcaaggacgatgatgtcgccggggaccacgtcggcggtgttgatgcgcatgactttgccgccgcgcagcaccgaggtctgcggggccgtcatttgggcgagcgcctcgaccgcggcctccgccttggcctcctgcatatagccgagcacggcattgacgatcagaatcaaaatgatcacgatggcgtcgaacggcagcacttcaccgccttccgcaccgggctgcgcattggccttttcgatgaaccatgcgatcaccgagatgatggtggccgcgatcagcaggtagaccagcgggtcctggaactgggccaggaatttcttccatttcggtacgggcggggcggtggcgagctcattcgggccgaatttggccagtcgacgcttggcttcttcctcgctcaggccctgggatgggtcgacattcagggctttggccacgtcgtcggcactggtcagacttggatcagcttcccccaatagcgcttcctgcgcgcgcacttcttccgattccacgacctcgttcgttgcggtcgcggacactgcggattgatctttgagatcatccataatgttctccttggtattgccgcggagtagtcagccttgcggccgctgccgggttttctctcccggctggacgcacaggactgcgcggttatggacaccggcgcaactgctgccgatgcatacgattgctattattccataactgcgtggcgcacttggcgcacagcgtaatagcgttttgcctagaacaggcgacgcaaccaggcttcagccaaatcaggccaacactgcacgcattcgacgatgtgcgcatagaagccgttgccagcggtttccgcattggccagggacaggccgtggctgccttcggggaacaggtgtgcttcgatgctcacgccggcggcccggcaggcctggatgagcattagcgtattctccacgggctcggcttcgcggtcggaggtcatggcgtagccgccaccaggcaaaatcaggatggccgggcgtatgcggtccggttccatctcctcgctgttgtcggccacatagccaaagaatcgcgcctcgttatataacttaagaatcgtgagaatcaaagcaattcataacctaggaatagtgagttttacggcattatataacttaggaatcgtgatataatagctcataaatccttgaaaatactaggaatatgagcttaacatgtataagagaaaagtatacgaccatctacggcgatggaaagcagtgagcaagggtactactgcgttaatgattgaaggagcccgccgcgtcggcaaaagcaccgtcgccgaggaattcgcgaagaacgaataccgctcatacatccttatcgactggcagaaggctccgcaggcggtacgagactcgttccgcaacaatctggatcatttggacacgctgttcatggacctttccgtctattacggcgtacgcctgcatgagcgtgacaccctctttattttcgacgaagtacagctcttcccctttgcccgcagcgcggttaaacaactcgttgcggatggtcgatatgacttcatggagactggctccctgatctccattaagaagaatgtcgaaaacatcttgattccctccgaggaagaatcggtgagcatgtttcccatggattttgaggaatttctatgggccagaggagaagaactactcgccgatgcgatacggcaatcttttgcggacaggcgagcaatgtctccgctgctggacaacaaggcggaacgcctgttccgtgaatacatgctggtgggaggtatgccgcaggccgtagagcgttatctgggaacatccgatatgggcaatgtcgatcgagtgaaacgccaaattttgcacctgtacgctcaggacataaagaaatacggcggagattcgaaagaacgggtcaaacgtatcttcgatgaaattccagggcaactttccaagcatgaaaagaagttcacactgtcgtctttaggcgaaaacgcacgcgaacgtgaatatggcgatgctttcttctggttggatgaatcgttcctgatcaaccgctgcatgaatgccacggatccgcatgtgggcctgcgcctacaccaagaggactccacgatgaaatgctatatgggagacaccggcttgttagtaacgcaagtgtttgccgaccgcgcatacacgtcgaatgagttgtaccgcgatatcctgttcggcaagctggaagtgaatgaaggcatgctggtggagaatgtcgttgcgcagcagctccgggcctcaggccatcgcctattcttctattcccgatattcccgtcaggcgaaggaccgcatggaaattgattttctccttatcggggagtattcaaatgccgccatgaaggccagggtctgccccgtggaggtcaaatcgacaaagagatacaaaacctcatcgctcgataagttcaagaataaattcgacagccgggtcggcatgcaatatgtgctgcatcctagaccaatgcgcgttgaaggagaccgcctatatctgccgttgtatatggcgcattgcttgtgatgattctagaacgtatcgcagagaatgattctcaataagaaaagcgtgaggattacgatgcctcaatcgcacatgcagagcgtcatatcagtgagatcccgccgttgcggaccatgtttgattgtgcggaaaagttcggatgcctcacacttttcttgacgggaattatttactgtgaggcattgcgcaggttggcggccatggcgcggtcgcgcaagcctttggtgagcttgagaccgagggttacggcgatcaggactatcgtgcaggcgatccacagcgttcgaccgccgaagttgctgatggtccagccaccaatcagcggcgccagcgcaatcgataccgaccacactacgttgtagacgccctggtacgtgccgcgtgccgacgcgggtgccatggcggcaaccgtagtggtggcgatagggaatgtgcccagctcacccagcgtccacagcactacggcaagcgcgaatccgccccaggaatgggccgcggcctgcaccgcatagccgatgacggttacggcgaggcccatcaccagcacgcgtgaattgcccatgcgcgagaacagtttcatcgcgggaatctgcagcaggcacaacataccgccattgatggtgagcagcaccgaatactcgcccagccctagaccaaggtccgtcatggcaatgggcaggccggaggtgctttggaagtacacaaggaagtagccgaacatcagcagggagaagccgaggaatggcgtatcagtgagcacgcgccgccaattacgagacatggagcccttggcactggcagccggtgcggcatccgagtgattcggcccctcgacgccggcgaattccgcatgcgtaacactgcgttcgtcttcatggcgcaccgcacttggcaccgatacagtaatccccaaatgccgcacctcgcggaagaacgcaatcagcaatatcgtgacggctatcatcaccgccgcttcaacgtagaacatcagcgaatacgagatcttgaccagctggttggccacaatcggcccaatcgcgtacccaaaattaatcgcccacgattgcagtacgtacgcacgttgctgacgttcggcgggcaccacatccgcgatatacgcggcgatgaccgggctgggcagtgaggcgaacgcaccatagacaaacagggccgcgcctaaagccacggggtcagtgagcacggaaacgaccagcagggcagccgctgcgccgatttcgccgatgataatcatggattggcggccgaatctgtcggacaaggtaccgccgaacaggcagccgatgattgcgccgaagccgtacatggccacgactgtgcccaccacaccctcatcgaggcgcagcgcggaaaccaaatatatcgacaagaatgaggtcacgaagcgacccatccacagaatcagaatcgccaaccataatccccaatacagcagggacagtccgaatatcatgcgctgcttcttcactctcaataccttaccggctaccgacggcggaatagccgcgttttggcgcggggtgctgggacaatagcacctatggctatcaaaaaaggaccgaccaaggggtcgggtggcaagcatcgcaacaaactgaagggttacggccccactcccaaagccgaggaccgcgtctatcacaaggcgtataaggccaagaaagcggccgaacgtcggcagatggccgacccgcgtctggcagcccgccgtcgagtggacaagttcgcttcggcggatacttcggatctggtgtacggccgtaattccgtgctggaagcactgcgcgtaggcgtaccttcttccacgctgtacatcatgtctcgtattgaacatgacgatcgtactcgcgaaatcgtgaaaatcgctggtatgaacggcctgcacatgctggaggccgatcgtctggagatggatcgtatcgcccgctccggcaatcatcagggcgtgattctgaaggtcgatccgttccagtactcctcgctgaacgagctggccgatcgtgctgagaagaaggccaaggcaatggaggccgcgaattcggcggccgcccgtattgctgcgcgaccgctgttcattgcattggacggcgtgaccgatccgcagaacctgggtgccgtgattcgttcggcggccgcattcggtgccaatggtgtgattctgccggaacgccgttccgcttcagtgaacgccgccgcttggaaggtgtctgccggtgcggccgcgcatatgccggtggcgcgcgtggtgaacctgactaaggcacttgagggcttgaaggagcgtggatactacgttgtcggccttgacggtggcggcgataagctcgtcggcgagactggctttgaatccgatccgctcgttgtagtgctcggttcggaaggcagcggtttgggccgactggtgcgcgaaacctgcgacgcgattgccggcatcccgatcagctcgtctgttgagtcgctgaacgcttcagtggcggcgggtatcagcctgtacgcggtgtccaacgcacggcgcaaggctgcggcggagtgattgtcgcttgaggccgtaataggttgtacacacaaagaagcccctctatttgaggggcttctttgtgtgatgggctcacctacagacagtccaccggattgtccgcttaatgactccacactgccgcatccggatcgtcatcggggttgtagccgtcgtcgtccgggtcgctgtaggtggattcgtcgtcaatgacgccggaatcggcctcttcgttaagttcggcgagtgccttggaatcaaggttgtagctcggcagaacgttgtcgatgtagctggtcacggcctcgcccatcggcacgtcgtggccggccttctccgccaggaaccagcgatggtcaagcacctcatggaagaactgagcaggctcgatctgggagcgatattcgcgcggaatcatacgcacggtcggctcgaacacctcgcgcatccaatcggtggccacgatttccagatcctcgccctcacgccacgtggaggcacggtaggcgtcaaggtcgttgagcagacgacgggcctggttctcctgcacgtcaaggccggtgaggcgcagcagcttgcggttggcgtagccggcgtccaccacgcgcgggcggaccagcacacgcttgccgtcctcggcggtcttcatttccagctcgtccacgtcgaagcccagctcgttgagcttgttgacgcgctgctcaatcttccacatttcgtccgggttgaacttgtcggtgtcggtcagagcgctccacagcgagtggtagcggtcgaccaggcggttgcccacctcgatctcatccacgtcgccgggcagtagcttgccggacgccaaatccataagttcgccgatgatgttggtgcgggccaagtcgatatcgtattcgcgctggccgtcggtgagctggacttgcaggtcaccggtctcggcgtccaccaggaaggcggagaaagcgtcggcgtcgcgcaggaacaggacgttcgacagggacacatcgccccagtagaagccggccaggtgcaggcgcaccagcagcacggcgagggcgtcgatcagtcgttcggcggtgtccgggcgcaggttgcgggcgaacagcgcacggtacggcagtgagaacttcaagtgccgggtgaccagaatcgcctccagcggctccccttcacgggtgtgacggccggtgaccacggcgatcggggtcacagttggcagttcgagcttctgcagtcgacgcaggatctcgtactctcgctcggccacctggcgcgtgatctccttcatggcgtacacctcgtcgcccacgtgcacgaatcgcacgacgtggcgggagatgcctcgcggcaggttggccagcaagtcctcaggccaggtggccaagggcttgtgccagggcagcgtgaacatctttgggttcgagctggcggcggtgattttcagtgcttgcggttccgctgaatcggcgtgttcgtcttcggctttgacagacgtggccttcagcgcacgcggatccatctggggcaattcgttcaactccatgtgttcgattttacgtggtgcttgggaagtgcgctccttggccacgacttcggcgcgttatgtttacgggaaaacaccgtttggtctctccctcagaccgtctagaaggcaaaaagaaaagccccgcagctatgcagggcttttccaacgaggtcataagagaggaagagaataacctcgtttaatggttgacgaagcgattagacctcgccaagtatctattagttcagacgcagctcagtcgacggagcgaacaggtgcatcttggccgggtcgatcttgatcttgacggtcgcgccaaccttcggcagcgcacgcggattcacacgaatcgtggtgagcttgttctggtcggacatgacctgggaagcctcagcggcggagccatcggtgacgatgttgccgtagatgtagccatcggagcccagatcctcgacgttcacaaccttcagggagaaggcgttcgggtcgtcagccggggccaggccagcgtcctcaggacggaagccgaccacgatctggccgttgtcttcggcggtgagcttgttgacggcctcagccggcaggtccacggtgtcctcaccgatcttcgccttgccgttgaccaccgggtgggtgttcaggttcatcgacggggagccgatgaagccggcgacgaagacgttggccggacgatcatacagctcggtcggagcaccgacctgctgcaggataccgagcttgatgacggcgatgcgatcgcccatcgtcagggcctcggtctgatcgtgggtcacgtacagggtggtgacacccagctggcgctgcagggcagcgatctgggtacgggtctggacacggagcttggcgtcgaggttggacagcggctcagccatgaggaagaccttcggctcacggacgattgcacgacccatggccacacgctgacgctgaccaccggacagagccttcggcttacggtcgaggtactcggtcaggtcgaggatctcagcggccttctcgacgcgcttgcggatctcttccttcggagtgccggcgatcttcagagcgaagcccatattgtcggccacggtcatgtgcgggtacagggcgtagttctggaacaccattgcgatgtcgcggtccttcggctgcatcgtggtgacatccttgccaccaatgaggatgcggcccttgttgacctcctccaggccggcgagcatacgaagggtcgtagacttaccacagccagaagggccaacgaggacgaggaactcgccatccttgatatcaagattcagatcatccacggagggcttatcgttgcccgggtagatacgagtgacgtggtcgaaaacgacttctgccataattactaatcctttcagaggcaggtacgtgcctcacgatccgttgtaaagggatttgttctttactgcgcttccgccctcgccaccgacgtacaactttgctttcggaaactgcaagcttcagcgtttacttttttccggttcagtgaaggttctcttcgttgagccgagaactactatacacggaccgtggaccaaggcaagtggcgtgtctgaaaatgtagttaactttatgggcgtttctgggggtgttgtgtggttcggcccatgacacgcctgtttctcgaacgtgcgaaccggcacgcccggcgtagagcaggcctgctcttcccgaactgacggattccatcagtcgccgactaatgcgacacagactcgaaggtgacgccgttgcgggcggctttgcgctcggccttgcgctcctcggcgttttcgatgcgctggatgcgcagctggcgccagtcctcgcgcatgtcgcggaaacggtcggccagcgttacgtcatcgttctcggcatcatcatcagtactgctgccatcggccttaccgaacgtgccatcggccaccttggtgatgcccagcttgagcagtccgagcaactcacgcaacgtttccggtactggctcatcgccctcatcggcggacttggtcaggccctcgatgcggcgacgaagcgcatcggcgtcctcgggatcgatcttgagcccggcgatcaacgactggcgcatggtctcgtaatcgaggttggcaaagaaattcagctgttgcagcgtcatgaagcccttgagctcggggaatcggtggacgatgtattcctcgcggtcgtcggcggcgcgggtccagtcgcgggtgagctgcggatcccagctggcggtaatcgacccctcgcgcatgcggtagtggtacagcgccttgggcagacggaccacgcgcgtggcctcgccgatcacgttgcagatacgggagagatcctcgattttgcgacccaccgggaaggagaatccggtgccctgataggtggaggcgggtgccaggaaggcccagaaatagccgtcaatctcagccttgacttgctttttgatggcctcgaccggggtcaggacctgcacctcggtgaagtcgttgtggcgatagttggacagcagcggcttgttgttctcggagatggtgtcgaactggaacatcaccagatcggcatcgtattcacgcatggcattcaggcagtcttccaccagcgtgggggccacggtgtcgtcggaatcggcgaagtacaggtaggcgccggtcgcctgggcgatgccggcattgcgtgcgtcggacagtccgccgttgggcttgtgaatcacccgcacgcgcgggtcgcgggtggcccaagcgtcgcacatggccgggcagtcgtcaggcgagccatcatccaccagcagaatctcgaggttgcgataggtctgcgcaaccacagacttcacgcattcatcaaggaatttctcgaccttatataccgggatgatgatgctgaccaacggctcctgttccatgcctccagcgtagcgccgtcgtgcgaacgcggcggcgctgcgggttcgcggaccgcgaaacccttagaaatcccagtcgtcgtcatcggtttcttcggctttgcccatcacgtaggaggagccggagccggagaagaagtcgtggttttcgtcggcgttcgggctcagggaggccaggatcgcggggttcacatcgcaaatctcagccgggaacaaagccgggtagccgaggttcatcagcgccttgttaccgttgtaccgcaggaacttctcgacgtcatcggtcaggcccacgcggtcgtacagcgactgggtgtactccacctcgttgtcgtacagctcgttgagcaggtcgtacgtgtagtcctgcagatccagacgctcggcatcgctcagctgggcgatgcccttctggtacttgtagccgatgtagtagccgtggacagcctcatcgcggatgatcagacgaatcacgtcggcggtgttcgtcagcttggcgtgcgcggagaagtacatcggcagatagaagccggagtagaagaggaaggactcgagcagagtggaggccaccttgcgcttgtacgggttgtcgccctcgtagtagtcgagcacgatctccgccttcttctgcaggaactcattgttctcgctccagtcgaatgcggcatcgatctgctcggtggagcacagggtggagaagatggacgagtagcttttggcgtgcacggattccatgaaggcgatgttggtgtacacggcctcctcgtgcggggtgagcgcgtccggaatcaggctcacggcaccgaccgtgccctggatggtgtcaagcagggtcaggccggtgaagacgcgcatggtgagcgtgtgctcgtcctcggtcatcttctgccagctggggatgtcgttggagacggggactttttcgggcagccagaagttgccggtcaggcggtcccagacctcaaggtctttctcgtcttcgaggcggttccagttgattgcggagacgcggtcgatgagtttcagcggtttgcgcggaatggagataggtgccatgagtgttccttattactcgttgtcgttgtcgttatcgtcgttggatttgttttcgaactcctccggcgcggtcagccggagcagtgctctatagatggttcgtgacattgttggttccttagatggtggagcccccctcagtccgcttcgcggccagctcccctctctgaggggagctgtcggcgttagccgagtgaggggagtaacaacggctctctggttgttcaatgcgtgcggagaccgccgtctgaggccgaaggcgtacgaaggtacgtcgagtgccgaagaaaggcggtatacgctccctcgaacgatcagagcatgcaggagacgcagccttggacttcagtgccttccagggcttgctggcggatgcggatgtagtagagggttttgatgcccttgcgccaggcgtagatctgggccttattgaggtcgcgggtggtggcggtgtccgggaagaacagcgtcagcgacagtccctgatccacgtgctgggtggcctcggcgtacgtgtcgacgatggccttccagccgatctcgtaggcgtccttgtagtacccgaggttgtcgttggtcatgtaggcggccgggtagtacacgcgcccgatcttgccttccttgcgaatctcgatcttggaggcgatcgggtgaatcgagctcgtggaatggttgatgtacgagatcgagccggtgggcggcacggcctgcaggttctggttgtagatgccgtccttcagaatcgcgtcgcgcagggcctcccagtcggccgcagtcgggatcgcgatgccgtactgttcgaacagcgcacggacccgttcggtgcgcggagtgagcgaacgacgaccatcggtgtacttgtcgaagtagttgccctggccggccggcttggcgtagtcgctcgtagcgaagctggcgaacgtgcggccatgctccacggcgagcgcgtgcgaggcacggtaggcgtggtaggccacggtcatgaagtacatgtcggtgaagtcgaggccctcttcagaaccgtactggatgccttcgcgggccaggaagccgtgcaggttcatctggccgagaccgatggcgtggccctcctcattggcgcggcgaatcgaaggcaccgcgttgatgctggtgtgctcggccaccgaggtgagtgcgcggatcgccgtctccaccgtgtggcccaagccgccatccatcgccttagcgatgttgagcgaacccagattgcaggagatgtcgcggccgacatgcgcatacgtgaggtcctcgttgtatgcgctcggctcctgaacctgcaggatttccgagcacaggttggacatggtcacgcgaccttcgatcgggttcgcgcggttgaccgtgtcctcgaacacgatgtacgggtagccggattcgaactgcagttcggcgatggtggtgaagaacttacgggcgtcgatgtaggtcttcttgatgcggtcgtcggccaccatctcgtcataatgctcggtaacggagatgtcggcgaacggcttgccgtacacgcgctccacgtcgtacgggctgaacagggccatctgggccttctgtttggccagttcgaacgtgatgtccggaatcaccacgccaagagccagcgacttgatgcggatcttctcgtccgcgttctctcgcttggtatccaggaagcgcaggatatcagggtggtgggcgttgaggtacaccgcgcccgcgccctgacgtgcgccgagctggttggcataggagaaggagtcctccagcagcttcatgaccggaatcacgccgctggactggttctcgatgtgcttgatcggggcgccgagctcgcgcaggttgctcagcagcagggccacgccaccgccgcgcttggagagctggagggccgcgttgatgccgcgcgaaatcgactccatgttgtcttcgatgcgcaccaggaagcagctgaccggttcgccacgctgggccttgccgaggttcaggaaggtcggggtggcgggctggaagcggccggcaagcatttcgtcggcgtattcgatggcctgctgctcattgccggcggcgagctccagggccacagcggcgcaacgctgcgggaagtcctcaagatagaggcgaccatcgaacgtcttgagcgcgtaggacgtgtagaacttgaacgcaccaaggaaagtgccgaactcaaagccggcggattccacgtgctcgtagatgcggtcgaggaattcagcggagtactggttgaagaccgcagggttgtagtactggttgctgatcaggtattcgagacgctcggcggtggaggcgaaccgcttgctgttggtggccacgtgccctgtcacgtattcgcgttcggcggccttgtctttgtcgaactggatcttgccgtcggcgtcatagaggttgagcatcgcgttgagcgcgtggtaatcgtgcgccgggtcgtactgttccgctgcggtgtcggcagtattgtcgagcggcaggccggtggcggtgaggtcagtcattggaaatccttggaatatggcagaagtgtgtttactcagacagttgctcccctcggtcaacttcgttgacagctcccctcggagaggggagccaatacctcgagggggtcaagatttactgttcggtgaagaagcggacgaggccgtttcgcacggcggcagtgtcttccggggtgcccatgagttcgtaacggtagaggtagggcaccttgcatttggcggcgatgatgtctccggcggcacagtaggcctcaccgaaattggtgttgcctgaggcgatgacgccgcgaatccactcgcggttggctggatcgttgaggaagcgtttgacctgaatcggcactgctttcttgaccacgccgccgccataggtgggcaccatgatgacgtacggttcgcggacgtttagcgccggatcggcggcccgcaacgggatgcggtagacgttgatgccttcgtcctgcaaacggcatccggccacgaaccgtgcggtgttttcggaggccgacgagaagtagaccaatgcgccgatcgtcttgccttcggccgcgaattcgggctggctcagactcacgcggacaccgtggcggcggcgcggttgtcggcggccacctgctgggcgacttcgcgaatcaggtcggggcggtagccggtccaggagttgtccggcgtgatgaccaccggagcctgctggaaaccggcggcctgcagctgctcaagggtggaggggttctgcgtcaggtccacggtttcaaacggcacacccagcttggtgagctggcgcttggtggcatcgcactgcgggcaatgcggcttggtgaacacggtgacggtcatggcgactccccttgatgtggttctgatgaacagtgaagcgaaggccatattacagcggtgtgatttgaaatcaaggcactatatgtagtggcgcgtgtcacataacaaacctagatatagggtttttcgttgatattccgccattcccatgcaccccccgaaaatcggcgtgcagcgacccgcccaatcacatgtggcattgttcacatttgcgtttgaaccgctcttcgactgatcctcaaccgccctgcaaccgccatcttgagtttcgaggggctgttttgaccctttccggagatctatctccgtttcgaggggctggtactcaagtaagcgcatccccaaaatggcggaatgacggtggggcgaagccgtttatacccgtgttctagcgggccaccagcccctcgaaacgggagtaaacctctacggaaggccaaatcagcccctcgaagcggagaacggatacctcggcaccccgtgtggagccagaagacccggccggatgtccaaacgagcatccggccaggccttaaaagtagttgttcagttatcagaatcgatgcggcgcgatactactccgcgtctttacggctccaacagatcttcgatgcggcagccaagcgtgcgggccaaagcgagcacggtggagacggcagctttgccaaggtctttgcggcgctgctcgtacatttggatggagcgcagggtaacgccggagcggcgggccagcccggattggctgagtccggcgcgcacgcggactgtgtgcagccgggagtcgccctcggtgcgattatgggcggcccgctcgtcgtacacgtcgacgaatcggctttcgtcggcttcgtgcagagtcgggtacagtcgcacgatatcgccgaacggcagcacgtcgagaatgtccgagaaccgcactcccctggtccattggcagtatgcgagcgcccagccggcccagtattcgggtgttgagccggcgcgcagtgcggctggcggcatatcgagaatgcgcgcccaaccggtttgccgcatgatttcggccaccagctcctcgccggacatgccacacacgtatttgggcgtgcctcgcccgaaaagcgcggccgcctcggaggtggcgaagaagtccatgaataggccgaccggcaacccgcaatcgttcagcgcataatcgaaggcgccggccaagttggccatggcgtccggcaagtatgtctcatcataggcggggatcatcgttggtcactttctcgcggatgatgtcgcgcatgaacaggccgtcgagatcggcttctgcacttttgcggcggtaggcttcgcgagctgtgcggtcgcgctcgttacgcaatccgtggtaggtcgaagcgcgggcgatttcgcagccttggaaccgcagtgccgcgaatgcctgaggactggcgagtacgatctgcttgccgagctcgcccaaccgcatcgcctcagcgagttggtcgatggaaatcgcgttattgacaaaagcgcgggcgaacgagaaatacgaatcgtcggcacgacatccgacgatgacgtcagcctgactggcatccggcagaaacacttgtttcagatattcgatgccttgcgcggcgacggcggtggtcggctggaaacgacggttttcgaccagcatggccagccagttcaggatggtgtagggcggctgggacaggtccaggaagaggagcccgtccgtggtcaacgtgtaccgattcgcgaaaccgtcatccattcccgcgcacgcccattccttggccagctcgacgctgcgcgtgcaatagaatccgcggccataatcgttgttcggcttgaccagcccgtattcaggatgcttgatgacatgcgaagagccatgccacagttcgatcgatgcggtctccattggccggctccttctctctccttacatattcttgattatatcactgtggtgatagtcataagggaaatacgagatgaaaaataccgctgtatacgttcgtacacaacgtgaaatgtatacgaacgtatacaacactgatgtccggagtcatgctccgcagtggcgcagcggacgcgccactacaatcggaatatgggactgaagacgtggaagaagtggacggactggccgctgatggtgctgtccgtggtgtttctggtggtgtattcgtgggaaattctctcccgcacgcatatcgcgctgtgtgaaaccgtcatcaacgtgatctgggtggcgttcgtcgtcgattatgtggtctcgctgtggttggccgacgatcgctggcagtggttcaagcacaacctgttcacgctgctgaccatcgcgctgccgatgctccggcccttgcgactgttgcgtttgctgaccgtgctgcacgtgctgaaccgcacctccggcatggcggtgcgcgggcgcatcaccgtatacgcggtcggcgcggtgggaatgctcatgtacgtgggcgcgctggccgtgtattccgtggagcgcggggcgtccggatccacgatcaccgacttcggcacggcgttgtggtgggcgttcgtgaccgtgaccaccgtgggatatggcgacttctcgccggtcaccttccaaggcaagatcattgcggtggtgctgatgttcaccggcatcgcgttgatcggtattgtgacggccacgctggcctcgtggatcgtggatcaggtcaatctggagacggatcggcgcgaggacgctcgggagaaggaagtggccaaggaagccgcgcaagaggctattgcaacatcagccaatcccgaaatcgacctattgcgcgaggaagtgcgtgagctgaccgctacggtagccggtctgcgcaccgaacttgagcgacgttgattggcgaagcgggacaaacaacgattctgccaagaaggtccgcgtcagttgttgtcaccgcggattgcggcagaatcattgtcgccacggctgttttcttcagtcggctcaacccaacttttgataatttttatttttttgatatttttgataatttttattttaggttgattcagcgaggaggcggtccacatgaaggcaaaggaaaacccattcaagccaacggcaggaggggaaccgcccctgctcatcggccgaggcaaagttatccgcgatttcgagaaaggtctcgataacggagtcggtgccccagggcgcattatgctcgtcaccggcgctcgtggaaccggaaaaaccgtgatgctcactgtgttcggagaccgggccaaagcgcgcagatgggatgtcatcgaagaaacggcctctgccggactatgcgaacgccttgttgatgccttacgaaccgggcgaggggcccttgaccacctcactatccgaccatcgttgacttttgctggagcgggcatcggcctcggagaagccgaactatccccgaagcgtatgcccgaaacgttgagaagtgccattgccggacggttggatgcgcttgagaagcgccatgctgggttgcttatcaccattgatgagactcaagcggctgagcgatccgacatgattgccatcgccactgccatacagcatcaaatcagggaacgacgcaatatcgccatcgtgttcgccggtctcccacagatgatttctgatttgttcaatgacgaagtcatcacgttcctacgtcgcgcgaaaacgaacatgctcacagatattcctcttgatgaagtgcgcgatgctttcgccacaacattccgcgcctccggcatgtccatcaccgacgctcaattaagcactgcagccaatgtgacagccggatacccctatatgattcaactggttggctaccatatctgggatgccgcagacatgcgggactcggataccatcatcgacgctgatgttacggcaggtatcgaggaagcacgtattgaccttgataacgccgtgtgcatcccggagttgcaaggcttatccaaaaacgaccgtgagtatctcgaagccatggcagcgtcagatggtccctctcccaccgtgaatgttgcacagcgcatgggcaaaacgcctaactatgccgccacctaccgcaaacgcctccttgacgccttcgttatccgcgaaacagaacgaggcgaagtcgattttgccgtgcccttcctgcgcgaatacttgcgtcggaatcagtaatcggcacaatgcacagtatcgatatattccgttccatataatgacttttcgcattcagatacacaatggacggcctgttgagtagcactcagcaggccgtccattctatttagctattcagttatcggagacacacctcaggccttgaccggagcgccagcgacctgctgggaggccatcacgccgaacaggtagccgtcttcggagaagtattcgaaggtacgaccggcgaagtcgcggcattcgaatctgatatcgttatcgattcgatcagcggctcacgatactgcccttgcatcgctgtgccactgttgaatgtgcccggctggctcacctctgggtcaccgccgacacatccttgatgccgatggttatagagtcgcaaattcacgactggcgcacctgcccacgcacctatcctgtcatttcgagcgcataatttgctaccacatccggtcagggcaatcgaccttaatggcgtaaacggcacttctcaatacgtaaacggcactattcttggctcccctctcagagaggggagccaagaaatatcaagctcggcctcccaggagagagccagaataatgcaccggcaaggcattaggatggagggcatgagcgatttgaacgcgttgaatcttgagcccggcgaagtggttggtgggtatacgctgatctcccggctcggctcaggagctatggggtcggtgtggcgggtgcgcgacgacggcggcaccacctatgccatgaagattctgcgcgactccctgaccgacgagtcagtggcaggctccggctctgcgtccacggccctgcacgaccccaacctcaagcccgatgtcacgccgcgcgagcgcctgcggcgcgaggccatggccttgaagaaggtcaatcatccgggtgtgtgcggcatcgtggatatggaactcgacgatacgttggcgttcatcgtcactgaactcatcgagggcaagaatcttaaggatgatgtggccgccaatggccggtatgtgggcgacgatctggaacgcttggcccgcaagctcatcgaagccaccaaagccgtacatgcggccggcatcgtccatcgcgacatcaaacccaccaatgtgatggtgtcggccgccggaccggtattggtcgatttcggtatcgcgatgggcgagggcgaaagtcacgtgacccgcaccggcctagtgatgggtacacccggattcatcgcacccgagattattgacggtgccgaatccgacgacgccaccgattggtggtcggtggcgtccgtgctcgcttttgccgcaaccggcgcgcctgtgttcggcaccaagccgatgatggcggtacttgagcgcgaggcctcgggcaacgcgaatctttccggactaccggccggcacattggctgccttccgttctgcactggacccggatcgcagggatcgttgcacgccggatcaattgctgaatgccatcgccttggatgcgttgaatcccaacgcttggcagggcgagcaggcgggaccgttcgccgcgggagccgtggctggacaaccggctgcgatcgttgccgaagccgcggaggcgatgcccccttttggcgcggccggcggcgttgaccgcaataatccccgaaccatctggcgcgcggccgaggaagccgctgaggctcccaccatggccgtgttctccggcaataagggcgataacggcgatggcgaaaccgccgtattctcgccggctggcgccgctaccgccacgctgcccttagccgatatgccgccacgtccgccggccggtgcggagcaggccacgcaactgttgcccgacgctgctgccgatttcaccgacgacgccggcacacaggtactcaccggcgcgaccacaccgatgccggaccaaaccacaccaatggccggcgccaccacaccaatgaccaacaccgattcgactccggccccgaccacgccgctggccgagcgcaccaccgtactccccacgccgcagccgtcatcattccccccgtccggcaccgcccagagcagctggaatcccgcaagcaaccagcccacagcggtggaccccgccattcgcccggcattgcagcgcatcatcgaccaaaccgcccaagcggcccccaccgaaaccatggtccaaaatcctcccatgcccaatccggtggacgtgaagcgaggggaatatctgcggcgcggcaccctgccattgatcctgctggcggcgccgctggcggcactggcggcaaatgctccgctcgtggccatcatcgcggccactgcgttgttgtggctactgctcaccctggcctataacaccgaaccccagcttgagcgcgagggcaaacgcggcggcgagcgcaaaaactccgattcgtggattcgcgtggcgacttttccctggcatctggtcaaagccctgctgctggccattccccgcatactgctgctagtcatcatctatatggcgggaaccgccgtggccaccgcggctctggcactgcccgttcacaccatctcctggtatttcaccgcggattggggtattccggtgccgttgctcaatgatgtgccgttctccgcttccgggctggcgctgggcggtttcatggccatcggctggctggtcactgtgttcgctccacagtcgatgatgattcggctggggggcggcgtactgcgcgggctcaaacacagtcgcccggcgggcgcgccatccaccgaagtgggtggggctccacctgctccagtggcgccggcgcccaagggcggcgggcgcggcaccgtgctgttcaccatatgggccatcatcaccgtggccttgtgcgcgatgccgattctgggcatgccgatcaactggatgccgttcgcctagagcggggcggaatctcacacatcagccatccgcacacatggccgttgtgtatccgatacgttcgttccgtcacacttttacagggaattcacctcagatcagctctgggcgcagtcctcctcaggcccggtcattatgatggggcccaaacattgaagcgattgcaaggggatagctatgtcagatccgaagcgtcaggccaagcgtgccacacgcgctgagcgccgagcggccgaggaggccgcccagcaggcacgggccgagcaggcggctaaggaacgtaagcagcagaccatcatcggctgcattgtggtggccattattgtggtgctggtggccatcgctggattcgccgtatacaaggctatgcggccgtccaacaccagcagcagtagccagcaaagcaacatgaccgtggacgaggcctatagcaagctcaagaaagtcagtacccagccggccaacgccgatgacaaggccggcttcgtgatctcgagcaaggggtacggtcagaaggccgaaggggcgcccaccgtttccatctacatggagccgctgtgccccggctgcgcctcggtgaaccgccagcttgacccgacgctcgtcaagctgatgaacgccggccagctcaacatcgatttgcacttcctcaatttccaggacaacaagagctccgacaactactccaaccgcgcgttcaacggtgccatctacattgccgagcatgatgacaatcccgatcacctcatgagctacctctccaacatctacgctgaggatttccagccgggcgaattgtccaattacgagccggtaagcaacgccaagctggagaagcaggccgtcaatgccggcgtgagcgaggatgtggccaccgcggcattcagtggtaagaacgaatacgtcaagtggctcaccgcctccaacaactacacgatcctacgccccgaactgttcaacagctccggcgcgttctcctcccccacgctcaccatcaatggcgaatactgggatctgaagcagctcacgctggcggacaccagcatggtggacggattcctcaagtccatcggcttggactccgatcaggtgggcgtggaaggccagatgccatcgatcggcgccaacaagaagccgatttcgctggccgattaattaccggcgcggctcggcctgaattgaccactcgagaactaccggtatactagagatttgttcaaaacgatttacgcgttaagaacaatcgcctctttagctcagatggccagagcggccgccttgtaagcggcaggtcgtcggttcgatcccgacaagaggctcgacgcgtagaaaagtggcgtattatatgatacgtagatttttctacgcatataattcttaccttgggtaagtactccaggagccttcccccaactatgggcttcctggaatgagggcggagcgtcccccaaccagctccgcgccttcaggggggcgggaacatccccttctctcccgccccctttttcttttctttttttgagctcagaacaatctgacgagcaggaatggtgacggtggccggtgaaaccgcagtacgggccggaacaaccgttacgatgggtggcgtaatcgttcatccagcaggaagagtatggcaatggcacggcgttggaccccgcagcggtttgttacactgcgtcgcatccgcgtaatcgcctgtatcgcggcgaccagtatcgcgctggctggatcattcgcgttcaccgcgcgtaaatccgtagccctgaacatcaacgggcaaaccacccaagtcaccacatatgcgatgacggccacccgtcttctggaggaacaaggggtggatatcaagacccacgatatcgtcactacctcgtccggcgaccaactcgccaatcatgccgtggtcaccgtacagtccgcctaccagaccactatcaacatcgacggcacgtccgttcccttctggaccgtggccaccagtgccgaccagttgctgggatttttcgaggaaaaccagaacaacgccacaaaaatcaccgtcgacatcgacaatgtgtacaaccagctcaccggcggactggtcatcaatcaggatggcccggtcaccgtcattgcggacggcaagacttccgtggcccccaacggcaaactgcctgcggcctccattcttgactccaaaggcatcgtgctgaacaaagaggaccgtgtgagcgtcgaaaaggacggcgataccactatcctgcgcgtacggcgcgtgacgcatggcgaggaaacacgcacagccgtagtgccatactccacacaaaccatcatcgactccaatctgcctgaaggccagtcggagatccgccagcaaggcgtcaatggcgagaaaacccaggtgtataacgtcacgtatgtcgatggcgtggccgaatcggagacgctgaaatccgaaaccgtcaccacgatggccatcgaccagatcatcgccgtaggcgccgccaagtctgataccgataaaggttccgacaaaaaatccgactccgccgataacggcaaggccgattccggttccaacagtcagcacgagtcgtccggtaacaatgccaacagcacaggcgacaagaacaacagcagctctggcaacaacacgaacaccgataccaacaacaatgccggcaacaccggcggcaacaactccggtaacaccggcaacaccggcaacaccggcaacaccggtaacactggtaattccggtaacaccggcggcggtacgaacaacaattccggctcttccggctccgattcaggaacaaccaccacgccctccggccgactctggcacgccaccgtagcccaggctcaggcctatgccgccggtgccgccgcgcagcgcgggtggacaggcaacgactgggattgcctggtcaaactatggaaccgcgagtccagatggctgtggtatgccgaaaacgcgagctccggtgcctacggcattcctcagtcgcgaccagcagacaaaatggctgcgttcggcgccaattaccgtgacgatgccgccgtacagatcgattggggtctgtggtacatcgcacaaacctacggcagcccgtccaaggcatggcaacattccgaacaaatcggttggtactgatcggttacgaagcccacaaggaacacacgcttatgaacgacaccattcccgccaccggtcacctgttaggtgccgccgatatccgtcgtatcgcggccgatgccggcatcagccccaccaagaaattcgggcagaacttcgtcatcgaccccggcacggtccgtcgtatcgtacgagaggcgggagtgaccgctgccgatcatgtcatggaagtcggccccggcctgggatcgttgacattggcgattctggaaaccggcgccaccatgaccgcagtcgaaatcgatccgccgttggccgaacgactgccgggcacagtcgccgaattcatgcccgaagccacgtcacgactcaccgtcgtcaatcgggatgccttaaccgtcaccccggagaacgtgcctgatttcagcgatgacgcatcgtttacgctggtcgccaatctgccgtacaacgtggccacgccgattctgctcacgctgttggagcgtttcgacaacctcggctcgttcttggtgatggtgcaaaaagaggtggccgacagactcgccgccaagcccggttccaagatctacggcacgccgagcgtgaagctcgcctggtatggcaccgccgaacgggtgggcaccatcggccgcaatgtgttctggccggctcccaatgtggattccgcgctcgtcagattcacccggtatcaggccgatgacccggccgccccgggagcctcgaacagcacggccgacggcggcgcacaacgggaactcgtatttcgtctgatcgatgcggcgttcggtcagcgtcgcaagaccctgcacgcggcattgaagaccattgcgccctccgaggcattctccatcgccggcatcgatccgacccgtcgaggagagacgctcaccatcgccgaattcaccgctctggccaaggccatcgaatcgtgtggagatggagatgaggcacaatgagtccggtaatctcacatccacgcccagccgctgcccgacatcagttcgatgagctctcccccatcaccattacggtggattgcccggcgaaaaccaatctcaccttggaagtgggacctgctcacgacgaatggggcggacgccacgaactggacaccacctactgtgcaatcggcgtatacgacaccgtcaccgcaaccgccaagcaacccggagcgggattctctctggagctcgaaggcgcttatttgggcgacttggcctcctcacgcagcgacatgcgccgcaaccatgcggtactggccctcttcgccatggcccaggcggccgagcgcgagccggatgtggcgttgaccatcaccaagcacattcccgtgggtgccggactaggcggcggttcagccgacgccgcggcgaccatgctggcggtcaatcgtctctgggagctgaactggcctatagagcgtctgcgcaccattgccgccacgttgggcgcggatatgccgttctgcctgaccggtggccttgcatacggcaccggtttcggcgaacgcatcacggatatcgcccccggcagccgcgatgagctggcgctgatagaacagggattcagcggcgaagtattggtcggcgcgtaccagtcgcaactcagcactcctgaggtctaccacacctttgacctcgtgggagccgcagaaggcgaccgcaatcatctgcaggctgcggcaatcagcctgcatccccgcagcgggcaggccatcgacgccgccacgcaggcgggtgccagccatgcattcgtctccggatccggcccctcagtggtcgctttcgccgccgacgaggcagcggcacaacgcattatcgatgtgtggcgcgatacggctgtggtcgatcgcattattcgagccaaatctcccgcacaccccaatatcggcgtcagacagtgacgctaaggtagcaaccagccacccgacccatgaaagaagtccaccgatgacgtatcaggttgatgaacgtgaagcccgcaaggcgtacgtgcgccaccgccagaccatcgtcttttccatcagcggcgcggtattggcagtagtgctggtcatagccctactgttcaatttccacgttttcggcctcggcgaagtggagactccggcccgccagccgaattacggcaacgcggcaccgtgcgcggtcaaggacagcagcggcaaagcgcaatacgtgtccaacgcttcggtcggcatccgcgtgatgaacggcacctctcacggccaattcgccaaggccgtgggtgaggctttggccaatcgtggattcagcgtgcagaaaatcgataactattccagcaccggcgttgaacgcaccaccatctacttcggcaagaacgccattaatcaggcgtatacgctgatcggcaatttcaccgacgccaccatgatcatgacggctcgcgaggatcaactcatcgatgtggtcatcggcgccacgttcaacgatctgcaggacaccaaatcctccccacaatccggtaagaccatcaccaatatcgagggttgcaaggccgccgatagcatgaccaagctgcccgccgacaccaaacacgacgcatacacggcggagtaaggcgcatacagcttcatcttcgcgaaaaaccgtacgctgacacgtattcagcgtacggttttttggtatcggactagtatcggactactgaatctcggcgtaccagcgcttgagttcttcgacggccacatcgtggtccaccggaccgttatccaagcggtattccagcatgtgcttgtaggcgcggccgatcatcgggccgggctccaggcccagcaactccataatttcgttgccgtccagatccgggcggatcgcgtcgaagtcctctttcttcttgagttcgcggacgcgctcctccatctcatccatggcctgggagaagatcatcgccttgcgcttgttttgtgtggtggcgtccgcgcgcgtgagcctgttcagccgctcgtacaggtgcccggcatccttgacataccggcgtacggccgagtcggtccacggctcgtccacatagccgtggaagcgcaggtgcatattcaccagttccgagacgtcctcgaccagatggtggtcaaaacgcagcgccttcaaacgcttgcgggtcattttggcacccaccgcgtcatggtggtggaagctcactttgccgcccggctcgaaccggcgggtcttcggcttgccgatatcgtgcatcacggcggccaagcgcagcgtcaggtcgggggcgggcaccgggccgtccgggccggtttccagggcgatcgcgcgttcgagcacaatcatcgtgtgctcgaagacgtccttgtggcggtggtgttcgtcgatctgcaattgcagggccggaatctccgggaagacgatgtccgcaagaccggattcgaccaacgcctcaaggccggcgcgcggacggtcggagagcagcagcttggtcagttcgtcgcgcacgcgctcggcggatacgatgtcgatgcggtcgcgcatcgaggtaatcgcctcggccgcgtccggcgcgatacggaagcctagctgggccacgaatcgcacggcgcgcatcatacgcaacggatcgtcgtcaaaggactgtcgcgggtccaccggcgtgcgcaacacgcccttggacagatcactggcaccaccaaacgggtccacgaattgcaggtcgggcacgcgcagggccatcgcgttgacggtgaagtcgcggcgggacaggtcgccctcaagcgtgtcgccataattgacctcgggcttacgcgagtccgtgtcgtacgtgtcggagcgataggtggtgacctccaccttgacctcggtgccgtccgggcggcggcgcatggcacccagcgtgccgaacttgcgccccatgtcccagaagccgtcatgcccccaccggcgcagtatcggctcgaactgctcaggccgtgcggatgagcagaagtccaaatcgtggctctttctatggagcagcaaatccctgaccgggccgccgaccaatgccagctcgtaaccctgttcggcgaacagtcgaccaagttcgatggcttcgggccatacttcgaaattcaatgggcaccttcccgcgtgcgacgtttttctgccctaccagcataccgttaccccacctgcacacggggttgagtaaggtggagaatatgattacgcccgccgaccttgcccgcatactggggcaaacaccagattcggcggatagccatacccaagaccacctgctgtatacgtccgaaactccgcatcattccgccgattcgggcgattctcccgatgccggcggcaccgcgagccactccaccaatcaggccgttcatcaagacgaagtagacgcagtaccgactgcgcaacattccggtgtacccggcacacccgcaacgcccgccacacccgcaccatccgaatccgaaatatcggacgccgccagcgacatgcccacaccgaagccgatgatgcccacaccggccaccgtcttcggcatgcatgccaccgtcaccatcgccactaccagcggcactatcgaggggcaggccgatggtatcgccggcgaggccggtgccgagacgattgccgaggtcgagccgattatcgccacggcacaaacgtccgtaaccatcgtcacgaacgattccgcggcgaccgcccacgcggccgtagatactgccgttgcggtcgccaaggccgccgccgcgcataccgcagcgataccgactccgcgcgacgtgctgatgccgcctgcggcacgtaccgcaccggccgcaacgccggtcaccatgccggtctcagcgccgtctgcagcaccagtgaggcccgcaacgtcagcgcatcccacgccggccacggtcttcggccggcatccgtccgcggatgttgcctcgccggaaccggcagtgccagtagaaccggtgacgccatccagcccgactccggccatgatgccgcaacgccgtacgtcggacggtccgaccacattcgcttcactggatgcccaggaactgccggtcgtacgcgaatattcggcaggcggtctgattttcgatgaccagaatcgcgtggccattatcgcccgtcattcccgctccggccatctcgaatggtgcttgccgaaggggcatatcgaaaaaggtgagaccccgcagcagaccgctgtgcgcgaagtgcatgaagagaccggcatcctgggcgaggtgatcgattccatcgccaccatcgactactggttcaccggcaccacgcagcgcgtgcataagctggtccatcacttcgcgctcaaacagaccggaggcgaactgacggtggaaggagacccggatcatgaggcggaagacgccctctgggtacgttttgaagatttggatgacgtgttgagctatcccaacgaacgcaaaatcgcgtggctctacgccaggaagaagaacaggcaggcaaacgagtgaacctacccggagtcttacgacattgcacacgtctggcacacgcactggcggctggcgtcgccgttgtggcgatgctggccgctccattgaccgtctacgcgaacgatacgacggacacgactgattcatccgatacgacggacgcaacgggcaatcagaccgagaatcagcccaagcagagcattgccatcacgcaaagcacccccatcgtcacctccaaatcgggctatcatgtcaccgcggtcatcagcaatacggacagcacggccacgtcaagcggcacactgcacctgaccaccaatacgctgttcacctttgtctcgcgcaccgatattcagaattgggccgagaacaacgcccccatccccacccccaacgagttgggttccgttgacgtgccatcgattcccgccggcggcactgccaccgtcaccatcgaggtgaacgccaatcagcagacccttgcctccatagggagctgggggccgaagccgctgatgctgtcgtatatcgtcggcaatcggatactcgccgatttgccgagttttctgacccgatcttcggatgggctcaacaccgcgacgacaccggccatgaacctgaccgtggccatgccctacaccgccagcggctggcaggtcgataacaaggccatcagcaatcgcattgccgaaaccaccacttcctcgacatcaacatcgtccaagtccaacggcacggacaaggccgacaagtccgataacgccgacgccggcaacgcggccaaagccactgatacgcaagccatatccttatccgagcaggatgccgataccgcgcgatcccttgggcagacattcgccaagcaccgctcgctgcaagtgatcgcggatcctctgtattggcgtcagtccgcagtgcaaccgtccattgccggcatcatgcagcccgccgactttgacatcaccgcctataccgcgctgggtgataccgcggcctacgaaaaggcaggcatcaccactgagcagtggaacgccaagcaggcggccgcatggtatgccgacggaggcgactccgaaacaccctccgcgtacgcatggcagggcaacaactgttggacgttggatgcgctgaccgcagcacgcgagcagggctatgacacggtgattgccgatgcctctttcgatgccgaccagactgaagccgtacacacaggcacctacgtggtggatacgcctgccggcgatgtcaccgtgctgaaggagcaatcgaccttgggcatgctggccaagggccaagccaccagcacggacgcgcaggccgagtccagcgatgccggtcggttggcccgactggtcgctcagagcgcgttctaccagatggaacagccttatacatcccgatacctgcttatgacgttctcccgcaccacggaggccggctggatcgatcaggtgatgagcgccttcgagcaggcgtcctggttgaatctgacggatctgaagaccatggccaaggccgatccgtacgatgtcagcgattcggtcaatcccgacaaggccgatgatgccaacaccgccaatacccggtcggcattgagacagttggccgacagccggcatgacatcatgcgcatggccacctccatattgaagaacgagattgattccgacgaggtctcgtcgttggccccgcaggccctggcccggcaggatgccaatgacaccgtctcgcacagcaacgatccgacgcaatggattggctctttgctggtgctgcatgacgatatggcgctgcgatccatgtctggctccccccagccgacagccacgcgaaaagccatggtcaacgccgcgaaaacactggccagcgatcttctgaacggcgtacgcatcaacccatcggaatcaatatccgtgttcagcgaatccgcgaaaatgccaatcaccgtcagcaatgaccttccttatgccgtcagcgtgcaggtcaactcgctgactgactccatgcagatcgtcacctcgcgaaccactgacatcgatattcccgcgcatagcgacgctcaggtgaccttcaccatccgcgtttccacttccggctcatcgacggcccatgtgtcgctgagcgaccgggaaggcaacagcttcggcaacacgcaggataccgcgatcaccagtgtgatgcgcgtcagtgatgccagcggtttcattatcatcggcttcgccgtgctactgtgcattatcggcctgtggcggcagttccatcggaagaaggaccccgacgaatgagttcaaccgtaggtcgtaattccctgatcatggccacgggaaccgctgcttcccgtgtgaccggtcagctccgcacgattcttctcgctgcggccatcggcaccactggattggcggccaacgcctatcaggccggttccatgattccccaatccgtgttcacgctggtgtccggcggcatcttcaacgccgtgctggtgccccagatcgtgcgcacgttgaaagaaaaagacgcccaagaacgactgaatcgtctggttacgttggccatcggcatcctattggccatgaccgtggtgatggcggcggccagccctctgcttgcccgcctgtacgtgggtagcgacgatcaccagatgatagccctgaccacctcgttcaccctgtggtgcatgcctcaggtgttcttctacggcctgtatacggtgttgggtcagattctggccgccaaagaccatttcctcacgtatgcgtggagctcaaccggtgccaacattattagttgcgccggttttactggttttattctgctgttcagcaaggccaatgaacagcccctcgaattctggaccgccgacaagatcgcgcttaccgcaggcacctggactttgggcgtggccttccaagcgctgatactgttcctgccgctggcccgtatcgggttcaagtacaaacccagcttcgggcttggcggctttggactcaggtctatgggtcccgtggcgttaggctctttgggcgtggtggtcaccagcgagatctgcggcattatccttacccgtatcgccacatccgcaccgcagcgcgcccacgaactgacgggtgccagcctgttcagcgtggcaggcaacgcgacctatcagaatgcgtacaccctgttcatcctgccctattcgctcatcgccgtatcggtatccacggctatgttccccaaaatctcccgttctgtcgcagctgcgaatctggatgaggcacggcacgatctggtgagcgcgctgaacaacgtagggctgctgatcatattcttcgccgccgccatggtcgtgttccccgaaccgatcatccgcgcattgcttccgtccgtctcgatggacgagaccatgctgatttcctacgcgcttatcgccctatctgtgggcactcctttgggatcggcgttcctgttgatccagcgcacgttctacgcctttgaggacggcctgcaccccttcctgtccgcggtgatgcagtatgggttcacctcggtattcatgatgattggcatgatggtacttcctcctgagcattgggtactcggcatcgcctgctcggtgacactcggcggattactggcgttgccgctgacgttgatgatgttgcgccgcaagttcgaaggcaatcttggtggtcgggagatcacgaggacatatgccaaggccattgtggcggcactggcttccggagttgtggtctggctgatcaaacaaccggtagtcgcactgttcgacgcggatattcgatcggtaggcgggcacatgagctggtggtctgcactggccatctgcgtggtgctcaccatcgtgctggccgtagtatatgtggctgtgttgtgggtgatacgcaccccggaactcatcagcgcctatcactcgatactggcccgtctacacaagactccggccagtgaggacgttgctgtgacagcccagccggaaaaagtcgacgatacgcaaatcaatcctgagacggagcccgtcaaggatagccccacacgtagaatatctaagaccagtctcgaacaccaatcacacggagccgaacgcactatgaaaccgcaactcggagacacgattctcaaccgatacaccttggtatcatcgttgcgtgaggagcctggcattcaggcatggaaagccaacgaccgtgtgttggcaaaggattgccagctgttcatcattaccaatcgcagcgctttcgccgcaatcgatgagctcgctggtcgcatcgccgccactcgccctgatcgtgtgattcccgtactgaaataccgtatggaatccgacgtacttctcattgtcatgccggtggacagcggccaatgcctgactgactacatggtggataccgacaagccgctcagctacagcgccatccggtcgattatcggagaatgcgccaacgtgctgcgcgaggtcattgcggatactcccagcagcatcgtcatcacaaccgacaccgttcgagtgactacctccggtgtgcagattgccgatgcaccatgtgccacgatgctggccgacacgtccgctactgatctgcgtacggacggtcctgaacggtatgcgattcgccagcttgcggcattgctctatgccctgctgacacgcacgccaagccaagcgacacccacattcaatctgcgcgccttgccgcaagacacccctggcgaattccgcgtgatttgcaagcgtggattggccttaagcaagcccgacgagcacacgttgccgatggctgcccttgtagaactcgacgccttgttgggtaattggaagccgctctctgaactgagcgatgctgatatcgctttgccgagcgtggaaagcgattgctcgattaccaaggcgatactgaagcccgccaacgagaccgatatcgtgcctattcccagcacgttgattaacagcagcagtcttccggaattgtctattgccccttccctgccggttcagccggccgccgtccccgctccgcacgcgatgtcaccggctcctctgcctgatgggtccagtactgctgacggcaaccagtctcaatctgacgcccgccgtctgtttgacttcaacctttctgacgcctgggagcacgagaatctttccggtgaagacaccggtgactggtacagcgaaatgaatccggcccccatcggcggtccgggtgataatactcggttgacggtgcctattgttaccggcggtatttccgatgccaccgtgggagagacgaccagtcgtattcccgtgttcgatgtcagcggccgtgctgtggcccccggtgaggaatcgctgcgtgccttggaagaggagcaggcccgcattgccgaagtaagcgccattcctccgagcttcacaccgaaggatgtgccggatgacgaggatgacagcaagctgcccgatgaacatctgttcggcaaactgtcgaccaaggtcgttgccatcattgtggctctgatattggtagtggcagcggctgtttgggcagtgcatgcgttccgatcctccggagacaatcctgccgatgcttccagcaactccagtgaaggtgactggcccgatatcaatgctgacgctgtgccattcggtggcagcaagaacgcgacgaacggtggcgccactgacgattcctcaaagtcgagtgatgccactcagagcgaatccagggactcggcatcagacaagtccaagaagtccgagactgctgattcgtcgtccaagaagaccaaggccaagaagtccggcgataaggattccagcgctgctccgcaaccgcgccatgagaacaacacggcgtttacgatttccagcgccaacttcctgtcgaatcctggcggccaatccgggtacgcatactacatgcaccttgaccagccgcaggatgcgtaccgcatggttatcaccatccgcacatccggtggtaagggctatattcgcgcaaataccactggagaccccactcagggcgagcaggtggccgaattcacctttgctgaaggtggcactactgaggtgaagttcaccaaagccgtcaatacgcaggatctgctgctgtgggtgccatcgggtagcctgccgcagaaccagctgtacatcgagaaggtggaggtcttctaatcggcatctataccgataactgacccaagaagggcggtaccgttcgcatacattcgacggtgccgccctttcttcgcgtctggctgaatgacatggaatatcgtatgggggtgtgacaatgtttcacgtgaaacataacgtcatcattatcggttctggtcccgctggctacacggccgccatctatcttggccgtgcaggtcttaatcctgttatggtcactggtgcgttgtcgccaggtggacagttggtcaacaccactgaggtggagaacttccccggattcccggaaggtattcttggcccggatcttatggatcgcatgaaggaacaggccaagcgcttcggtacaacctatatcacagacgatgtctcttccattgaggcgtgtgagagtgattcggtcaagccgacctatcgtgtaacgctctccgatgactcccagttggaggcatcagcactcatcatcgccacagggtcgtcattccgtaagcttggggtgcccggcgaacaggagctgtccggacatggcgtctcgtactgcgccacctgcgatggcttcttcttcaggaacaagcctatcgtggtcgtaggcggtggcgattcggcttttgaagaggcattattcctgacccggttcggttcttcggtcaccttgattcaccgacgcgatagcttccgtgcctcgcagatcatggtggaccgagccaaagccaatccgaccatcaccctgctgaccaacacagtggtgacctccattaccggcacctcctcccccacacagaacaccggtgcacctattgccattcctggcttgacaatcaaacgaccggctgtggcaccggccagtgtcagcagcattgccgtacgtaacgtggtgaccggagaagaaagcacgctggacaccaacgccgtattcgtggctatcggccatacgccagccactgattttgcagctggtgttgtggaccgtgacaatgatgggtatgtcgtggtgcagggtgccagcacggtgaccagtgcgccaggcatctttgctgcaggcgattgcgtggatcgtacttatcgtcaggcaatcagcgcagcgggcatgggctgccgtgcagcgctggatgcgcaggcctatcttacggactgattgcggcgacctgatgatggcttgctgttctgactgctgcctgtgacataggagcagcgctaggtcagtgttacagcatgccgcccttggatagtacgcaccggtcaaaggcatagaaaggcccctcaggcgacggagaatcacgatgtgtgatttgtcatcctccagcctgaggggttttctattgcgacaggggctacaacgcaggcatacgcccctgccaggaatcacgcagaggctataacgtcttgcgcgtacaacgcactgcacagcaataatgccggcgacagtgacaagccgatacaatgccaagtgacaacgctaagcatcggtgttgtcactgacgatgccggcgacaacacgaatgttcttatcgtgttacacccatttggaatcggcatcgccttggctcggcaccagcagctgcaggatgcgatccatatcctctggtgacgagaagacgatttcgatgcgaccatgcttggtgctgcccttaatcgacaccttggtgtcgaaatgattttccaaactctgctggatggcggaaccaacccaaggattggtcttggacgtcttgggcttcttcggctgctcccccgacgcaatcttcatggcgacgatttcttcggtgctgcgtacagaaagaccttccgcaataatacgagaagccagcttgtccatttcctccggatcgctcaggcccaatagcgcacgcgcatgaccggacgatagcacaccggcagccactctcttttgcacagaggccggcaggttcagcagtcgcaaggtattggcgatttgcgggcgagacttggacaccgacttggacagttgtacttgtgtcaacccgaactcttcaatcatctgctggtaggcagccgcctcttccagcggattcaaggccacacggtgcaggttttctagcaatgcatcgcggagcatatcatcatccgcagtggttttgacgatggcgggaatcgtctccaacccagccaactgggatgcacgccaacgacgttcacccataatgagctcatacgggctgtcccaatgaccggcaaacggatttgtgctggattccgtctcgtcgtgcttggcggctttggccgcagcaatctggcttgccggacgcttgcgcacgactatcggttgcagcacaccaacttccttaatggaagcagacagctcattcaactcatcctcgtcgaagatggtacgaggctgatgtgcattgggcccgatatcagacagtttgagttcagccagataaccaccggctaccggcttgagctcgtccttcttatctgtgtcagcggtctttgccgccgatgcagtctgagatgtttcacgtgaaacatctttgacggtgacggatgtacgatgtgccgtctgagacgcagacggcttgccgccctgctgaggtgcggcgaccttaccggtttgaggtttctccgtaccgaaaaacaggtcgctaggatgagtaatggtgtccaatgcgggcatggatgcgcgtttaccggcggctttcttggctgctttgctggacgataccatctgaggcacggcaggctttgattcctgctgggcagtagccttcttggcgggggttatgtcagcagtggccgccggagtagacgaatcctcctcaatcattgcgggctgctccgccactggctcctcccctggcaatgtggggaacaaagcgccaaggcccttaccgagtcgtgattttgatgccattacttgttcctcctcgcatcaatggtgtcaaggacttgttgcgaacgctgtgcgatttccaaagctgcttcaccatacgatatggcacctatgccacgaggatcataggcaatcaccgattgggagaaactcggcgcttcggagatcttgactgaacgcgggatggtggtattcagcacaatgctgggatagtgtcccttgacctcgttatatacttcacggctcaatagcgttcggcgatcgaacattgtgacgagcatggtggacaccagcagtactggattgaaatgctcctgcaccaaaccaatcgtgttgatcagctggccaagaccctccaatgcgtaatactcagcctggataggaatcagcatctcggtcactgcacacatggcgttgatgaccaaaaggcccaagctgggcgggcaatcaatgaacacgtaatcatagtgtttatctgattgacgcaggtagaggtccaaggcctccttcaacaatgtgtttcggttgggcagatcagccacttccaactcggcaccgctgagatcgattgatgcaggcacaacatcaagtgtgggaaaatcaggacagaccgtgataacatcacccagatcggaacgcccctcgataacgtcatagaccgagggctctcccgatgcatgagatacacccaacgccgtagaggcattgccctgcgggtccatatcgatgaccaacacctgcgcgcccttgttcgccagcgccgcagcggtgtttaccgtggatgtggttttacccactccccccttctggttggccacggcaatacgacgggtacgttgaggtttggggaaatcggttttcttgagtacatcgtagcgtgagctttcatcagccatctggctgccaagcactgaaccgtgaccatcgaatattcgctgaagcgtttcggaagccgattctataggttccgactgatgatccttggtggacatcgctcctccttgcacagacgtaagttccagtgttctcattcgtatggacatgatgctcgttatccacaattgcgatatgcaatgtggataagtgtggataagtgtgaatgacgttgagtgttagattatgtattcgcagacgaaaaacattgaaaaatcagtgttttcatcattctgcacatcgtcccgtaaaaatgtggataacttttacgcacatatggaaatgtggataactcaatcagtactccactcatcgcttatccacaatcaccacgtgggtaggctcaagatccggtccgacagccgcctcaacgacgcgtggacgacgaccaccgaattttgcaatctccttgccagccttgtcgatttcagcctgagcagaccgtcccttcagtgcgatcaactgtcctgacggtttcagcaacggcaacgtccagccagagagtttggtcatgggagcaaccgcacgacacgtgacaacagcgaacggatgaatttcccgcttccgtacctgctggatgacggcatcggagcgtccacggataatctcaacgttctgcagttgcatcaggtcaacacattcatgcaaccattcgattcgccgctccatcggttcaatcagcgtgaagtcatgatcaggcaaacacgcggcagccaccaatccaggaaaaccaccaccactgccgacgtcggcaactgttttgaagcgaataccattcgtcacattccgaacgtacggcacaatcgcagcggaattcagaatatgccgttcccaaatgatatcgacgtcacgggggccgattaatccacgaggttcaccctcttcggcaatcttggcatggaaacgctccaacttcggcaacgcatcacccaagacctcagcaagtacaggtgacccctgcagctgatccgtcatagccatctccctcaccatgtttcacgtgaaacaatcaacatggaaaaggcgtcgctcattacgacgccattctccctacggtcactcttgtttgtttagagacgacatccgttgaacgtccttgtcatctcaaaaactcgtcgacctattactcctgatcaagctcgtcgtcttcggcaacatcctcgattttgttcttgagatacaccgtcacgtaacgatgaggctcctcaccgtgcgagcgagacttcagcccctcttcccgaaccacatcgtgaacgactttacgttcgaaggaattcatcggcttcaaatcatacggctcgccggaatccttcactgcgtcaatggcatccagggcgatatcacggaggtgctgacgcttgcgcttcaggaaaccgtcgacatccacaatcagatgagaacgctcgccggtcttctgctgtacagccagacgagtcaattgctgcagagcatcaacgacttcaccattatggccaataagatgtttgatgtcggtatcgtcatcagcaacgatttgcacggtggggcggtcattacgcacgcccatctcaatgtcgccctcatagtcggcgatatccagtaggccttcaaggtaatccgcggcgatgtcagcctcttcgttgagctgatcgatcgacttcacgtcatcctgtgccatacgctactccttcatgtcgtgtttgaattccaagtctaagccctgctcccccgaacagagaaagtaatgtcggtgcgtgttgaatgtttcacgtgaaacatcgaacgcgcaccgacatggtcgtcacttctttttgcgcttacgcacgggctgttgacgctgatagccctgagtggccttacgctcagcctcttccttggccttggccaatgcttcttcttccagagagggcaggccggcctttgcgcggcgagcattctcattacgatgatcgcgcttctccttgtccgccgcagccggagagccaggggtcgggaatgcgtacacctgccacaatgtgcggcagaggttgcacacgttgttggtcagccagtagaccagcacggcgaacggcatggtggcaccagagaagatgtacatcaccgggaagagccacagcatggccttctgcatggtctcggcctgtttgttcatcgatgcggcgggcatgttgcgcttcatgttgaagtactgcataaaccacaggcagaagcacatcaggaacacgaaggtaccgatgaccaccttgcctgcagtagatgcgcgggtgaagttatcggtcacactgacaatgccgaacacatcggtttgggtgaattgcttggcggttgctacgtcgaacgcgcccagcgcaccgcgtttaccgttggcaatgtagggaatggccgacagcgtatagaacatggacatgaacaccgggccctgaatgagcataggcaagcaggagccagccggattggcgtcattgtcttgatacagtttcatggtttcacggctcatggcctccttggaagcctgatccgtcttgcctttgtacttgttctggatgcgcttcatcttcggcgccaacgcctgcatcttgcgcatcgacttcatctgcttgcagaacagcgggaagatacacgcctgcaccaccagcaccaggatgataatggcaagcacccatgagacaccaatcgggctcatgcccagcatcgcgaagaagtcatgcacgatcttcatgatccaggtctgcaaccactcaacgggagtcaggattttatatagaaatccccaaaacccgctatcaagcagaaattcatttgagttcatcgttgggcctctctttgggctgtggccaatggtgtcagtcggggctcttcatgagccttcgaccacgaaaatctgtaaaaaatggaataccgttgtggaacatcgtcgattcccccacgactccacggccggcaacgcagtaatctcagcatggcgagcactccccctttgaacgcgccataccgttccaatgcctcaatggcataattcgagcacgttggataatacttacaacaaggcggtgtgtttgccgagatgtgctgttgataccagcgcaccccaccaatcatcaccgccttgaaagaagctgtcatgcctcagccaccttatgcgccactgtggcaaaagccttcgcgatctgctgatctagcgaagcgaacgatgcggtcgcggcactgggcttggcgcgcaaaacgatatcgcaatgcgcgggcagcagatcctcatgggctctggccaatacacgaaacctacgcttcaccgtattacgggtgaccgcatgtcctaccgatttggagacagctaatcccaaacggcgatgcaccgttcggtcgtcatcatcatgatggtcgtcgggcaccaaatagtgcacgacgatatccttgccacctgctttgcgccggcgtttcagcacggtgacgaaatcacgatggctttgaagccgctccacctcgactatgcctgtggcactgatcggaatgatcaggcggagagggacttgcggcccttggcacggcgacggttgatcaccgcacggccagaacgggtgcgcatgcgcaggcggaagccgtgcttcatgtggcgacgacggttgttcggctggaacgtcctcttcataatccattgctcctaggtctattcggcaacgcttcgcgctgccctcacgtgagtcaagctataccaaagtactctcacccctaccctcaagtcaaaacggacggagtattttcacatttcgacacgttgcgagacacgtctcaaatctcttataatcggcggaataccaaccattcacggccaaaagttatccacaaattacatgtctgttattcacaatccagttatttcaacacgcgacacggtggataacttgtctaaaccagagtaaatattatctgttgtacagatttcgccacaccgatagaaggggccaccatggttaacgcttccggcgaccccgtaatcgaggccgcccacatctggtcagacacgctgacggtgctcaaacacagcgcttcgctcagcccacgagaaaaaggctggttggaaggcgttgttcctgaaggcgtcttcggttcgaccatcgtgctgtgtgtggacaacaacgatacgcttcaagccattcagggtgatttgaacgattccctgcttcaggcattgcgtacggtaaccggcgaaaatatgtttcccgcgttcaaggtcgtgccgaaaaccgagcccgaaccgctttcggcggcaaagccggcgcagccatatccttcggaaatttctccgaccgtcgccgagttcggtaaggaatcctatggtgcaaagccggtagccgcaccgcgggaaccgatgcccgccaccgagtcgcagttcccggtcggtcagcagaagatgaatcgcgatcccgagactcatctcaataagaacttcacgtttgattccttcgtgcccggcgattccaaccgttttgcccgtacggtcgcactggccgtggccgaaggttccggtcaggatttcaacccgttgtgtatctatggcggatcgggcctgggcaaaacccacttgctgaacgccatcggcaactatgcactggtcaaggatcccgggctaaaggttcgatacgtcacgtctgaggaattcacgaacgaattcatcgacgcgctgcaaaacccgaaccaaagccagggtcagattgctgaattcaaccgtcgataccgacaggttgatgtgttgcttattgacgatatccagttcctcggcggcaaggaagccaccttggatcagttcttccatacgttcaatgcactgcatcaggcaaataagcgtattgtcattgcttccgatgtggcacccaagaatttgaagggtttcgaggctcgactcatctcgcgcttcgaatccggcctgaccgtagacgtcaagccgccggatctggagacccgaatcgcaattcttcgtatgatcgcctcgatgaacggttcgaaaatccccagcgatgtgttggacctcatcgccgaacgcttcaccgagaacattcgcgaacttgagggcgcgcttacccgtgttacggccgtggcctcgctgagtaatcagccggtgacccgcgccttggccgagcagacgttgcaggacttcttcaccaccgatgtggaaatcaagcccacggacatcatcagtcaggtggcgaagtacttccacctgacgtttgaggatcttgtcggtaaatcacgaaccaaaaacgtggctgttcctcgtcagatcgccatgtatctggctcgcgaaatgaccagtatgagcctgatggatattggccaggtctttggcgggcgcgatcacaccacagtaatgcatgcctgcactcgaatcagtgaccgaatgcagcaaaaacaggagatctataactacgttatggagctcacggttcgcctcaagcaaagcaacaccaactgacacaacgcttctgagagacgaaaaacggcacttttcggaaagtcagtccgaaaagtgccgtttttggttgctcaggcggattctggtggatacgtcgaggcaacggattcgagacatcagattcctcatggctcccctttgtgaggagagctgtcgtcgcagacgactgaggagagtttcgaaggggaacacgcaaaaaacccatgaaacgagagaatcgattctgaggaccgattttgcgggtttgggcgagcgagacgaaaaaagtgccgaaaacggtctccagaatcgattctcctcgacgaaaaacagccttcaacacgccgtgcgaaagtacgaaaaccaaaaaagttatccacacagttgtgcacagatgtgggtaaactcggcggataactcgtggattacccactgttttgttgtggaaaactcgtgcataaccgtgacctcgatgtggaaaactcaaattcgacgaactggctgtggaaaactcgcccacttatccacaagccatgcagaatttgtccacaattttcagggacttatgaaccgttgcatttgtagggctcacccctacttatccacactatccaccggccttattacgacgattacttactcagttacatgaaaagcatcatcgccacagtaacagccagtcacccatcgtacgtaagttcgccacctaacggctagaatatttctcagccaatccgacgaagggaacaatcacacatgaaagtcgaaatcgatactgcagccctggccgacgccgtagcctggacctcccgagtcatcgacgcacgtccctccaacccgattctcgctggtgtcaagctggaagccattgacggaacgctgcaattctccgccttcaactacgagatttccgctcgccaccacatcgaagccggcgttgacgaagccggttccgtactggttcagggcaagctgctggccgatatcaccaaatcgctgcgttcggagaaaacgtacctggtcaccgacggctccacgctgaccatcacgtccggcaagtcgaagttcaccttgcagctcatgcccgacaccgagtacccggatctgcctgtggtaccggccatgctcggccaagtcgatgccccgactttcgttcaggcagtgaaccaggcatgcgttgccgtctcccgcgaagagaaccgcccggtactgaccggcgttcgcatgcaattccaaggcgacaaggtcgtcatgacctccaccgatcgcttccgtttggcccgcgccaccttcacttggactccgcagaacccggacgtcgacaccaccacgctggttcgcggctccctgctcaaggatgtggcccgtgctcttgacgagcaccagaacatccgccttgatttcgatgccgatagcccgacgctgctcggcttcgaaaacgccggccgcgtctccacctcccagctcatcgacggtgaattcccggcggtcgaccgcctgttcgccgacgaatacccgattcaggccgtagtcaacaagcaggatctgctcgacgccatcagccgtgtggctttggtcgccgaacgcaatgctccgattcgcatgaccttcaccggtcaggaagtggcgctgtccgccggatcggtcgacgaggcccaggccaacgaaacactggacatcgacatggatggcgacgacatcaccgtggcattcaacccgtcctacctgaaggagggtctgtccgccgtgaccgaaccattcgtgcgcatcaagatgacgaccccggtcaagccggtcgagttcaacggccagcaggaagctgattccgacgagtccatggactaccgatacctgctcgtgccgatgcgcttcaacaactgagatccctgaatttccaacgattcgctaatgcatatctcccgtctcgcactcgaccactaccgctcatggagtcaagtagtggtcgatttcgtaccaggcgtgaatatcctgttcggcaagaatggcttgggcaaaaccaatctggtggaagccgtcgaagtgctgtccaccggatcgagtcatcgcacgtccagcacgttgccgctgatcgaacgcgggcagaccacggccaccatccgcgcgaacgtcgctgatgatgccggtcaaaccactacgtatgaagcgtcgattcatgcgcgtggtgccaaccgagcccgcatcaactcggggtcgtcgctgtatctgcgcgatatcattggcaagattcccagcgtttccttcactcccgaagatcagcgattggtgtccggcgatccgggagcacgccgcgtcatgatgaatcaggctgcggctctgctcgagcccggatacatgcagacgttgcaacagttcacgcgcatcgccaaacagcgtgccacattgttgaagcaattgaatgccaatgccaacaatggacagccgatggatgcggttctgagcggtttggaaatctggaccggccagttcatcgaagccggtgtggcgttgacccgtatgcgcgctcatgtgatcggtctgcttgccgagccatttgccgcgatttacgccgacttggccggtgccggcgagcaggtgacgctcacatatgcgccttcattcgacgaagtgctgatgttcgacgatccacatccgcagatcagcgagcattttcaacgcatctaccccggtgaaatggctcgcggcgtgaaccttatcggtccgcagcgcgatgacatgaaccttgagttggccggtattcccgcccgcgagttcgcttcgaacggcgagatgtggacgatggcgttggccttgaaaatggcattgtttgaaatcgtgcgtgaccggttgggattgcagccgattgtgattctcgatgatgtgttcgcccagcttgacgacagccggcgcacgcagattcttgatttcgccagaaaacaggatcaggtgctgattaccgtggccgctgaaggcgatgtgcccgactatgaatcggcccatcgtatcgacgtggccacactggccgaacccgcttccgtaatactgccaactctgggcaatttgtccgattcgcgggaaaacgagagtttgggtaagtatgacggaaaacccgcggtggacagcgcgtccgtagaacggaaagtgtcatgaacccgccgatcgcccgccaactcaacctggacgagaccaaactgccggccgaaatattcgagcggctctcccgtcgcggggcgaccttgaaagactacagacgccgccgtgaagaggccatcgaaaacttcggcaaaccggggcgcgatccggctgaactgggcagcgtgatgaccaccatcgccggcaatggcgtctgggcggcgaatatgaaacttgcgcaattgcgcaaccattgggaccaagtggtggggcaggccatcgccagccattcggcagtcgccgatttcacggacggcgtactgaccatccgtgccgaatccacggtctgggccacgcagctgacctaccttatcccccaacttaccgataccatccgtcgcaatctcaaaggattgaccatcgccgagattcgcgtgaccggaccggccgccggatacacgcgcaaatgggctcggcggcggtagccaagataccaaacaaattcgcagaagcctcgctatggcgctcgtcgggttagacgagtaaaatcacatgcagtatggtcaaatggccagaagagccctttacgggcctcgtaagccatatcgcctccgtgaatgaccttcatgacggaggttgaccctgtagtcacggaaggaagcctgttggcagacgaaaccagcaaagaggagcagctgaaggcggctgcggaacgcatcaacaatgcggaattgaccgaaggcgaacttgacgaatccatggcccccgagcattatgaggcctccgatctgagggtgctcgaaggactcgaggccgtgcgtatccgccccggtatgtacatcggttccaccggcccgcgcggtttgcaccacctggtctatgagatcgtcgataactcggtcgacgaggcgctggccggatacgccagccatatcgaggtcaccattctgccggacaacggcatccgcgtggtggacgatggtcgaggcatcccggtcgatgaggtgcccggcgagggcgtctccggtgtggagaccgtgatgaccaagctgcacgccggcggcaagttcggcggcggcggttatgcagtgtccggcggtctgcacggcgtgggtatctccgtggtcaacgcactctccacccgtgtggacatcgaagtgcgccgtcagggcttccactggacccagacgtacatcgaccagcaccccaccgcgcccttgaagcagggcgagccgatgaccgaaggcgagtccaccggtacgtccgtgactttctgggccgacccgaagatcttcgagaccaccatctacgacttcgagacgctgcgttcccgtttccagcagatggccttcctgaacaagggcctcaagatcagcctgaccgacgagcgtgagaatgaccaggccggcgacgaggtggccggcgacgccgcggacgagcccggcgcaaagcaccagaccgtcacctaccagtacctcaacggcatcaaggactatgtcgactacctggtcaaggtgcgcaaggccacgccggtggaagaggacgtcatcagcttcgaggccgaagacctgaagctcggcatctccgccgaactcgccatgcagtggaccaccgcctactccgaggccgtgcacaccttcgcgaacacgatttccaccaccgagggcggcactcacgaggagggcttccgcgccgcgctgacctcgctggtcaaccgttacgcgcgtgacaagggcatcctcaaggacaaggacgagaacctctccggcgacgacgtgcgtgaaggcctgaccgccgtgatctccgtcaagctcaccaacccgcagttcgaaggccagaccaagaccaagctcggcaactccgaggccaagaccttcgtgcagcgcgtgatgaccgacaagctcggcgactggttcgacgcccacccgaacgaggccaagaacatcatccagaaggccatcgaggcctcccgcgcccgtctggccgccaagaaagcccgcgagaacacccgccgcaagtccatcttcgagtccgccggcatgcccgacaagctcaaggactgccagtcctccaacccggaagagtgcgagctgttcatcgtggagggcgattccgcaggcggttccgccatccagggccgcaacccgatcacgcaggccatcctgccgctgcgaggcaagatcctcaacaccgaacgggccagcttggaccgcatgatgaagtccgacaccatcgaatcgctgatcaccgcggtcggcggcggctatggcgaggacttcgacatctccaaggtccgctaccacaaggtcatcatcatggccgatgccgatgtggacggtgcgcatatcgccaccctgaacctgacgctgttcttccgctacatgcgcccgatgatcaccgccggctacgtgtacgtggccatgccgccgctgtaccgcctgaagtggaccaagggcccgcacgacttcgtgtacaccgacgccgagcgcgaccgcgtgctcgccgaaggcaaggccaacggacgccagctgcccaagggcgaaggcatccagcgctacaagggtttgggcgagatgagctaccaggagctgtgggagaccaccatggaccccgagcaccgcattctgaagcaggtgcacatcgaggacgccgccgcggccgacgagaccttctcgatgctgatgggcgatgaggtcgaaccccgccgcctcttcatccagcgcaacgccaagaacgtgcgttggatcgatgcgtaacggaatcctccaacctccctcgtcagagggaggtacacaacggacttagacaactaaaggaacaacagtggcagatgaaaacaacaccggcgacgagcagttcacgccggacggctcgatggagccgttgagcccgcaggaggcggacaccaccgactacggcctgatggacaccggcgaacgcatccagcgcaaggacctgcagcaggagatgcgcgagtcctatctggcgtatgccctctccgtgatcgtcgagcgtgccctgccggacgtgcgcgacggcatgaagcccgtgcatcgccgtgtgatctacgcgatgtacgacggcggctaccgccccgatcgcggctacaacaagtgctcccgcgtggtcggcgacgtgatgggtaagtaccacccgcacggcgatttcgccatctacgacaccttggtgcgtatggcccagtcctggtcgatgcgcaacatgctcgtcgacggccagggcaacttcggctcccccggcgatgacccggccgccgccatgcgttacaccgaatgccgcatggccccgctggccatggaaatggtgcgcgacatcgacaaggacaccgtcgacttcgtgcccaactacgacggcaagacccaggagccgaccgtgctgccggcccgcttcccgaacctgctcgtcaacggttccgccggcatcgccgtcggcatggccaccaacatcccgccgcataacatgcgcgaggtggcggacggcgtccactgggcgctcgaccacccggacgccagccgcgaggaactgctggaaaacctgatccgcatcatcaagggaccggacttccccaccggcgccaccatcctcggccacaagggcatcgaacaggcctaccgcaccggccgtggcctgatcaccatgcgtgccgtggtcaacactgaggagatcaacggccgtatgtgcctggtggtcaccgaactgccctaccaggtcaacccggaccgcctcgtcgtctccattcgtgaggccgtgcgcgacggcaagatccagggcattgccgacatgcgcgacgagacctccggccgcaccggccagcgcctcgtgctggtcttgaagcgcgacgccgtgccgaaggtggtcctgaacaacctgtacaagcactcccagctgcagcagaccttcggcgccaacatgctggcgctggtcgacggcgtgccgcgcacgctgagcctggacgccttcatccgccactgggtgaaccaccagctcgacgtaatcgcccgccgcaccgcgtacctgaagcgcgaggccgaagagcgcgaccacatcctgcagggctatctcaaggccctcgacatgctggacgaggtcatcgccctcatccgcgcctccgaagacaccgacaccgcccgtacgggccttatggggctgctggacatcgaccaggtgcaggcggacgccattctggccatgcagctgcgcacgctgacccgcatgaaccgcgacaagatcgtggccgagcatgaggaattgcagcgcaagatcgccgactacatcgacatcctcgccaagccggaacgccagcgcaagatcatcggcgatgagctcgacgagatcgtggccaagtacggcgacgaccgccgcaccaagatcctgccgttctccggcgagatgaacgtcgaggacctgatcgccgaagagaacgtggtggtcaccgtgacccactccggcttcatcaagcgcaccaaggccgacgaataccgcgcccagcaccgcggcggcaagggtatcaagggcaccaagctgcgcgaggacgacgtggtggatcacttcttcctgacctccacgcacaattggctgctgttcttcacgaacaagggccgcgtctaccgcatcaaggcctacgagctgcccgagggttcgcgcgactccaagggccagcacgtggccaacctgctgcagttcgcgcccgacgagaccatccagaccgtgctgtccatcccgaactacgaggtggccaagtacctggtgctcgccacccgttccggcaaggtcaagaagaccccgctggccgagtacgattccccgcgccagggcggcctgatcgccgtgcgcctcatggccgacgagaatggcgagaacgccgacgagctcatcggtgccgcgctgtgcaacgccgaggatgacatcatcctggtctccaagctcggcatgagcctcaagttccaggccgacgacgagcagctgcgtccgatgggccgccagaccgccggcgtgcagggcatgaagttccgtaacgacgacagcctgctggccatggatgtggtccctggcgactccgacaaggacctgttcgtggtgaccaacgagggcttcgccaagcgcaccgccatcagcgaataccgtctgcagggccgtaacggcttgggcatcaaggccgtgcaactggtcgagggccgtggtgccctggtcggcgcgctcgtggtgtccgaagacgatcaggtcatggccatcatgaagtccggcaaggtgattcgttccaacgtggacgaggtcaagcgcaccgggcgcaacacccagggtgttaccttcgccaagcctgacaagggcgacacgattctctccatcgcccgtaacgaggagaaggacgagcccgaggacagtggcgatgccgcggcgaacggcaccgccgagaccgcacaatccggcgagaatgtgaacaacgcggacgaggcgtgagcagcgtcctgaaaagctggtagcctcgcatacagcagaggctaccgccaagcctgttaaggagaaacgatgagcgagaatctcgaagacaacgagccccggatcataccgccggcagtcggcaatacgcagaacgatcatgtcgagccgctgatcggtactgagcacgctccccgcgtggcacgctccgtgtccagcgatccggaagaatccacgttgccttcttcaggtgccgccactcccgtgcgtccggcacctcgccgtagcgcccccagggctcgccgcatgagcttgtcgctgacccgcgtggatgcttggtccgtggccaaggtgacgttcatgctgtccatcgccgtggcgattattcaggtcgttgcctccgcgatcgtatgggtgctgcttgatgtggtcggtgtattcagccagattacgcagattgtgtcttccaccggtcttgatgcaggcggtttcgatctcaagaacgtgttgtcccttaccaccgtggtctccggcgtcaccatcttctcgattgttgaagtggtgatcttcaccctgctggccaccattgcggcactgatctacaacgtggtcagctcgctggtcggcggcgtgcacgtcacgctcggcgacgactgatatagctatactggcagaactcccctcagtgaaccgcaccccggttgttggactgaagtaattcagattcgatgatcggaggtgcggtttcttatgtgtggggttcgtaggcgtcgttgctgggccgagacttgggactccggcgacgctgggggtggcaggcgtcggtgttgggacaggttttgtatctctgacgacgctgtggagggcttaccgtcgtcagcggtacagatcttggagttctgccgacgctgagggtgtgttctgtgtcgtttgcgtccaattcttggccctctgccgacgctgggcacagcaagcgtcgttgctgggccaagttttggactgccgccgacgcagagaatgcacacagcggtgttggtctgccagcgtgtggcagcttggcgccgttgaggaaggtctatgtggtgtggttccgccaaaggactggcaggttggcgctactgaggggactttatgggctcttccggttttggcgtgtaggggccgtgcggtttcattcactttttcaatcacacaccgaatcaaaccgcacggcccctacgcaccaaaatgcgaagagccggtttcgctaactagtgcctatatgcctgcaatcaggctgatttgtgctgtcaggctggctggcgtcagcggttgatctgccgatgttgctgctcgtcagtctggactgttgggctttcgttttgacagcggaaggaagatcctcctcgcggtagggcaacaattatcagtatcataattaaggtaatcgtgattacattaaccatgatactcttattattgggcggtaagcggatcggagggctgcaatgtttgtcgcacgagagcacgagttacaagtgctggaaaagctgtttaccagtgattcgttcgaaatggtggtgctgtacggtagacggcgtgtagggaaaacggcgttgatcgacgaatttgtcaaagataaacgcgtgctgtacttcacggccatacagcaaagcgccaagatgaatcttgaagatttctcaagagcggcattgtcgttctttggtatgccggattccaccccgtcgtttggcgggtggtctgatgcgttatcgtttgttgctgaacgtgctgcacagactgacgaacgtatggtgttcgtattcgatgagttcccttatgcagctgccgccgagccagcattaccctccatgttgcagatagcaattgaccatggattcctcgccacaaaagtgacgatgattctatccggtagtaacgagggattcatggaaaacgacgtattggggcgtaaaagcccgctatacgggcgtcgtacagcacagattcgactcctgccattcgactatgcggatgcggcaaaattcctaacgaacacatctccgcaagaactggtccaatactatgcgactttcggcggtacgccatattatctggcccgtatacaggaagccgatggctttgaatccaatgtgctgcgcttgatgttcgacaacttgggcgtactgcgtgaggaacctatgatgctgttgcgtcaggagcttcgtgaaccggcatcgtattattcgatattgcaatctattgcgggtggtaattcctcgccaaagcttatcgctgaacatgcgggtgtcggatctgattcgattggagcatatctgaaaacgctggtcgatttgcgcttaattgagcgaaaagtgccgtttggtgaagatccgagtaaatcgcgcaagggaatgtatgtggtgagcgatcccttctttgcatattggttccgctttgtggggcgcaacatgagcattttggatggtaatatcagcgaggaggttacgagcagactcgcttttggaccagcgtttgatacctatgttggtcaacaatttgagacgatttgcctgcaatggcttattcgaaacaacgctatgggcaacctcccctttgttgccactcagttcggcaaatggtggggcaatgatccgattgctcacgagcaaaccgatatcgatgtgattgctgcggattcgctcgataaaacgattctgttcggtgaatgcaaatggcgtaattcattcaacgaaacggaggctattgaaaagctccatcagcgtgctggcttagtccgcggctatcaggcaggtaatgcgtggcttatgctgttcaccaagaatccggtgagtgagtccacgcgaacccgctacatggatgatgaacgaatggtgttcgtttccgcggaagagttatacactgcgtgatgcattactgggtgattgtgacgcggtatctagagtcctgccgacagccacgtggcaattacgccgaatcacgcaccaccaaatcggtgttcaggtgcatcacgcgcggtgaagagactccgttgatggctttgatgaccacgtcggccatggtccagccgcgctgatccatgtgctgatcgacggtggtgagttccggggttatggaggtggaagctaagttgttatcgggcttacgtatttggggatagcacttgttgctcgttgtacatatagcaatgcccttgcctcctcacgggaagcaagggcattacgctactgcttagtactgctcagaggcaagcgtcacagcacgccctgggcaaccatggcgttggcgaccttgacgaagccggcggcgttggcgccgagcatcaggtcaccctcgtgaccgtattccttggcggcggccagggagttggcgacgatctcttccatgatggacttgagcttggcgtcgacctcttcgaaggtccaagacagacggtagctgttctggctcatctccaggccggagacggccacgccaccggcgttggcagccttggccgggccgtacagcacgccgttcttctggtagacctcgatggcctccggggtggacggcatgttcgcaccctcgacgaccacggtcacgccgttgtccacgagcttctgtgcggattcgccatcaacctcgttctgggtggcgcacggcagagcgatgtcgcccttgacggtccacacgcccttgctgccctcgtggtactcggagcccggaacgcgctcggcatattccttgatgcggccgcgctcgacttccttgatctgcttgacgacctcgacgttgatgccgttcgggtcgtagatgtagccgttggagtcggagacggtgacgaccttggcgcccagctgctcagccttctgagcggcgtaggtggccacgttgccggagccggagatcacgacggtcttgccctcgaaggagtcgttgcgcagcacgcgcagggcttcctgggtgtagtagcacacgccgtaaccggtggcctcggtgcgggccagggagccgccgaattccagacccttaccggtcaggacgccggagtactcgtcgcggatgcgcttgtactgaccgaacaggtagccgatctcacggccaccgacgttgatgtcgccggcgggaacgtcggtgaactggccgatgtggcggctcagctcggtcatgaaggcctggcagaagcgcatgacctcggcgtcggacttgcccttcgggttgaagtcggagccacccttgccgccgcccatcggcagcgtggtcagggagttcttgagaatctgctcgaagccaaggaacttgacgacggactcggtcacggtcgggtggaagcgcaggccgcccttgtacgggccaatggcggagttgaactggatgcggtagccgcggttcacctgaaccttgccctcgtcgtcaacccaggccacgcggaacttgatggcgcgctccggctcgacgatgcgctccagcacaccggccttctcgtactccgggtgcttctcgacaaccggctgcagggtctcgaagacctcgcgaacggcctgcaggaactccggctgatcgccgtcacgggcaacgacctggtcgtagacacgcttgatgtactcgtcagtgagcatgattctcctcgatttggtagggaattaagacggttttattctatgcgcgcaggcccttgctgcatagagtctcgctcggataacgggaaagctttcggcgtggttatggagtggctcaagtttccgtttgttagatttttcgggcgattgttggatgtctgtctatgcgtgaatcgggtcgaaatggaagccgcatcacaccggaggcacgttcatatagtggacataaaggcggacttgggtgatgtcagatgtgtctgttggggatcgtgcggtctgtggggtttgtggggtgtggctggaccgtggggtcgtatggtttttgtgacctgtggggtttgtggggtgtgtggccgcaggtcttcggcgcgcaggttaccgggttcgcggtcagtgtgcgaagtaggtctgcagaatcatcgtggtctcggtgcttaccggcaccgtgcggtggatgagattgagcagttcttcaagtgcggtaggggaagccacgcgcaccaccagcacgaaactgggggcgccggccaccgaatagcaggagacgatgccgtcgatattgttcagcttgtccggaatcgaggattcggctgagtagtcgagcggggtcacgttgacgaacgcgctgatgggcaagccgcgctgctcttggtcgatgatggccttgtatcccttgatgatgccgcgcttctccagcttctgcacgcgcgactgggcggcggagactgacagtccggtcgcctgggccagttgcgcgagcgtggcgcggccgtcggcctccagcatggtgaggatgcgctggtcggtctcgtcaatcgcggtcatgatgtcttctccgttcgttgtgctctgtgttcactgtacctgttgccggaatgcgatggctttccgattttgcctggtaatttcagtagttcttcctgtgttttctgttgtgtggtggaatgtttacgtttaaagtcctaattggatgtaataattccttttgaaataagagaacgatgaaataattccattgaggagggatgatatgcagaagttttccaacatgtctctgtccgaagttgcatctgctgctgcgcctgctactatgcctgctgccggtcgggttgctgtgccgaccgccgagcccgcgagcctgtccgccgaagccctgaatatcccgcgctccggcatccgagacgtattcgaccgtgtagagcgcgtgcctgacgcgatttcactgaccgtgggggagcccagcgccacggccgcgccgcatatcgtggcagccgcttgcgaggccgcacaggctggccgcactcggtacaccaacgtgcttggcatccccgaataccgcaaggccgtggccgattactccgcctgtgtgaagggacttacttatgatcccgaaaccgagattcaagccgttgacggtgccacgattggcctgtttctggcgctgaaagccgtggtgggcaccggcgatgaagtgattattccctcgccgttcttcacttcctatgacgccgaagtgatgctgtgcggcggccgcccggtcaccgtggcgctgcgtccggagcacggcatgcgcgtgaacgcggcggacatcgaagcggcgatcaccccgcgcacccgcgccgtaatcatcaactcaccgggcaatccgaccggcgcggtaacctctgccgccgaactggcgcgtattgccgaagtatgcaagcagcacaatatttgggccatctccgacgaggtttaccatccgttcgtgtttggggaaacgttcggggaaacgcttgggggagaggcagccgtggcaccatcgatcgccgcggtgccgggcatgaaagagcgcaccattgtggtggaaagcctgtcgaaaacctatgcgatgaccggctggcgcatcggctacctgctggcacccgaagcggtcatcgaacagaccggcaaaatcgccgaactcatgcactcctcggtgaactccttggcgcaatacgcaggcgtggcagcactggctggcccgcaagataacgtggccgccatgcgcgaggaataccgcgccaagcgccagatcgtgctggacggtctggccggatgcccggtattgcgtctgatcgaaccgcaaggcgcgttctacgcctttgtggacgtacgcctgactggccttgactccggtgaattcgcagaccgtctgctggacgaagagcgcgtggctgtggtccccggcgaggccttcggcgaggaggggcgcggcttcgtgcgcctctcctacgccggagatgccgacgagctgtgcgagggcgtcgcccgtctgcgcgcattcgccgaacgggtatggaaccccatcaccggccaccacaccgccacctatcaccccatggaggtgctggcctgaggcttaaagcgaggctagaccgccattcggcctcgtcggcgcgagcgatggcctgcttcttggctcgcagcaagatgtagccgagtaccagaacgttggccagagctcgatgttggcatcgtgtcaaaacaaccgcattaaggctgccgcgtctcgtatcgttacgcgtaggggctggctgaggcgtaatgctgaagagtaacattgaagcgatggcaatcaagccgatttgagggagagaggcacacgatggcgtactgcggccactgcggaaatagagttgatgggccggcacgattttgcccggcatgtggagcgtctgtagacagcgcaccagttgcgacggcaccagtaccggccgcatcgccagccgtaccgcctgcgtcgataccggcacctgctgtgccggcgtctgcggtaccaccatcgataccagccgcgccggttgccccatcggtttacgccgcgtccgctgccccacagccggcaccaaccgttcccctgccggctttgccgattcccgctcctgccgcatatcaggcgactgatgcaaccgccgtcctggcaccgcagcgcaaatccagtaagaagctgatcgccgctttctgcgcattgcttgcgacgattctggtggcggccttggcgttcatcatccccaacttcaccgccgtcaaagcgatgctgggcttccggcccaccaatccgctggtcgtcaccttcgacgcgatcaactcgctgtccactctgcgcagcaccaaatacgaactcagaacccacagcatcactgacgattctcttgacgtgcggatgtctggcatgtattcgctgggcaaaaccaccaacgaatcctccgcgtccttcactagcaaaacagacgaatatgcaacgaccttcgcttggtacaaaggcgcattcgccgagaaattcgtttggcatgacgacgacccctactacatctactgcccggccgaccaatatgaagatgacttaaggaacggcgttggtagtgatgtggcggacttgatattgaacgtcaaggatgcgttggtcaagaacggtgcttgggacatcaccggcgcggagcaaacgttctacgatcagctggacaagatgaacgacgatgggtactcgaacgacatcgaccgggccaagggcacgaaaacgtctgccgaggtgaaggccgaggccagcaaattcatccaacaatatttcggcgtggagctggaagataagaatgtgcgcagccagctgttcccgaagacatcgtctgccaagtctgccggcaatacgcagctgtcgtaccaaatcgatatcaaagcgttgtctcagcatttcgtgaattactggatcagtcatgaagcgcagtatccgcatctgaaatcctgggtgattcagcaaatcgaggatgccggcgtggacgatgctgaagatgagtaccgtcaggcgctcgataatgtgcgcaactgggatttcggcacggatgaagagccggagatgccgactatcaccgtggatctgaactacggcagaaagcgtctgatgaattcgattgccataagcgtgtccggcaaggacgaatacggcgactcctataatggctcgctatcgttgacgctcagtcagcagaacgcggtgtctgtggacgaccccgatttgactgatatggtgagcaaagccaaggacaacaacggactggatttgtcctgaatatggtgcgtgggatgttgcggcggcgctaatttcctcggtgggctatcacgcactcttcccgcttgcagcggtctgctcgctgattggcgcggtgctgatcgtcttcatcaagtcagtgaagtaaacatacttattcatccctcttccttccataacaaacgagcggaggggttgggccattgttttgcggtgtgcccagtctctccgctcgtttatttgcttgattctgtggaatggaaggggcatgctctatgtcaaataagataatgcggaagggctgttctgcgtgcatatatcttgctgaacgtatttgagggtactttctggttaaagacacgccctatggtgggcagaatgctgccgttgtgtctggcgtcggtcgcaggacatgttgtatcatgagggcacaagcttaattcagccgtcctcaatctgattagtcgtcgggtcggattggcgtgatcggcttgcagggaatcatccggctcttccggttttggtgtgtagaggggatgcttataggtgggcttgtatggtgtgtctgaagccgccggtgtggaggaggctgcgggtgacgtagttgtcgaggttgcggaagccgagggcgatgccgcgtagggtctcgggcctgccgttgatggcctcggtgggaccgttggcggtgccgtgggcgcggtcgtcggatcgatcgtccccggtgccggcaccgtggtcggcgcatttgtcggaacggcgattggcactggagccggatggctgataagtagcggcttagacgcactttacgacaatcaggtgcacagaggcggtggagatgacccgggcagtcatttcaaggataatctcgggttttggaagtgggggtatctgttggcgttgttcactcggtatgtgttggtggggcgtcttgaggacggggcgcaggtgttctgggacacgctggagaagacgccggtcaagcgcaagctggatttcggcggcgattccggctgggcgcgggctggcgcggcggccggcggcgctgc

SEQ ID NO: 1090 - DNA, 29146 bp, Unknown
  R13_10m  MAG No. k141_10527
cagggtggtctccaacatggcctggtcgacctgtagaatctgctgtgacatggcttcgtgccctcgtttccaatcgcggtttgttttgtttggcgacagaaaatcgtacacaggacacgggccatgtctctatctcaggcctcaaccaatttgcgcaaaatctcgggcgttatcctttaaattctctccgttatgtaatttgacttccccgttggaatgtgtttacaattccagcgacaaaagaaaaagcccttgggactctggaacagtcccaaggacaaacggaaaaccagctagattctccatgcaccagcatactgcaaggcgtggagggaaagacgttggaagagatgggataccagaacgcgcaagccgtatacgacatcagccgcaccggaaggctggcgaaaaaacgcggagaaaaccttgccgtgtacgccatggcgcaacttgtgctcgactacatggcgatcaacacctacgactgggacagggcacgcaaccagccgccggagaagctgcgcaaggtcaacgttccgtgccgctactacacgaagggctggcgggcgatagccgacgcatacggcatgattctgctcaccccggaacaagccatgagcgggaatgctgacaaggaaatggagaaacgcgagaacaccatccgaaagaacatcagcaacgcttggctgttcctccaagagcgcggcgtgataaagaagctcgaacccgcttcgctcggcaagaacgccggattcctgctgctaatcggcgacgacgaggagaaccgggcggtggaacggtgggcgcgccaatgcctcggactaccaatgagccggtgagccgtgggcatgtccacaagcgccgtgggtctgatccggtcagcaatccttcgtcttgcttttctcgccatccctatcgcgataagcatcgttaaacgggaaaagactacgggttatcacccaaaggatacctatgacctccacgaaagtcgaagccatccaagcgaccatcacattcgacggcaccgaatgatcgaaccagaaagaaaagaacacgtagccaaacacgacaacattcgtgacgaccagctgccaggtcacaaacttcagagattttgtcgcgaccctttcacgaagcttgttcgactgctcttccctatcggccttcagcttttcgatacgaagccgtatcgcggccgtcgactcagcatcaacctccggaacacgatccccgccgtccgaccggcgctcgtttccaccatccgaatcccgcacctgccgggattcaagctcctcggcctcacgctgggcagccgccacatcctccggagtcggctggcccttcacgtcggcatcactcatcggccaatcaaccccaagttcaccaatcgatgcccaaaagcagcatccgacaccccaagcctttcctggatgccatcgagactgtccccccgcgcccacgccatcctgatatagcgcgcaggcataatcaactcagccgcgaacgaattggcccacctctcaaccgggtcggtaccacgagtggacaattcgccacgatattcaacgtagccaaactctccgccatcgtcacgatgcagccaataatggcctatctcatgcgcaagagtgaacttccgcctttcccgcgaatcattcgaattaacgtagattcggacggctcccccgtgtttcttaagaatgaatccgccgacattgtcctccaatggagtgagcacgacttccagacctaattgctccgcgatcttctccggatcaaccggcacggtcagatgcccatcagatgaactcaccgtctccaaacgtgctctgacggcctcttggaagggatctttcacgattgcacctcccacacagtcattcaccctctcattagctatatcctcatgatatacgcggacaagcgtggacatatcgcatcctaagccatcggcacattcgtctcacatcaatccgacagcgattccgtgcccacattttgcccacactcttccggtaattgcagtgatttggagtgatttggagtgaattgcaaaccatgcggaaaccattggaaaaacaaggaaacccggcatccaagccgggtttccgaaagtgcctccggtgggactcgaacccacaagccgaagcgatcgattttaagtcgactgcgtataccatttcgccacggaggccaacttttctattataagctatctcctgccctgagcattgcttgcgggttgctgcgcttcgtgcagccgtcgcggcatagccgctccctttgcctacaaacagcccagtgggctgtttgtagcagccggtagcgatagcgtcgccggcgtcgcatataacgcaaacagcccaccgggctgtttgcttaacggctcagcccgctggaggcacttaccacttacgctattgagccagcaaccggcgaccataatcgagcacaatgccgtccagcagcccgtgttcgctggcgacgaacgaatcgatggcttcaccatgatcggccttggcggcttcgctgacacgcgccagcacacggctccagaccacagcgccgccgccgaccacatcgatacggccggggtggatggtcttgtattcgcggcgctcggcgcgcgtcatcctaaggaacttgtcgtccacggcataggcgtcttcaaggctcaaccgatgcccgtcgaccacggtgtgatcgtattctttcaatcccatagccaaggcggtcatcgtggtcaccgtgccggacacaccgatgatggtacgggccttgcctgcgtccacggtgcggaaggcctcatcgatatgctcgtcgatgtccgcaacggcctcatcgatctgcgcctgggtcggcggatcgttggtcagatgacgttcggtcatgcgcacggaaccgatgttcatggagaatgcgccctgaacctgggtggtgggcgcactgacgccgtcgccaccgatgaccagctcagtggacccgccgccgaggtcaaccaccagatagggggcgggcagatcgtcgcgattgaccacggaagtggcaccgaggaagctcaggtcggcttcttcagtgccgggaatgacttcggggcgcacgccgaggatacgttcgatctcatcctcgaactcctcacggttttccgcgtcacgagtggcggaggtggcaacgaaacgcaggccgtcgatgggatgctcggcaatcacaccggcgaattcccgagcggccacataggcgcgttccaacgcttcgtcggcaaaacgatgggtcttgtccacatcctgaccaaggcggatcacacgcaggatgcgcggcaccacctcatgcatgccatcggcatcgacacgtgcgatcttcagtcgaatggagttcgtgccgcaatcaatgccggcgacggttacggattccttgctcattgccttctcctcgtatcccttagtgcgtatgaatgggctgttcgcggtggctcatctgttgatcaatcgtccagtgtgcaacggcagacggtcggatcgaactcgtctttgacgcgttccagcaccaaatcgccaatggggttgacgcccggccccataaccaaggactgggccagcagggcatgcaggcacttgacgcgcaccggcatgccgccggccgaagtgccttcaatatgctcctcgctgtcgccaagacggcctgccagttcgtgacggaatgccagatacagattatgggcctgctcatatgcggccttgagctcctcatcagcggccagcatatcgttgtattgctgcatcacgccggcggcctcgacgtgggaggcggccttgacggcttccggaccggtcagatagcacgtggtggggaaagggattccgccgggcaacaccggacgggtgattacggcaagtggcctaccgcagacgcatcgcgcccccacggcgaccatgccgcgcgggtatcggccgagctgacgctgcaccaggtcgatgtcatggtcgttggcgggctcggcaagcatggtgtcgacaagggccttggccttggcggcgatatcgatggtcactgttgggttccctcccctgtgttctgttgggtgttctgttgggtgttctgatcggatggggtgttctgttctgacttatcggactgcttggatgagtcgttggatgacgagtcagaggaaccggaagtatcggatttgccggactcgctatcggtcacaggctcatcggcctttttgagcgagtaagacagttcgctgtaccatggcaggacttttttgttgctggtattggaatcttccgttttctgggattcgcgatcggagccggtcacggcttcgggatgcagcacacgcacggcctgttcgccggggaatacgaagccgaggcgttcacgggcctgggcggtgatgtaggccttgtcatcccaacgcttgatatcgttctccaactcctgcttttgggcgatcagcgaggcttcctcacgcttgaggccattgagctcggccaggttcagggcataagtgtggaaggtggagaccagctggatggcgccgagtgcgatgatgaacagggagacgaagaacgctatgggccccgccgacccttttttcctgacttgtgctttgccggttttgccaggtttgccggtacgggacgacttgctcatgtcacatgaaaatacccgccgcattcgacttgacgaacacgacgggtatcgagcttcagtggaaactcacgcctttacgggcgtttcagctcacttggccaagtacttcttgcaggccttgaaggcgctgtagccggcgtactgagcggtggagccgagctcctcctcgatctcgagcaggcggttgtacttggcaacgcgctcgccacgggccggggcaccggtcttgatctggcgggtgttcttagcaacagccaggtcggagatggtggtgtccggggtctcgccggagcggtgggaaaccatggaggtgtagccgttggcggtggccagctcgatggcgtcgagggtctcggtgacggaaccgatctggttcagcttgaccagcagggagttggcggcgccgaggtcgatggccttctgcagacgagccgggttggtgaccagcaggtcgtcgccgacgaactgcagacgatcgccgaggcgagcggtgatggcagcccagtcttcccagccttcctcattgaacgggtcctcgatggagacgatcgggtactcgttgatgaggttctcgtagtagtcgagcatgtaggcggagtcgcgctcttcaccgtcgaagcggtacttgccggtctccttgttgtagaactcggaggaggcgacatccaggcagatgccgatctgcttgccaggctcgtagccggcggcggagatggcgtccatgatgtacttgagggagtcctcgttggacttcatcttcggggcgaagccaccctcgtcgccgaggccggtgttcaggccttccttcttcagaacgttcttcagggtgtggtaaacctcaacgccagcgcgcagagcctcggagtaggtgtcgaagccgtacggggagatcatgtactcctgaatgtcggtggcgaagtcagcgtgagcgccaccgttcatgatgttcatgttcgggaccggcaggatgtggccgttggtgccgccgatgtagcggtacagcggcaggccggcggactcggcggaagcgtacagagcagccagggagacacccaggatggcgttggcgcccagcttgcccttgttcggggtgccgtcgagctcgatcatcaggtcgtccagagcgcgctggtcagcagcgtccatgccgatgaccttcggagcgatgacctcgttcacggccttgaccgcgttaagaacgcctttgccgccgtagacggacttgtcgccatcgcgacgctcccaagcctcagcttcaccggtggaggcgccggacggaaccagacccttgccctgagcgccgtcttcggtctccaggtagacctcaacggtcgggttgccacgggaatccagaatctgacgcgcgtacacgctttcaattactgccacaactactccttaaaacggttgtgtatcttgaatgacattcttaagagtagtgcgatttgtggacgttgtgaacaacacgcccaaaatttagtgttagcgctcacaatgccgatgcgccgcctgattgcaaggcagtacggacgaaatcgctcagtcgacgtccttgccattgaggtagtcgatttcactgtcggacaatttcagttcgctggctttgaacgagtcctgaatctcctgcgggtttctggccgagggaatcgtgaacagatattggtattgcgcaagttcccacgcgagcgtgacgcgctggtaggagcagtcgtgggacttcgcgacttcgcggaaccggtcgaacagatgctcgttgaacgggtcaaggaatccaccgagcggcgaccagcagacgaaagccaaaccgagtttttcgcaggtctccaacgtgtgttcggggtcgcggtgaaccggggagaactggttctggacggccacgagacgatcgcccaaaatgttgtgggcggcttcgatgtccgcgttgtcgattctggagataccgaccgctttggccacaccttcgtccacgagctgcttgagtgcgcccatctggtcttcgtacggcacctgcggatcattgcagtgcgagtagagcagatcgagcgtatcgacaccgaggcggcgggctgattccttggcattggcgatcatggtttcgggtcgggcgtcggcctgccagccgtagttgccgttgccgtcaagcgtgcgcagccagccggttttggtggctacgagcacctgatctttggggccatgccacgagtgcagagcatcgcggaccagatattcgccatagcccatatcctccggttcgccggtgccgggtgcgctgggcagataataggaccaagccgtgtccaaataacggactccggcatcgagcgcggcatggatggtctcgatcgcctgatcacggttggaggggcgcccctcgatggcgagcgccattgtgcccatgccgaggcggggaatctcatagccggcaagtgttgccgcgtgttggtttttcatcgttgtggcctccatgccaagtcatcgaggagttggttagtccagaggactacctggtcggagctcatggggccttggcccagggagccggtgaacggggtggggacgatgagctggtgtgtgaccggacggtattgggtgcccttgtaaatacggcccatacgcatctggatggattcgggcgggtcgatacggccgatgcgcacgcggttggattgcgcgagaatctccgaaatgccgagcttgcgggccttgaacttcagacgggccacatcgaacaaggtctcgaattcgaccggcggcttgccgtaacggtcggtgagctcctcttccaaatccttcaaatcggcctcgttgcgggcggaggcgagcttgcggtacgcttccagacgcagcttgtccgaatcgatgtactcgatcggaatcgacgcttcgatgggcaggtcgatggacacggccaccggctcgacgttctcctcgggctccttgtacttctccacggcttcggacaccatgcgtacgtacaggtcgaagcccacgccctcgatatggccggactgctcgtcgcccagaaggttaccggtgccgcgcaattccaagtccttcatggccacatcgaaaccggagccgagcgccgtgttctgcgcgatggtggcgagccggtcatgggactgctcggtcatcggcttggacgggtcgtacaggaagtaagcgtacgcgcgctcgcggccgcgaccgacgcggccacgcagctgatggagctggctcaagccgaaacggtcggcatggtcgacgatcagcgtgttcgcgttggatatgtcaagacccgtctcgatgatcgtggtgcacacgagcacgtcgatgtcacgatgccagaagtcgcggatgatctggtcaagctgcttctcacccatcttgccgtgggcgatgccgacgtgcgcctcgggcaccagcgtgtggatcttgtcggcgatggacgagatatcctgcacacgattgtggacatagaacacctggccgcctcgcagcagttcgcggcgtacggctgcggtggcctgcgcatcctcgtaggcgcccacataggtcagcaccggcaaccggtcttcgggcggggtggcaagcgtggacatctcgcgaatgccggtcacggccatctccagcgtacgcgggataggcgtggcagacagggacagcacgtccacgttggtgcgcagggctttcagcgtctccttgtgttccacgccgaaacgctgctcctcatcgatgatgacgagccccagatccttgaacttgattttcgggttcagcagcttgtgcgtgccgatgaccacgtccaccgtgccggtttccagaccctcgatggtctcgttgatctctttggtggtctggaatcggctcatggccgccacattgaccgggaaaccctcgaatcgttcgctgaacgtctcgtaatgctgctggacaagcagcgtggtgggcacgagcacggccacctgcttgccgtcctgcacggccttgaaggcggcacgcagtgcgatttcggttttgccgaagcccacgtcgccgcagatgaggcggtccatcggcacgggcttctccatgtcggatttgacctcgtcgatggtggtgagctggtcgacggtttcctgataggggaaggcatcttccagttccttctgccatggggtgtccgggctgaacgcgaagcccctggcgcgctggcgggcggagtacagcttgatcaggtcgtcggcgatctcgtggacgtgtttgcgggccttggccttggtggccgcccagtcggagccgccgagcttgttgagcttgggggcttcggcaccgatgtatttgctgacctggtcgagctggtcggtggggatgaacagtttgtccgccggggcgccgcgcttggaaggcgcatattcgatgaccaggtattcgcgagtggttttgttggcgccggtgccgatggtgcgctggcgcatttcgatgaaccggccaatgccgtgctgctcgtgcaccacgtaatcgccttttttgagttccaccaagtcgatggccttgcgccggcgtttcggcgttttggccacggccacggccgaagtgcggccggtcaggtcgcgttcggtgagcagggcgattttggcggctttgtccacgaagccgtcgatggcctgagagcggatgacgtcgaaattggcgatgccggtagtgttgatcgcgcgcctgagcctggccaaggtgccggccgcagcggcggtgatggtgacgtggaagccggcgtcgagcaggccttcgatgccttgggaggccttggcctcatcccctcggaattcggccgggttctgggcgtcgagctgcacatggccggtcagcgtggtgtccacgccgaaactggtgaggcgaatcaccggatgttcggagtattcgagggagctgatggtttccgcatagtcgaggaagctggctttgtcgaagctgatgggcgcgccggcgccgtggccggaagcggccacatgccagctggcggccaggaactcgttcgcggtttttgccaagtcttcggcggaacggcgcagtttctccgggtcgctcaggaggatcacggcgtgcttgggcagcatggagcccaccggttccagatggtccacgagcgcgggcatcagggattccatgccttcgaccggaatggcgttggcgatggattcgagcatgtcctcagcattgggaatcgaaccgaccaaggctttggcgcgggcgcgcacggcgtcggtcagctgcagttcacggcatgcggtggcccagatggtcttgaggccgtcgccgtaggtacgctggtcggaggcgtggaattccttgatggtgtcaatttcgtcgccgaagaattcgatacgcaccgggtgcggtgcggtgggcgggaacacgtcgaggatgcctccgcgcaccgcgaactcgccacggtccatgaccaggtccacgcgcgtgtaggcgttttcgatcagacgtttggcggcttcgtcgaggggcaggtcctcccccacggtgaacacgagcggctcgacgtcgcccagtccttggacgaccggctggatgagcgagcggatcggcatgacgagaatgcgaatcgggccgaacatcggatcggtatcgctcggatgcttgagtctgcggaacacggccatgcggctggccacggtgtccgcgcgcgggctcagacgctcgtgcggcagggtttcccaggcttcgagctgggcgatgtcgtccgggtcgccgtcataccaggagcgcagcgagcccacggtctcttcggcttcgcggccggaggccacgaccagcacgaccggcttgccgggtttgccggtcacaccctgcccgatggcggcggccaaagccgggcgcaagccttcggaaacaccggccagaacggaattgtcgatgtcgtccgaaacctcgatgtcaccagtggcgagtctaaggaaggtcttgtcctgttccagctcagacaggatgcctaccagtgagccgttgatcaggtccgggtgcgtcgcctcaccggccattgaacttctcctgggtcttggcaagaccgcggaagatgatgtcctcggcggcgtcggcgccgtcagccaggaattcgggcagctgcttgcgctggtccggaccgaatccgcccagcacccagttcaccgtgttgtcatgcgcgttcgcaccgcgcttggagtgaccgacgcccatgcgcacacgcgcgtatttcggcgtgccgagggaacggtcaatcgacttgatgccgttgtggccccctgcggagccgcctgccttgaccttgatacgaccgaattccaagtccatgtcatcgtgaatcaccacgatatggtcgggctcgatctggtaataggcgctaatggaagccaccgcattgccggaatcattcatataagtcagcggcttggccagaaagaacttgacggtgcggccgtccaggttcatcacgcttttaccgagcatggccagacctttgtggtcggcgaagttcaccgtccaacgttcggcgagcacgtcggcggtcatgaagcccatgttgtgccgcgtgtcctcatattttttgccggggttgcccagtcccgcaatcagccagaaatccgatgccataatccactcctcgtccgtcttcctatattcccgtatgcacgttctgtacgttccgtacgtcatgcgcgcgttcgcctcgcgcactggcccatgcccggccggattcaaccgtcaagattgtactcaacgccgccgtcaagccttggaatcggcaagcagcagggcacggcattgctcggcatccatcgatcggaccgatgaatggtgaaacgcttcgacgtcacgagtcacgatgacgtcggcgtcattgtcctcggcaacggcacggatgagcccgtcctcgaagtcgggctcatcggaccggtacgacatacacgcatggcgttccataagtggacggatgtcgaacaattccatcagtccaccgatatcgtctcgcgccgcccgctcctcgccataatgcttgcgcaacacgcaatacacgtcattcaatgacgataccggcgccatgatctcaatgtttggctgtgcaacggcttccatgagcaaatcaacacattgtttatggaaaggcgctcgtttgtcattgcacaaatcgagcagaatattcgtgtcaaacagcagtttcatcccgtcccccaaatcgttccatacgtgcctgcgcgagaatctcctcatccgaaagatcgccttccgcctccggcaaattccggtcggcgaaacgttgaatcaactcctgctttttcctacgctcccgctcctgaatcagggagagcgtcagacgctcgaattccggcagttcccccgtatccgcaaggtagtcggtcagatcacgaatcaggtccgaataggtgcgcccattacgcttaagcactttctccgcgtcgcgcttccgttcggcattgacgcgcgccgtcaccatggccatagtcatatcgcacctccttgtaataccagtattacaagagatggggacgagtgaatcgcgtctattaggcggtgccgccagcgaccttttcgcgctgtttgccgttgaggtaccagtaggccagcgccacgaacagggccgccgaggatattgccgagcgtggctgcggacaggttatagaggatgcccgacacgtcgagcgccgcgacgcccgccgcgtcggcgccgaaaccaaacgttttggcgaccaggcccatcggcaggaagaacatgttggccacgcagtgttcgaagcccatcgccacgaatccggcgatcggcagcaggatgcccagcaccttgtcggatacggagcgcgcggcgaatccgatgcgcacggccaggcagacgagcacgttgcacaggatgccgcacacgaacagcgtgtcccagcttggcgtcactttaacatcaactccggttggaaaaaatctcagtatgtagcattcggttctcaaataggagaaacatgcagcggcaatcaacaacttgtcgtttacgacgccaagcaagggaaacagctcagacagatgacgcttccctgcaatcggatgacatattgcgggacggcagcggattttgggcgtttttggcgtggcatcccgcaagcgttatcgcacgttatctgcaccgaatcataagaatggcagaattccaatgatttcgcaggaagagttgcgggacgcgagctatgtgcatcgtttgacgtgtgtggcatcccacgtgattgcgggataccacgtcaaaacggacgaaaatcgcgtgccgtcccgtagtttgccgttatctgggataagcgcgtccgatatatggcgttcgaggaaaagagcagatccgatacaactttttagtgttataggacaccggaatccatggagagcaagggtaaaccgcctcgggcctacaggtccaaataccagtaggacatgtcccgcatggtgccggtggagtcggtggcagcggcgggcatgagtccgaattgggtgaagccgaagcggtgcatgagggcaatggagccggcgttatcggcgaaaatgatgccacaggccttgcgcatgtggcgggcccgcgcctcggcgagcagcctgtcaagcatgaacgtgcccactcccctgccttgccatgccggatcgatgtaataggccaaatcggtgacaccgtcatatcccgcgcggtcatagaacacggagagcgcaccgaagccgatgattgaaccgtcttccgattccacaacaaaaacgccgtagggcggcgtatgggattcgacccaggcgcggcgttggtcgagggtgcgcggggtgaggtcggcggtcgcaccgccggccatcactgaggcgttgtagatgtcggtgatggcttggatgtcggattcgacggccggacggaaggtgtatggcatgaggttcctttgaatacgcaaatagcccgtccttatgataaggacgggctatgtcagttgaggtaaccaactcccttcagtcgccttctgcgatagctcccctcaccctgaggggagccggaactacttgtcgagctcgatggccttgttgagggcgtcttcaagctcctgctgcgccttgccgtaggcggtccagtcgccgttcttcatggcggactggctgtccttcatggcttgggcggcatcgttcaacgcctgctggagttcggggctgcggtcggaagacgagccggaatccgactttccgtccgtggtgccggactgaccaccattggtatcggaaccagattggtcaccggacacgttctcggcatcgcccgcggccgcaccggaattgccaccgaacacctgatccaaggcctcatccaacgtatccgcgaatccaacctgatcaccgaatgcgaccagcgtcttcttgagcaacgggaatgaggtcacgcccgaagacttgacgtacacgggctgcacgtacaccagtccgccaccgagcggcagggtgagcaggttgccgcgcaccacttgcgtgtcgccggattgcagcaggttcagttccttggatacatcggcgttggcgttgaagttgttctgcgcctggccggggcccggtacgttcgaatccttgggcagctcctgcaatcggatggtgccgtagttcgagcctatcttgcccttctcattgccggcatccgagtcgaccgacaggaagccggtcaggatctcacgggtggactggccagccggaatgtaggtggaggtcagcgagaacaccggttcctcggtgccaccggtctgcaaggtcaggtagtacggcggctgcaggatgtcctggtcctgctgggactgggattcggtcggatcgaccggcgtctgccagaagtcttcgcctgagtagtactggctggcagaggtcacgtggtacttggagagcagctcgcgctgtaccttgaacaggctttccgggtagcgcatgtggctcatcaggtcgccggagatatcggagagctggtggtactggccagggaagatcttctcccatgccttgatcaccggatcggattgatcccacacgtacaggtccacggaaccgtcgtaggcgtccacggtggccttgaccgagttgcggatgtagttggccttctgagagcccagggacgagaccgttgcggaagagacggtggtggaatccttggtggcggagccgaggtcggttatttgcgagtacgggtaggcgtcggaggtggtgtagccgtcgacgatccacttgacgcggccatcgaccacggccggatacacgcggccgtcaagcgtcaggtacggtgccaccttggccacgcgctccttgggggaacgatcgtagagaatctgcgattcgctggtcacacggtcggagaagagaatctgatcggagccgaagcggatcgcgtagagaatcctggagaacaggttgccgaccgaagggccgccgtcgcccttgaacgtggtcagagcaccttccgaaccggtcgggtagtcgaactcccaagcctgcgtgccttcaggggcaccgacaatcgagtattcggtggtgttcggcgagaagtagatgcgaggctcgtacttttcggattcggtgagcttgccctgggtggggatgccggattcgaagaattcgggctggccgtcggcggtcaccttgttgccgtaggcggccaccacgccgtaaccgtgggtgtacacggtgtggtcattgacccagttgcggttgtcattgccggccagatcgagctcgcgggcggcaatcacggtgtcctgggagacgccgtcaatctcgtacttgtcgaccgccagggtgtcggcgaaggtgtagtactgcttggactgctgcaactgtttgaacgtggggctgacgacctgcgggtcgagcagacggatctgcgcggtggtgtcggcctccttggccagagcgccctgctcacccttgtcggtcaccttgtattgctcggtcttgagcttgtcaagaccgtaggcggcgcgggtggcgtcgatgttgcgctggatgtaggtggattccatctcctgtgcgttcgggttgacgcggaagcgttgcaacagcaccggccatgccacggtgagtacaagacccaccacgaccacgacggcaatggaggtcaccggcacacgccaggccttgagcgcggcggaagcgcgcacgccgatggacgcctggccttcgagcgtgtgggagcgcatgagccagatgcccagcaccacgccgaggatggcggtcagcacggccatgatgaaggtgacggggatgttggcatgtacggcggtgtaggaggcaccggtgatgcgtgaaccctgcacggtgagctggtcgaagacgccaatcatctggcgcactgcccaagcgaacatgttgagcatcagccagatgccaagctggcgacggcaacgcttggtaatggagaacaggccgcgtccgttaaccggcatggtaatgcggataccgcccatcagcacatgcgtgaccacggaaaacacaaggcccacgcccagcagcatggccacggcggcgagcacgagcttcaggcccggcagcacgaacacgtagaagccgttgtccagaccgaactgcggatcggtggtgccgaacgactgcgcgttgaacatgagcagaatctcgctccagttcgcgttaaactgggaaccgaagatgacgccgacgatcagcgaaatcaccacggccacgcggcgagcggttttcgagctgacggatttgccgacctcgaccacatcgccgttaatgcgaatggtggaaccgtcggccgaatcagggcgtgctcgaatggccagccaggcggaaacgaagccggtcagggccatgagcagcgcgtaggccacccacagaccgattttcaccccgagctgggtccagaccacggactggaagccgagctggccgtaccacatcagatcggtgatgaatcgggacaggccgaagaacagaccgacgatgatggccaaggccagcaccacgccgatcagaatcttgctgccacggctggctcctgagccaccggacgctggcttacgggtgatacgcggattggccggaccacgtggagggcgggatgacccggaggggccagcgttggtgttgtgggccggaccgtccccatcggcctcgacatcgaggatgatcggatcgtcattgttcgcattgttgcgtcgtgaatcgccgccattgccgaacagtactgagaaaggatcgttaaaagacataactcaagcctatcgaaagggcgggaggtcggttatgccctgagcacagaatgaggcaacatcctgttctacgctctgttctacgcttgccggtatggacagacaacggccacaacatatgcgtccctcagcacacgccacacgccaacttcggcacaggagcattccaatcgtggcggcaatatgtgctttggcggtggtgttggccggtgtggcagtctacggatggcatgtcggatggttcgccaaatccacatcaaacggcaacaccaccactccccagacctcccagacgagtgcgttaccgcgcaccgacgttccttccccgaagaagaacgacgatccggcggcacaagcccaacgtgcggtatccgccatgacgcttgaggaacgtgtgggacagttagtgatggtgccgttgttcgccggttccgaaccctcctcgttggcttcaacaatcgccgacgagcacattggctcggccattctcattggcaattggaataccggcgtcgatacggtcaagaccgcgaccgcgcaactccaaggatatgcgccggccggcaatcgtctcatcatcgccaccgatcaggagggtggtcaggtacagcatctgactggtaccggtttcgatacaatgcccagtgccgttgagcagggcacaatgtccgctgacgcattgcgtcaatcggcaggcacgtggggttcgcaattagccactgctggcataaatgtcgatttggcaccggtgcttggcacagtggttggcaatcgtgcctcaaatgctccgattggcgcgctggatcgtgatttcggattggatgcggccggcaacgccgaacatggcatcgccgttattgaaggtttgcgagacgctcaagtcggtgcggcggtcaaacattatcctgggttgggcgcggtaagcggcaataccgacttcaccaccgaaggcattctggatacgaccaccacgttggacggggccgaggcaggtgcctttgaccaggcgattaccaaggccgatcctgcaatggtgatgatgtcgttagccacgtatcaatccatcgacccgaataatccggcggtgttttcttctacgattatcgacggtcatattcgcaacgtcctgaagtacacgggcgtggtgatttcggattcgatgtctgccgaagcgttgagcagctacgatgtaagccaattgggagtaaatcttgtcgaggcgggcggcgacatgtcctgcatcggtcagacggattatgtaaagtcaattgtggacggcctcaacgaacgggcgaagtccgatccggctttcgcttcgaaggtgacggcggcggcgactcgcgtaatgacattgaaaatcaagatgggactggcctgaccgttcatccttgcactggcgaggattgatgcgcgctgattcgcgctaatcctcaccagccctcgtacaaatgcacactagtcctcgtacgaatcgtcagtcctcgtacgaatacagaccatgcttgccgatgtattgcaccacaccgtcgggcaccagataccagaccggctcgtcgtgttcggcgcggcggcgtacatcggtcgaggagatggccaaggccgggatctcaagcgtatcgaccttgccttcgggcaaggtcacgccgtccgggctggagtagccggggcgcgtgacggccacgaagtgagcgaggtcccacatgaggtcggcgtccttccactgcatgatttcggccacggcgtctgcgccggtgatgaagaacagctcggcgtcgggatgttgggcgcggatatcgcgcagagtgtcgatggtgtaggtgacgcccggacggtcgatgtcgacacgcgagacggtgaatttggggttggatgcggtggcgatcacagtcatcagataccgatcctcggcgttggtgacgtgcttgtccagcttgaacacaggtcggccggtgggcacgaaaatcacctcatcgaggtcatacacccaggcgacttcagaggcggcgaccaagtggccgttgtggatcgggtcgaacgtgccgcccatgatgccgacgcgcaggcgtgtatgccagttgccgcgtgcggaaagcctgcctttgccgtggctgctggccccggccggtacggacaggtcggacatgcgccgttcggtttcgccttgggtgacggcaatgatttcggcgggctcggcggattccactgttttttcggactgaactgacgcagccgttttgtggctgccggtaacaccactcatgcctggccgccctcgccggcggcgtcatcggctgattcggtttcctcttcgatttcgccggcggagggattgtcttccttgggatcgatcttgcccatgtcttcatcccattcgtcttggaccacgcgacgaatctcggcgaaggtgggcagcgggaagtccggctggtagaggcggcggacctcggccacgcgctcggtgatgcggatgagcgtgtcggtcatgccgtcgaggtcgccgtcgtgctccatctggctgtatttgccgatgtagccttccatgagttccatgtgttcgcgcacgatcttgagctgggcatcgttgaggtccacgacttcgggtgaatcggtctcgggccagccgatgagcacggcgtccgcgtattcgagcgacgcacgctgggcggcggaggcgatgccgtcctcaatctgcacgaggaacacatagcggacgatgctgagccgttcggccgcgatcttcaggccgagcttgggatcgttgaggtcgatgtcgggccgcagttcacttgccttgtttgccgtgtcagccgtagtgttcatgttgccgtcctcgttcatgcgcgcacctggcctgttccgtaaccgatccacttggtggtggtcatctcccgcaatcccatgggaccgcgtgcgtgcatcttctgcgtagaaatgccaagctcagcaccaaagccaaacacgccgccatcggtgaagcgagtggaggcgttgaccatgaccacggccgagtcgatgcgcttggcgaattcctcgatggccgcataatcctcggcgatgatggattcggtgtggcccgtggaatgcgtgttgatgtggtcgatggccgcgcccagatccggcaccaccttgatgcccatcttgagggccagatattcagtgtcccaatcctcctcggtggcgcggttgaggtcaaggccctcgatcgccgcgccggagatgatgtcatacgacgtggtgtcagcctgcagtacaacgttcgcctcggccaacgcggcggcgatctgcggcaggaattcggcggcgacatccttatgaaccaatagcttctcggcggcgttgcacacgcccacgcgctgggttttggcgttgatgatgatcaggatggccttggcgagatcaccggacttgtcgatgtagatatgcacgttgccggcaccggtttcgatgaccggcactttggagttgcgcacgacggcttggatcagacccgctcctcctcgcggcacgagcacgtcgatatggcctcgcgcctccatcatggcggtggctccggcgcgtccatactggtcgacggattgcaccagtgcggattcgaaaccgtgtgcttcaagcaccggggcgatgacgcccagcgtggcagcattggtgcgttcggcggcgtgaccgcctcgcagcaacgcggcattgccagatttaaggcacaggctggccacgtccacagtgacgttcggccgggcctcataaatcatgccgatgacgcccatcggtacgcgcgtctgggtaaggcgcagaccgttgggcagattgtatccgcgcacgatttcgccgaccggatcaggcaaggtggccacatgacgcacgccttgggcggcggcggccacgcgcggcacgtcgaacagcaggcggtcaagcttgcccgcatccatgccgttttccttggattcgagcatgtccagcgcgttggcggcttcgatgtccgcggcgtgcccgtccaacgcatccgcaatggcgagcagcagttcgtttttggcttcggtatttgcctgtgcaagacgctcctgcgcgcgtgcggcctgatcggcctggcggcacaccgcgtcgaacacctcaggactcaattcatcgctcataacagtcaagcgtaactcacaacgcggctgattgcttactccgacccgcttgttatgggatgtctgacattttgaatcgcaaacagaaccggctcccctccgtctcaggcgggaagccggtgacgtgatgcgctccggtcagcgaatcatcactaaccggtacaccacggtggattagtgaatcagcaaatcagtggatctggtccaggtcggggtagagcgggaagtcttcggcgagcttgtcgacgcgagccttcagcgcggtcacgtcggcggacggtccggcggcgagcgcggtgccgatgatgtcagccacctcctcgtattccttcggcccgaagccgcgggtggccagggcggacgtgccgattctcaggcccgaggccaccgaggccgggcgcgggtcgaagggcacggtgttgcggttgatggtgatgccgcaggcggcgagcagatcctcgccctgctggccgtccatctcgctgttgcgcaggtcgaccatcaccaggtgcacgtcagtgccgccggtcagcacgctgatgccgttggccttgacgtcatcggccagtagtcgttcggcaaggatcttggcgccgtcgagcgtgcgctgcatacggtccttgaattcgggggtgccggccaccttgaagctcacggccttgcccgcgatcacatgcatgagcggaccgccctgctggccggggaacacggaggagttgagcttcttggcgtattcctgcttggcgaggatgaagccggagcgcgggccgccgaaggtcttgtgcgcggtggaagagaccacgtcggcgtacggcacaggactcgggtgcaggcccgcggctacgagtccggcgaagtgggccatgtcgacccagaatttggcgccgacctcgtcggcgatctccttcatggccttgaagtcctcgatgcgcgggtaggcggaccaaccgccgatgatcatggccgggtgggtttcgagcgcacgctggcggatgatttccgggtcgatgcggaaggtctcggggttcacgccataagcctcggcatggtagaagcggccggagaagtttattttcatgccgtgggtcaggtggccgccgtggtcgagggccaggccgagcacggtgtcgccgggcttgacgagcgcctggtagacggcggcgttggcttgggcaccggagtgcggctggacgttggcgtattcggcgccgaacagggccttggcgcgttcgcgggcgatggtttcgacttggtccacgtattcgcagccgccatagtagcggcggccggggtagccttcggcgtatttgttggtcagcacggagccctggcattgcagtaccgctcgcggcacgaagttctcagaggcgatcatctcaaggccattgcgctggcggcccagttcggagtccagcagttcggcgatctcaggatcggtttcgcagatcggcgcgttgaaagcatcggtcgctttctgcgcaaggggtgaagcggtcatgggtgctcctttggtatgggcgacaattgattcgccgttgccgccttactgtatggccggtttgtagccggcctgtttcatgatatggccggtccccgttcgatggcaatggtgattttcgccggtttgaccggtcggctatgcgagacggacggcccttctgcccacggcccacgctaaactggtgtggattcatcatccctttcaggcagaaggattcatcgtgacaaccaccttccattccacccgcagcaccaccgattcgctgaccgccaagcaggcgattcgtaagggcatcgccaatgacggcggcctgttcgtttcggacgcgttgggcaagaccaaggtggacgtggcctccctgccgggcaagtcgtaccagcagatcgccgccgaggtgctgggcgcgctgctgccggacttcacggccgaggagctgggccagtgcatcgccgacgcctacggcgaacagtggtccgatgagcgcatcaccccactcaagcccctgggggacgattacgtgctcgaactgttcaacggtccgacttccgcgttcaaggacgtggcgctgcagatcctgccgcgcttcatggcgcacaccacgccggccgatggcgacgcggacgagaagatcatgatcctcaccgccacctccggcgacaccggcaaggccgcgctggccggcttcgcggacgccccaggcaccgcgatcaccgtcttctacccggaaggcaaggtctcccaggtccaggaactgcagatgaccacgcaggccggctccaacgtgcaggtggccgccgtggaaggcaacttcgacgacgcccagtccgcggtcaagcgcatcttcggcgaccgtgccctggccgagcgtctcgccggcaattcgcacgtggtgctttcctccgccaactccatcaacgtgggccgtctggtgccgcaggtcgtctactacttctccgcttacgcccagctgctcgccgaccaggtgatcaacgtcggcgatgaggtcgagttcgtggtcccgaccggcaacttcggcgatatcctcgccggctactatgccaagctgctcggtctgccggtcaagcacctcgtggtggcttccgacaagaacaacgtgctgttcgacttcctgaccaccggtacctacaaccgccagcgcccgttcttccagaccatctccccctcgatggacatcctcatctcctccaacctggagcgcatgctgtactacttgtccgagggcgacacccgtctgatctccatgctgatgaacgacctcaacaagtggggcacgtacgagatcccggaagaactgctggccaagattcgtcagatcttcggcaccggttgggccgatgaggatcaggtacgcgagtccatcaagcactgctgggacgagaaccgctacgtgatcgatccgcacaccgcctgcggctactacctgcttgagcagatgccgcgagacccgctgaccccgcgcgtgctgctctccaccgccagcccctacaagttcccgcgcgtggtgaacgaggcattgggcttcgacgccaccggcaccgacttcgagtgcatggatgtgctggcccacgagaccggcaccaccgccccggccgccctgcgtggtcttgagaccgccgacgtgcggttcaaggacgtcgtggccatcgacgacatggaggactacgtggagaaggccgcccaggcgctgtaaaacataccagcacattggctcccctcagagcggggagccattttttacatcagaattgcgtttacatcagtatcgcggcgactggcagtcctatggcgattgccaacagcacgatagtgccgatgatcacgctggggcgtgcgaggttgacggtccagccgacgccgaaacgtttggggatcatgatggcaggatcgtcacggttgatgtagatgatgccgccaatccagtgcaggtcatcgtcatacggcatggcattatcgtccgaaatgtcaccgccgtcactgtgccgaacaccggcatagacgcgcgccccgttctgcccgtaatacacgccgatcatcagcgcgccgaccagagccgccacggcgatgaacatgccgatgatgccgattagattgatatccagcacgccaatggtgacaagctgaacgcctaggcccaatccaccggctgccagcagtccgatgaccagcacgtagatgctccagacccgcgagaacacaccataggcatacccggtggcggcggggtggtcgggatcaatcgggtgcttggcgtagatgatcgcggcatggctggccaccatcaccgctgccagcaccacctgcgcgagcacggcgtaccaaatcaccatcggactcttctcggcccaaccgttcacattgccggcgatatccgcatgaatcggcacccgctccggcatccggtcatagcccagcaacccgacagcaatggtgacagcgagacaaacgacttgcagcaattcccacttcaagctcatcgggtcgggattgtcccgctcacctatcaatgctgcacggcgggcactggacgcctcccatccctgatcgactttgatggatagtactttgcggcgaaacatctgctgcagcacgaaaccacatatcgcaatcgccaccgctgcgatggacacagtccagaacgccgcgtcgactccgcagagttgccaaacggccagcgagaccagtatggcgcatacgccaagcgccaccgtaattcccgaaaacgcgactttaaatccgcgaatgcgcgtattgacatgggcggcggccggcactgtgacaccgaacacctcatgccggtcggtaacccatggaacccctgccaggccggcggtcactatcaccggcaacagtaaaaacgcacacaacgcgatgttcatcgacacgactgtattattcatcgttatctcccctgatttccttttgttgcaccgtcagtaacgctctgcgaggagcgcacgccgtatgcccgttcgcattgccgtttggtggcatcgaggaatgcggccgaatcaccgccgcgcgccctgtaggccaaggcaaggcgatagagttcctcgcccatccgctcatcctgtgcttcggcagttcggttcggtgcttctcccccgccgtcatgctcggcgacggttgcaccggcaccacgacgcataacgatgtatccctcgtcacgcaacagcgcataggccttgttcaccgtgtgcaggttgatgccaaggtccacggccagcgagcgcacggacggtaacgagtcacctggcgacagctcatcgcccgcgatggctgcgatgagctgcctgtgcagctgctcgtaaatcggcacgtcactgcgctgatcgatttccacaatcacggtcaattccacccctctcaagaactgttctatttgttctacatcaaatataacagttttgccgtatgagtcaagatatgcgaatctcggttgaacatccggcaatgggccaacggcgtgttgcttgaattttctaggaaggcgggaatcgccatgctgccggcgaatgggaaaatccatgtggcttgtcagattctgttcctgcaactgaatagtcccatgagggagtagacagcattgcggcgaagggctcggcccaaaccgcaataaagcgtgccgagcgccaaagccgccaacaccggtatgacgccgctgcaggagaagctcgcgaagctggacgaacttcatgggcggcaccgccgaacagcagtcgaccattctgttcacgctgttcgtggtattccagctgttcagcagtcgaccattctgttcacgctgttcgtagtattccagctgttcaacgccttcaacagccgcgagctgggcaacgccagcctgttcgccaatctgctacgcaataaggtgatgatcggcgtgttcgcgctgatgttcgcacttcaggtgctggtggtgcagttcggcggagcgatgttccgcaccgtgccgctgccgatcgacatgtggctgaagatcatcgcggtcggacaaatgcgcggctagagttctttggctcggtagatgcggatggctataagcatggagccaaaatatgcgagcagacacaacacggcgagaacaagcgccgtatgccaccagatcgtcaggaaatcggtaatattcagcaaaagccattgccagtcaacaggcaatcgggccagcagcgcaatgacggcatacaagccaaccaggaccacgccagaggccaccatcatcttgcggaaggtgaaccggtatgcacaggccagcagcaccgacccaagaatgatagccaaagcgaagatgaaagcacctgctgccaaggtaccgatccaccccatatctgctatatcgccaaagacaatgaagacgccgccgcatatcaccacgtccaaagcccagagcaggccaaccaccaacagaaaaaggtaccgacctacaacttgtgcagtgcgtgaaacaggaatcagccctcgcatggcactgtgccctgcagattcctcggatgacgcaggccccaatgcactcatacatgccatcgccgatgccaaacctccgagtccgcccatcagaccactaacaacgtgttcatcgacgtgggtcgatatcatcaccagcgataccacgatagacagcaccgggaaaaccagcagaaataccatattcgccacgctgaacagacccgtcccgacacaatcgaatcgacattgctttactacggatttccagctcatcgtcaccattcccttgaagcaaatatgcgagaggcaattacatacgagattccatatgccacaaccgtcgttgccaataccgcaataaccagccacaatcgttgcgcgatgatggcattcgcggcatgggccaatcctttggtcaccgaagcaggcaaaatagatagcagtatgaatccagccaatacaacgacataaatcaccatcatcgtgacttgaagaccgcctagtttggtccacagataacccgtgggcacgataagcgcgaccatcagcgcggtgcagaaacctcccaacggcgccgcccacagattgcccgcgaatgaccaatccggattgaccagcacttgcaacccgtcaatcagaacaatcatcgctatcgacaatacggaaatcaccaatccaaccacatatcgcgcggccacctgactcttcctcgaagccggaataatgccacgaagtcgatatccgttctgtaagtcagcaaccgccatggttagcacccacatggcgcaggtgaataccgtcatgatgacacccatgcgatagccgaagccatcaccataagcttcaccttgaaagatgacggagaacaacggtgccaacaacaacgagaacacagtccgttcgccgacgcacaggtaggccatatcgacgcgcaatgcagtggccaatgcatgttgccgagaccgcgacaccctcagtattgcctccatggccgctcacctcccgctcaagtcacgattggaatcatgggcattggtcagtcgaatgatgtcatcaatggaagccgattcaacgacaagccccgaaaccaccgacgcaacagcatcaagcctgtctgaccggaccagcgcatcgaatccggtggcatacgtatgtgagcccagcaccacgtccgcaggcagttgtgccagttcgtctggaccgcccttaatcaggcggaacgattcctcaaactcgtctttcggaccggtgtagtagagacggccatcggtgatgtaggtaatgaagtcagcagcacgttcgaggtcggcagtgatatgggtgctgaacagtaccgaatgttcgccatcctcaatgtaggcatgcaggatatccatgagttcgtcgcgggcaagcacatcgagtccgctggtcggctcgtcgagaatcagcagtttggcgtcatggctcaatgcgatggcgagcatcagcttcatctgcatgccgcgggaaagatccttgatatgtttcttgccgttctgtgcgtcaccaaggccaaaagtatccagatacttgcgatagcatccaccgtcccatgatggatacagtggcgcgacaatacgttcaatgttcttgacttgccactgttcatgcatgtagctgaagtcgaacaccacgccgagttgttctttgacgggctcctcgttggcgatgttgtcgaggccgagcacgtgaatcgaaccggcgtcgcggtggatcatgttgaggatgagtttgatgagggtggatttgccggcgccgttcgggccgatcagtcccatgatgtagcccttgggcaggtcgaaggtcacgtcgtccagcgtgaagccggaatcatagtgtttggtgacgtcggtgacctgcaacgccatcgcgtcggattcggatatggcggtcatggccatggtcctttcttgaggttatttcttgcggtattcctcttcgagcatgcggtccaatgcgtccagcggaatgccggcggctttggcgccccggcttgcctcggccaggctttcgcgaatctgggttttgagctgacgttgcatcagttcgttgcccttgtccatcacgaaagtgcctttgccttggatgttctgcaccacgccctcatcggccagttcgttgtacgccctggtgacggtgag

SEQ ID NO: 1091 - DNA, 12506 bp, Unknown
  R13_10m  MAG No. k141_10543
cacgccttccataatccaaccgaaaccgaccatcagggtgatgagtaatgccaaggtctgaccggtcataccgtagtttcgtacgactacgacgcctccgaaggtcagcagaatgccgacgaacacgtccagcacacgccaaccgcccggcagacccggctccacgagagcgctgacgatgcgcaccacgccggaaatcacgaaatacacgccgagcaacaatgcggccaaagccagcgtcttgttcggcaccaacaacagcgcagcgcccaaggcgatggcggccacgcccaccacgccgtaaatgatgcgaatcttggtcttggccttttccggcagccattcctcgatcaggcggaatggactgaaattgccgacataccagttggtctgctgccagccaggttgactttgatcgccccatggaccattcggctgcccgtccgcttggctattcgattggccgtccgcctgataccgccgaccgtccaggccccatgccggctggccgttcgggccgtagttcggattgtaggcgtacgggccgtagtacgggttctggttcggtccgccttgtggctggccgttctgcgcctgctgattctgagtgtcttgcgctccctgcgcaccttgcggaggatattggccgccatgattgctgtcatacgcgccatactgcggttggcccggttggcccgccggattcggctggctcggctggctctggttgggctggcccgtctggccattccactgaccctcgtttggattgctcatcgtaactccttaactcaaggtccatattcaggttccacataccatgttaggcaagttacctaatttgaaccatcactacagttaggcaatccgtctagttcactgacagcgcaatacccataacgcaatatctgcatcaccaacgcttctcccccgccgcgattaggcttagggccatgaccaacgaaaccgaaacgctgacgtcgggcatcgacccggcatcgttctcctccgtcatcaagccgaccaatgacctgttccgctacgtgaatggtccatggatcgacacctaccgcctacccgacgatcgttcgcgctacggctccttcgacaagctcgccgaagacgccgaaaaccaagtgcgcgacatcctcgacgccgacgactgcccggccaccaaatcgcaggctctgtatcattcgttcctgaacaccgacgccatcgaggccgccggccttgacccgatccgcgatgagcttgacctcatcgattccgccatcgacaaggccgctctcacgcgcgtactcggcaccatcaacccagccggcggccccgacctgttcggcttggccgtttacggcgaccccggcgacccggaccgcaatatcgcccaccttgagcaggccggcctttgcctgccggacgaagcctactatcgtgaggaccactacgtccccgtgcgcgaagcatacgtggcaatggtcgccacccagctggtgaacgccgggtacgcgcccgccgccgaatccaacggtggcgatgaactgccggccaacaccggcgatgacgagagcaatgctcccaccacggttcccagcgaagccgcacttgatatggcccgacacttccttgccgtggaaaccaagatcgccgccaatcattgggacaatgtggccacgcgcgattcggtgaagacctacaaccccaccgattacgccgatttggccgccacgctgaagaacttcgatctcggttcctggatcgacgcctggcagaccgcctatgacgccaccgaggccgccaaggctcagccgatcgatttcaagtctgtgttcgcgcgcgtcattgtgcacgagccgagcttcctcactggtcttgatgcgttctgggccgaggccgatctggccgaccttaagctgtgggcccgtgttcacatgattctgggcttcgcctcctccctgtctcgcgacttcgacaccaccaactttgacttctacggcaaggtgctctccggtgccaagaagcagcgcgatcgttggaagcgcgcggtgagcctggtcaacggcgtctgcggtgaagatgtgggccgcgagtatgtgcgcctgcacttccccgaaagctcgaaacgccgcatggaagagctggtcgccaatctgattgacgcctaccgcgtgtccatcgccaattccgattggctgggcgaagacaccaaggccaaggctctggagaagatctccaagttcacgccaaagatcggctacaccaaccactggcgcgattactcggcactgagtgtctccgcggatgcgctgcccgccgagaacgccaaggccgcgaacctgtacgagaccggctaccagctggccaaggtcggcaaggcggtcgacaaggacgaatggctgatgaatccgcagacggtgaacgcctactacgagccaagcatgaacgtcatcgtgttcccggccgcgattctgcagcccccgttcttcgacccgaaggccgaggatgcggcgaattatggtggcatcggcgcagtgatcggacacgagatcggccatggcttcgacgatcagggttcgcagtatgacggcgacggcaagctcaacaactggtggaccgacgaggatcgcaagaacttcgaggcccgcaccggcgcattgatcgcccagtacaacagctttgtgccgctgcagctggcagagaagtacgctgacgagtctgataaggcgccgcacgtgaacggcgcgctgaccatcggcgagaacatcggcgatttgggcggcgtgaacatcgcgctcaaggcgtatgcattcgcgctcggcaaggcggcaggtaagcccgacgccgaagaagacggctcccccgccgccatcaaggcactgctcgataccgcccccgaaatggacggattcaccggcctgcagcgcttcttcctgagctacgcctccatctggcgcaccaagaaccgcgacgagctggccgaacagtacctgcagatcgacccgcattctccggccgaattccgcaccaacggcatcgccagcaacgtggacctcttctacgatgcctttggcgtgaccgaaggcgacgccatgtggctcgcgcccaaggaccgtgtgagcatttggtaatccccgttatgtaagagaaaaccgctgtgcttgcctcgattacaggcgaacacagcggtttttcatgatgtatggttggcactcagaattcggattcgctgggatcggaagattcggcgaaaccgtcgacgtaggtttgttgggctgcggactgtggctgattagcgccagcgtccggttgcgacatgacggcatcggccatggacgcagccgctgactcggttgatggcgacggcgattggccggaatcggaggtgaccccaaattcgacggggccagattccgacgaggtcgcatacgggtccatacccacaccggatgcggcaccgcccgcgccatattgcattggcctaacgtacggcgacgatgctcgttgcccgtttccgccatccatgccttcggcggcaccgttggcattgccgttaccgttgccaccattgcctccgttaccattaccggcacgctgtggcttgatcagcgacgtggtgccgaaggtcaggtcatgcccaatgttggtagcttcgagaacagttctgctgcgcggttcgccttgctcattggtccactgctcggtgatgagtgagccgaccacaatgatgcggtcaccgcggcgaaccgaactggcggcgttcacggccaaagcacggaacgctttgacgcccacccatgcggttccgtaatcctcccattgtctggtagtcgggttgagtcgactgcgggtgctgcccatacggaatgtcagcacgcggaaactctcagttccgcctagtgtcggatcaccggccacaaagccggtgacggtcactgctgcttgttgatttgccatgatcggtcctttcctcggcctgctggcctgttgtttggatgtggaccgccggagcctgtctccggcttcattgccggcttgcacgccccagcggtacctccactgtgaggcatgacgtttgaagtgcacaagggcaactggcaaatgtggatactgtgacgcagttgaaattttaagaatgtggataagtttcggttatccacaacaaagcgccattctgcgactgggcagaatggcgcttgatgcgattaacgccgaggctgagtaagtgggactcagctgagggcggcgaagcgctcggcgagcgcgtcggcggcttcggcggcgggcacggcgaccttgttttcgccgttgcggtcgcgcagttcgatggtgccgtcgttgacgtaatcgcggccgaccacggcgaccagcggcacgccgatcagctcggcatccttgaacttgacgcccggagacaccttcttgcggtcatcgtaaataacctcaaggcccttggcctcaagctcggcgaccagcttctcggcaccttcaaacgccacggcgtccttgccggtggccaccacgtgcacggcagccggggcaatcacggacggccaagccaagccggcttcgtcgtggtgtgtttcggcgatgcaggccagcacgcgggaaacaccgatgccatagcagcccatccacaccggcacggccttgccgttctggtcgagcaccttcaggtccagtgccttggagtacttgagacccagctggaacacctggccgatttccacaccacgctcgaagctcaacggaccggaaccgtccgggctcatgtcgccgtggcgaacctcaacggcttccaccacgccgtcggccttgaagtcacggccgtacaccaggttgtagtagtcgacctcgttctcatcggcaccagtgaaccaagcggaacccttgaccacgtgcgcgtcgaccaggtagcgaaccgggttcttcacgccagcagcctcggcctgcgggccaagcaccatcggtccgatgtagcctggcaccagttcggggtgctgcttcaggtcttcttcagtggcctcctcaagctcggcgggagcgaactgggcttccagtcgcttcatatccaccgtacggtcgccgggcacgccgacgacaatcacttcacgccacggctcgtcatgctcttcatcctcagggtgcttgacggtaatcaccacgttcttgaggatgtcggaagcctgccattcacggccatcagtacgcgggtggtcggcgttggcacgctcaatcatgttatcgatggtcttggcatccggggtggcttccttggaagcggcgggagtggcggaagcatcgatttccggcagctccggagtgctcagggcctccacattccatgccttgccggaaggcgccagcgcgaaggtatcttcgccgatcggcatcggagccaggaactcctcggatgcggagccacccatcgggccggacatggcgaacacaggtacgtacttcaggtcgagacgctggaagatgcgctcgtaggcgccgcgctcgtcatagtaggccttgcgcatgccttcttcatcgatggtgaaggagtaggcgtccttcatgatgaattcacgaccacggatcaggccggcacgcggacggaactcgtcgcggtacttggtctggatctggtacagggtgacgggcaggtctttgtaagaggagtacatgtccttgaccagaagggtgaacatctcctcgtgggtgggggccagcaggtaatcggcctcgtggcgatccttcaaacggaagatgttgtcgccgtactcctcccagcgatgggtggcctcgtaaggttcgcgcggcagcagggccgggaagtgcacttcctgggcgccgatgccgttgatctcctcgcggatgatggcctcgatcttgttcagcacgcgcagaccgagcggcagccaggtccagataccgggtgcggccttgcggatatagccggcgcgctgcagcagcttggccgaatcgacatcggcatcagcggggtcctcgcgcagggtgcgcaggaacatggttgacatacgaagggtattggaagtcatgtgttccaagatattcgcgtgaaccgacaagcccgcctgctattcgcactattccggccttcatcttggcattcggactcattcgtacaacaatgatggctagaagggtaggagggcacgatgacgcagccgaccgagcaacaggggaatcagccggaacccgtggagcaaccggtgtatcaaccggcccagcatggggcccgcaattttctgctgcaaccccgcaattcccaacggcagttccgcgacaaccggtatcgcaacagccaatggccatgccaccatttgcgcaatcgcctatgtcggtcccggaacaagcggcctgtccggagcggccgcgctgattgtgggtgtgcgtttgctgcaagcaccgttgatctacggcacggtgattcttatcgtcagcacggtgactgtgctgtggccatggcgggccgaattctcccgccactaccggtgggtgcggcttgctttgggtggcatcattctgattgtggcagccgcgcgctatgaggcgagcctcaaatcgatgaggacgatcgccgcgcgtattggcgatctgcgctaaatcgcgcgggcgacctgaggcagattaccaacgtccggcgatagcagtcctgcatacggggcagtgcccattgccactgtatccggcagataaacggttggcaatgattcgataccaatcgcgttccacgagcttggccctgcattcagggtttgggcaatatgtggtatcgccttcacgatcatgcacgttgccggtgtacacataattgagtccctcttcgagggcgatgcctcgggcgcgggtcagagtctcgtgcggggtgggcgttacgtccatcatgcggtaactggagtggaatgcggaaaagtgcagcggcacgtccgggcccaagtgctcgcgtatccatgtacattcagcatgcagctgggcgtcgtcatcgttgagtccagggatgagtagcgtggtgagctccacccacacgtgttcgccttctggtgtgcgtgcctcgttgaccgcatagtcgatggtttcgagcacatcggccagatgcgtgccggtcactttccaataaaattcttcggtgaagcctttgagatcgatgttggcggcgtccatggcggcgtagaagtcgggccaggcttcggcgctcatgtatccggcagtcacggcgatgggatgaatgccgagcgctcggcaggcttcggccgtgtcgatggcatattcggcgaacacgatcggatcgttataggtgaacgccaccgaatcgatgccccggtcggccgcgacctgcgcgattttctccggactggcttccacgccgagccggtcgaaactgcgggctttggcaatatcccaattctggcagaatcggcaaccggaattgcagccagccgtgccaaaactcagcacgctggaaccggggtggaagtggttgagcggcttcttttccactgggtccacggcgaagccggagctgcggccgtaggtgtcggagacgatgagtccgtcgtggtttgagcggacgaagcaaaagccgcgttggccgggcttgaggacgcagcggcgcgggcatagttcgcagcgagcgcggttggtaccgtcgtggaattgcgtttgccagcgggctatggcggggttacgaacatctgtgactgacgccgtatgaccgcacgattcccggtgaccaccctctgattctcggtgaccaccctccgtcgcttcgcgccacctcccgccagcgggaggggacatggttgctgcgttagtgctcggcataggcggtcacctcgtagcgttgacagtcgatttcgccatcgttccagtcgtagtacgggcggataccggctttggcgagcaggtgagcgacgaaatcgtgcggattgggcagctcatcccacacttgtggcaggaatgtagcgctgcggccacgacggtcggcgagaatcagaccgtctttgccggggcgtaatacttcctcaagttcagtgcgcgaacgtaccgggcgttcgacgttgctgccgtcccgtttgacggcgtcggtctgaggtccggattgcagcgatgccagagtcgcggtcttcgagccggtaccgcacaaatcggcgtcacaggagttcacggtaatcggctcgggcgcgcccaagacggatacctccacgttgagcaacgggtattccgcggcggtgaccgggttgaaacgtgggtcgcgggtggcggcatccactgcgtgctcggtcacgtccttgccgagcgagcggtgggcggccagcgaaccgatgcacccgcgtagccggccaccctcggtcagggtaacgaaacaggcaccggactcgttcagccatgggtttgcggcaagaatggacgcggtcgaatcggcggctgttggatgctcgatatgcaaccgttcccggatagcggcacgggcgagtttcagcagcacatcaccatgggctgttcccgattcgcctaagtcatctgcaccggctggagcatctgcttctggtttggattcccacgcggcaaacgagacatatcccactaccggctcgtcggcgtctcgcattgcggggcgaggttggccggcaagcgccaccacgccgtcgtcgccggaagtggaacagccgagctcgaagagcttcatgtccttgcggccttttaacacatccagaaggccgttgatcgggtatgcgccacaggcccggcgagggtgaatcggcagatgcaaagccgcaatgtccgcaatggtctggtcatccaacgcgcgggcgacttcgtgcggatgatagtgcgagagatccgaactaatcacgatgacggtttccgggccaccccacaaagcacgcaacacatcacccgcctcttgtggcgtggcatcgcccgcgttcaacggcacaatagtgaggtctgggccgagcacggtttgcaggaacggaatctgcacttctaccgcatgttcttgtgcgtgggttgggccattgacgatcattgcgggagccgacgcgcccggacgggcatgtgtaccggagcgcaatggctcattgacagacaggcccagagccttacgctcggctgcaatgtctaccggcacagtgcccagcggcgtttcaaacgccgctgccgtggaacaggcgacgcctcgcacggccacacggtgagtcggtcccacgattaccgcgcgagtcacactcccccgccctcgttcgagcaaagcataggcaagcgcggccgccgtgccggaatacacataaccggcatgcggcacgattacagcctttggcactcccgctggaagcgtgggctccaactgttgcagaacctctcgactgtaatccaattgatgggtaatgagttgcttgagcgttgtgcggtcagcggggtagaacgaaccagccaccgctggcggacgtattgcgccagtgattttgccgctgccgtctgccgcgcttgctgcatctgacgcactagccacactaaccgtatcgatttgcacaccggcccgggcggcctcgcgaacctcattgtttccacgaaatatctcggatagcaccataactaccacctcttattccatggtagccgttcagttcctcaatgaagacaagttcgcagtgtcttcttcggcttcaaggggccgattccgcctcttggagacatctacttgcatttcgaggggctggtcatccgctcaatcgcacatagaaacggcttcataccaacgtcattccgccgtttttaagcgctgtctacttggacatcagccccttgaaacggaagtagatgtcccgaaaactcaaaatccgcccctcgaagtgcagaaacactcaaattagcggtcgttcgatatatcgaccgtcagaataacgcgtcctgggcgaagtcatcatcgggattgacaccgaattcgtccggctcggcgggtttgaacgcgcttgcaccttcatcggccaactggtcggaagccgaggccgaggcttcgcgcaggtcgccgtcgagcaccacggcatcgggcgagacgaggaacatgcgttcgttgacgccagtcaaatacagtccgcccagcgattcgacgcgggacaacgccacatatcccatgcccggcgcgaaggtgcgcttcagatccatgaccgcacgatcaagcgtcatgccttgcgacttgtggatggtgatgccccacgcgcaacgcaacggcacctgcgagacggaggcgagcacggtgtcgccgtccatcatttcccatgtggcctgtttcatggtgacgatgttgccgttttcgaattccacgatcggccagccgcccttgttctcctgcgcgaagccgcgcacggtgccgagcgagccgttgacgtactggcgatcggtgtcgttgcgcagggccatgacagccgcgccttccttgagtaccagtcgctcgggggccaacatgttcttcttgagtcggtcgaccagattggcgggacccgcggtttcggcgtggaactcgtgcggctcaagcatgatctggttcaggcgcatgtcgttgagattgtcggcctgccggttcaccgggaataggtggacggcgacctggccgggctcgggcagtttgcccagacgggtgacgagcacgtcacggtcggactgggtcacgtcgccttcgcgaatgtcggtgagcacggtcagcagttcgccggtgtcctgacggtgctgttcggtcagatagcagattaccgggttgagttcgggccataccagcgattcggtgatgaagccttcggggttcaagccggcacgggcataccgttcgcgactggcgatgaattcgggggtgggggcgatgaggtcgcggttgcgcccggacaccgaaaccggcggcagttggaagaagtcgccggacagcacgacctggatgcctccgaacgggcgtgggtcgcgacgcacttcgcggcagacttggtcgaccatgtcgaacagccatgcgtgcagcatggagacctcgtcgatgacgaggatgtccgtagcctgaatcttgcgtttgcgccgggatttgatgagtttgagcagactcgggctcagggcggtggccacgccgacgccgctccacgaatggatggtttggccgttgatatgcgtggaggcgatgcctgtggacgcggtgactgccacgctggcgccgtcggcccgagcctggcggatgaactcgttcaagacataggtcttaccggcaccgggcgcaccggtcagaaacacgttcgcgccggcgttcagaatggctagggcttcggtttggcgcatatcaacctctctagactcccctcagggaggggagccaagtacggcggactacttattgagaatgctggtggccacgatgtcggcggcgatggccttggaggcggcatcatccgggccggggacgggggccatgaaggccttacggtagtagcgcaactcgtccaaggactcgatgatgtcggcgagggcacggtggccgccgttcttcggcggacggttctcgtagacggccgggtaccagcggcgggcgagctccttcaaggtgctcacgtccacgctgcggtaatgcaggtggctcatgaggcccggcatgtagtggtcgaggaacttcttgtcggagccgatggtgttgccggccagcagcgggcgcacgccttccggcgtgaagcgcagcacgtattcggtgaccttctgctcggcctcggccaggctcaggccattctcccactcgttgatcaggccggaacgggtgtgcatctggcgcacgaaatcgttcatgtggttcacagccttctcggacggcttgatgacgtaatccacgccctcgtccagcacattcaggtcaaagtcggtgggaaccacagacacctcgacgagttcgtcgccgccgaagatgtcaagtccggtcatctcgcaatcgatccaaatcaggcgcgagtccttcgcgctgtacgtttccgcgtcatggctgtcgaccatggtgtgcctcttttcttcgctggtcatcgcttatgcagaacagttcagactataccccagcgcatacaagctatctcgagccacatacgcgaaaagggcctgcataagcagacccttttcacaaggaatcaacccctaactagcgcaagctagcgggcatcaaccgatcagttgttgtggaagccggagtagttcggggcttcggcggtcatcacgatatcgtgcgggtgcgattcgcgcagaccggcatcggtgatgcggatgaacttgccacgctccggcatctcggcgatgttgtgggcgccgatgtagaacatggactggtgcaggccaccgagcatctggtagagcacggcgttcagcgggccgcgatacggcacttcgccttccacgccttccggcacgaccttatcgctggaggtcacgtcggcctggaagtagcggtccttggagtaggacttcttgccgcgcggggccatggc

SEQ ID NO: 1092 - DNA, 48602 bp, Unknown
  R13_10m  MAG No. k141_10656
cagatgtccctcgtacacgatgaacgctggcttatgcggaaaacaattcatcaaacgcagcatctcagccgaacaccggccattaatcaacggagcaaaaggcacccactccgtctcaccgatattgcacgcagcatacgcgatcagtcctcgatccaacgttaccgggaacggagcgtgaagaacattcgcccagaaatcgtcacccatcggctttacgggctcgtatccctttatatgcgttccccccgtctctggatagagagtgaccccatcgttccagacatggatggtaatccaatcatcacgagcatacgaatttgtggaactaacgctgcctcgtaggacccgtcccctccgatcgcgccatggttcatcacgaccggacacgcacatgaacatcagccacgcgggaagcgagaaacacgcatcagggttagtaggttcatacgaactaagatgtatccacccgcgatccgttacgtcgaagggatcttcgatataacgattgaagaaatacctgccagtgtagaccttggccatatcgattctccgtctctttcagcttgggatggtccgaacagaataattggaagctcaacgatgcggttgattggaacgcggaggatacgcctgttcccgaccatggccgtcagcgggattagggacctggcctgtggaaggttggggacaggacggatatggctgagcgggactcggctgtatcggattcggccgtacagggggcgactgaacgggattcggctgctgtgattgcggctgagcatactgaggagataccggaccgacattccgccggtactgcgatggcacctgagccgggcccggagcctggtactgcggcacaggccgggacccgggaccgccatactgcggcgaatacggtcggttcggatacgccatacccggcacaggctgacgcggacccgcatacggcgacgggccagcggcagcggcatccggcaacggacgacgaccctgctttccgcgcttcgacaacaccaccgccaacacgatgccaccagccaccacggcgacgcccacgccaccggcggccagccacacccacaccggcacaccggacgacttcacgccatccttcccgtcaccggtacccggcagcacggtcctgccgtcagacttgccttcagtctcgtccgcggtcgcggtggcggaatacctcatgcaatccgaaccgccatcagacctgcactgctccaccttcttccacgcggctttctgacgctcatactccctgccgatctcaccggcctggcaaaaaacgggatacgagtcgtcgtcgagcaggctgcctacgccgtcggggttcgtggagcaatcctgcgtataccacttcgaacgatcatccgacagcttcgacgcagtggtcacctgcgcctccaaaatcggattcacatccggatactgcgtcggatccaccgtcaggagcctgcccggatcgacctggccataacccctcttatgctctgggtccagcttcgcctcacccgaatcattgcccttcgtgttacgcaccaacgactgcagaatctgattacccgtcgcgtccggccacttctgcacagtcaacgccaaatacccagacaacacagccgcaccagtcgacgtacctcccgtacccaccgaaatgattttcgaattaacctgcggatgaagcacctgatcacccggggaaaggatgttcacgttcgcatcagccacatccgaaatgccggcgatctgcccgtcgggaccgacctcattgttgcggatcacacctgggaacgaattccacattctagggtcgccgatcatcacatccgtactgctgccattgacaatggcgtcagtctccttgtcattcgaacgggacgaaacaatgatcacgccatggcgtagcgccttgagcatcccatcaagaccataatctcctatgccaccttcatttgacatgttgatgatgcgtgcgccccagtcgaccgcggtactaacgtccttgtcgatatccggcatagcaaaatcatcacaaggagtgagcatattgattctggaagtatcttgtcctagcgtgagaaacagaacatcggacttcggcaccaaacccgtcaccccttggctggcaccccaactcttgccattgcccaccagccatgtgagcatgaaagtgccatgcgacgaatagatattcccctctttggaagtgactgtcttctgaagcggtacaccttctatcagacacttagctggttcgtcggtagtcgcattggcaaatgaccccaaccggtattcgacattcgcgtccgcatccgacaaccctggataatccgaaacaacacgagagtccagcatgccgatcttcaccccagaaccatccagaccagcctcatgcgccgagacgaccgcactgtccttcaccggccacaagccacccatatcatccgcatacgcggacggcgacaacaccaacaacaaagaagccgccaatacccctgaacacacggagaagacaggtctatctgtggtcattactcctcttttcacagcgctgcacaacgtcaagataacagcaactatttaaatctcatgtacttcaaatgactcaatctcattttgcttgttttgcaattgagtctgaaagctttcttcgaatctcgaggtatgggcagtagcatccgccaaacgcttaccatagtcagccatattctgcgaatagcgcgtccggtcttcacgaattactgcgacgctgcgggccaaaaactcattgattcgcttggtgtatggatctttccatcctccagtcaccttcacgccataagtctcactcgcggaatcgttgactgactccgatgctgtttccaagcgtgccgccagtcgattggcctcatcggcatcgtaacgaatctcttccgccatggttctcccccgttcactcacatcaacgcatccaccgcatatacacgcgtttgccgtcccacaccaacaccgcaatggaacggcaaacacagcacatcaaagaatcggctcaatcagccgaagaaaccggcggccttgcggtcgctggcggtgtagccactcgaaatctcagcagtggccgaagcgatctgcgcaagaatgttgcgcacatcgttcaaatcggcgttccacttgctctgcgcctgagcatacgcctgctgcgcggaaccatcccagttctgcttcagctggctgaccttggcgtccagatcatccagcttctgctgaatgccgttagcaccattacgaatgctctcggacagggcctgcacctgagccggattcacggcaaaagaaccaatagccataatatttccttgctttccttatctgcctgatacttgtttccccgaaccaatcagctcagcatgctggcgatcttcgaggtggactgctgggtctcctgctcgtaacgctcctgctcctgctccgtggaccgcagggactgctccagctggttcagctggttgttgatgctggaagtcttctcatcccaagcattcaccatgcgggtgaaagcggtcgccgcatcgccggaccagtacgatcccatctgctcgatctcgccacgaaccctggtgatctcctgctggatgccctgcctcgcctccgcaacggcctgctggcccttcgcaagcgcgccggcttcagcggaaatatgttctgccatggcccatctccttaactcttcccggctcacgccgtcattggtcgattacgccgaggagcttcaataaaaagaaccccctacaagaaactaagcatactcccacattctgttcagccaaagcccctgtcattgtcaagaaagggaacaaggacgagcagcagatgcccaggcccggcaaaccagataccggaccggacatgacgaggcccccaacgatgccgtacagactgtacagatggcgtgcggcatactaaaccggcggcgtccagcccagctgctcgcgccagccatcaggcgggaacgggtccgtgttccacgcgccagtgcccggaacatcattgagcagtatcccccgatccgggccgaacagccaatccgcaagccccgcacggcaacgggccgcgcgaaacccgacataatccatcgcagacggatccaaccccgccacaccaccgcgcacccggtcgaacagcatatcgcgatgttcctgcaataacggcacatacttggggttcgcggcatcggacgcacggaacacggactggcagaacgtacgattgcgatccgatatgctggagctgatcatcgattcggcccacccatgcagaccgaccgtgaaccactggtccaacagccagaaagcacccagatcacgcgcgatcccatccaacggcgtggcacagggcaacttccgctcccacttcagcaatgacctgtacgtgcgccgggcacccaccggcatcaacagcgaatccggccgatcgtaacaataaatacgagacggaccatacttgaaaatatgacgcgtgggccctgacgacctctcaaagaacggcatgacaccaccatacgaccagcatcgccgcgtacacaatacacatcacacgcggccggcaagaaaaccgcacaactcctgcgccaccggtagcatctgcgactccaaaccggggttcatgaaacggtcgtagatattccacctatcgcacagggacacccacagatacgcccgccccgaagcaacaatcacattggagtgcaacggatgagcggacaatacctgcaacacattctgcggcggccccaccaactgtggccgaaccgcatgccccaacaaatcgcttaccgagcaccacgcataccccctgcgaacgagccggcacaggcaacaccaccacctgcatataccgcatggcgtaattactcaaaaagccattattgtcatacacattcagcgtgaacgtcagccacggtcccttgctgtagaacctgttcacccgcatattacgcacggcttcgccacgaagcaccaccgtgcttccagcatcgacggtccgtttggcctgccaatcacgcgcatggaccgaatacgtgaccgaagaaactccgggagccggctcataacggatctcaaccagcacaggaaccccgaaaccacggaaaaagcccaacacatcatcgcaatgcaaacgcacgccaccacgaacgacgcgatgacgccgttgcgataccaataccgccacgtcggccacatgcgctgcctgacacggaccatacgccagccgagcaacgaaccagccaccacgaacacgcaccagacaacaatgccgtaccggaaaaccctacccacccagaaaggaaaaccagatttatcagcattcagcagccacagcacgccgacgaacaccacggcctccagcatgtaccacggccaatccaactgccgacgaacaaccgcaccggcaacagcatccacacgatcccacatcatcaaccttctctcatcaaaaaccgcttcgtaaggcaaccatacagtcagcagtacggacaacaagccggctatcacacgtaccagcacagctcctgtgccacacaagcagcatctgcgactccagcgccaggggccatgtaccgcgaatcattgtcgcacacattgatcggcgtccacaggcaagccaggccattcgtcaccttcatgctgtcatgatttccgtggaaggccggggtgagcgctgcagaagcgcagacgatagccagtggggtctgttcgtccgtccgccatggacagtggccggccgaatacagcctcatgcctgtgggacggcacgcggatttggccggtttccgcgcggcgtcccgcaggaatgtgggatggtagagaaatcaatcgtttgacgttcgtggcgttccacactatcaaccgccagaaccgcgcaatcacgccaatccccgttacggaccataatcatcccccgggctctctgcgggacggcagacgaaaaaccgcgaaatccgcgcgtcgtcccgcacttcgcccggtccacgaacaggacaagcatcaccgatagaccgaacacacatctacagccgcgacaagaaccccaacagctagccgcccgccccggatatcgccgtccaatagtaaatcgagcccaaaacgcaaacccaaagcactgactcagataataaaactcggattttccaccacagacagcgagaaactctcccctataccaagtagcgtacatgccaccttgctcgatagacgaacaatgagaagtatcggttaacgggcatgccgggcaggtcgatgggctctggcgcgggaacgaagacggcgtaccagcacgaatgggccggcaaacgtgatcgtatacaacacgacggcgaggaacacgctgagccatgcggtgaacatgcccaacggcatctcctctaccggagtggtctcggctatgcatgcaacgatctatcactccgatgttgtggtcagtatgcgcggcagttgttcgtcacggttgaggaaagaacgcgtttggcaacgaagtagcgtacgccggccttcctcagtgcgggtgtataccatggtgcaatgcgtcaggcagcggtccaactgccggcgcagtatttcggcgtcctgctggcggcgggcaaatatggacgggaatgggaagcttacaccatacgtgcgcacgccccattccttgccgatgatgacatatcgcggattgttgatgggcgcgagtagctccttcataacgccggcgaacagcacctgctcgcgccgcgaaccaccaatcagcatggcacgcaacgccgtgaatctgcgacgtgtctggcggatcgaggaagtcactcacctctttgcctaccgcgttggtttctaggcgctcaggttccgcagtcgccaaatgccagacattggccactttatcggggtctgcggccacgctgcggttggcggccatgctgtatgcttcactgcatcagtgtaaggcacgaatcaataggttttgagccccagatcgatggtgagaatgatgccggcgattacggcggcggcgcgcatgatgtttgcgggaatcttgcgggtgatgggcggggcgatgtacccgccgatgaagcagccgatgcacagcatgatggcggccggccaatcgaccgcgccttggatgatgaataccactgaggcgctgatgttcgcgcctgtgccgatcagggttttcaatgcattgatcttgtggaatgggccgattttggcggcatcaagcatggcgagagccagggtgccggcgcccgcgccgaagtagccggagtagatggcgactgccaccacgcccagccatacccaccaggaatcctggctcatgggctgcacgagttgttccggcgggcggtgaggtgcggtaggggtggttgcgcgcttggcggcatcggtggcttcagtggcttcgatgtgcttgagttgcgcggtggcatccgcggcggcctgcttggcctgcatgcggccgcgcggattgatggcgatgatcagcgagctcagcaaaatcagcactggtgcggcgaattcaaagacactcgggtcgagtttgagcaacagaaacgcaccggccaccccgccgaacgcgccaatgaccacatacgtaatggagcgtaccgcttggcctttgagttctttgcgcgcgcccatcacgccaccgatgcccgtgccgaccacgccaacggtgttagaagcgtttgccaatacaggcggaatgccgaacgcgagcaaggccgggtatgagaccagtgacgatgcgcctaccgcatagcccacgaatcctgcgccgattccggccaacagaatcagtagtaatgaagttatggaaaagcccgcaatcattccccgtatccttgtcgctcatcgaccggcacattgccggccttgagcgagaatacgctgttgaggattggttgcgggttttatgttggaatgtggacgtagctcctcgcggaagcgattccctcagtcgcctgaggcgacaactcccctcgcacccgaggggagccagaaggaaatcagagcgcttcgttgtattcgcgaaccttgagggtgcggtgggaggatgccacgttttcgacgatcagacgcttcagggcgttgtcggcggcaatgtgctcgtccagccaggcgtcaccgagcttgaccagcgtggcgggatcggcgtaacccgggtacaggccgttgagcagggcctcggccatgtggtaggtcttgttcgcccagatccagtcgacggcctcgaaataccgggcggcgaacggctcggccaggtcgtggcgcggggtggcggagaagccacgggccacggcttcgagctgggagttggtcagctcgtcgttgtggagtgcctgatcccaagcccattccttggcttgcgtcgtggccatggaggcgcgggcgccgtaggcgaactcgcggttttccgtggtctccttcttggcgagctgcgcgtccacgtcgtcgttggtcatctcgttgacggaggtgagcgcttggacgatggtccacgtgaagttgttgtcgatttcgaggccttcaagacgcacggtgccgtccagcagaccgtgtgcgttggcggcgaatgcggcatcgccctcctcgccatagcccaggtaggcggtggcgagctggaactgggtgtccgagccggcttcggcggcgttggccagggtccacagctcggcggccacgtggcgcagcacatcgtcgcggcgggctggcgccacgtagtggtgggcggtggtgctcatgcaggccagcgcgtaacggaaggtggtggattcggtttccgtggccagaagacgcagggtcatgtccacgaagcgttcggccgggaattcgccgtcacgggtcatatcccagaaggcgagccaggtcacggcgcgggccagggcatcgtcgaaacgatgcaggttggcttcggcgaatgcctgggattcggcgtcgaaacgaatcttggtgtaggtcaggtcatcgtcgttgaccagcacgaatgccgggcgcggcttgcctgccgcggcctcgacgatggtggtttcgccatccacgtcgagttcgaactgctcggtgcgcacgatcttgccggtttcggcgtcttcgttgtagaagccgacggccaggcgatgcggacgcagcaccgggtgttcggccggcgcgctctgggtgagcttcaattcggcgatggtgccgtccgcgtttacggtcaggccggtggcgatcgtgttgatgccggattcctccagccacttggcgctccaggccttgagatcgcggccggaggtcttctccagttcgctcagcaggtcggccagggtggcgttggagtaggcgtggcggttcaggtagttgtggataccttcgaagaactgcgtgcggcccacgtagaatgccagctgcttcagcacggaggcgcccttggcgtaggtgatgccgtcgaagttgacgtaggtgtcgttgaggtcgttgatcggggcgacgatcgggtgcgtggtgggcagctgatcctggcgcaacgcccagctcttctcaccggagcagaaggtggcccaggcgtcatgccattcggtggcttcggcagtggccagcgtggaggtgaattcggcgaaggactcgttgagccacaggtcgttccaccacctcatggtcacatagtcgccgaaccacatgtgggccagctcgtgcagcacggtcaccacgcggcgctcggccagcgcgtcggtcaccttggactcgaacacgtaggagtcacggatggtgaccatgccgatgttctccatagcgcccgcgttgtattcgggaacgtagatctggtcgaacttggcgtacgggtagggcacgccccaggtcttggcgtagaacgcgaagcccttcttggtgatgtcgaacaggtagtcgacgtccttcgcgaaggccttggccaacgactgtcggcagtactgggccatcggcacggtgcgaccgtcttcgttcaggtattcggtgtgccattcggcgtacgggccggcgcagatggcggtcaggtaggagctcatcaccggggtcggctcgaagtcccacagacgggtgctttcgttcggcttgtcgccgagggtgccgtcgagggtttcgcgcggatcgtcctcgatggtggcaaccggcatgttggaggtgacgatccagctggcgggagcgagcaccttgaaatcgaaggtggccttcaggtcaggctggtcgaacacggcgtagacgcggcgcgcgtccggcacctcgaactgggagtacaggtagatgttgccatcggacgggtcgaccgagcggtgcaggccctcgccggtgttggagtaacggcacttggcttcgacggtgacctcgttcttctccttgaggtcggtcagttcgatgcggttgtcctggaaggccacggctgggtccagggacttgccgttgaggtcgatggatgtcacttcgtcggcaatcaggtcgaggaaggtcgacgaaccaggcttcgcgttgaagcagatgagcgacttggaaccgaagttcttcgcgccgaccgtcaggtcaaggtcgacgtgatagtgaatcggcgcttcgataacggccttacgttcttcggcttcaatacgagtgagattagaaccgggcatgacttcaattactccttacggtcgtccctggataatccggactacttggtttctacggtttcgacgtcctgggcgatgtcggccacgacgggcacgatcatcggcttgcggtgcagctggcgcgcaacccagctgccgagcgtgcggcgcatggtctgctgtagcttataggtgtcacgcgtgccctgcatcatctggtcgttgagctgttcgacgatctggtgacgcaccttgtcgaactcgctttcgtcctcggccacggcgttcaggtagatcttcgggccggtgacgacctcgtggttgtcggtgtcgaccaccacgaacgcggatacgaagccctcggtgccgagaatgcggcgcttttccagctcgtcatcggtcagctcgccgacggaatcgccatcgacgtacacgtaaccgcacggcacggagccgacgaccgcggccttgccgtgatacaggtcgaccacgtcgccgtcttcggccaagaccacgttctgcgggtccacgccggtcttgacggcgatcaggccgttggccaccaggtgacggttctcgccgtggatcggcatggcgcacttgggcttgacgatgttgtacatgtacagcagctcgccctcgttgcagtggccggacacatgcacggcggcgttgtcgcggttgacgaccttggcgccgagctgcacgagcttgttgatcaccttgtagacgccgtgctcattgcctggaatcagggagctggcgagaatcacggtgtcgaactcgttgatgtggatgtcgcggtggttgccgtcggcgatgcggccgagtgcggccatcggttcgccctgggaaccggtgcacatgaagacgagcttgtcgtcctgaatgtcgttggcctgcttcaggtccacgacggtgccttcggggatgtgcaggtagccgaggtcggcggcgatggacatgttgcgcaccatcgaacggccgacgaacacgaccttgcggccgtacttgtgggcggcgtccaccacctgctgcacacggtgcacgtgggaggagaagctggcgacgatgatcttgcgggtggcctgggcgaacgcttggtcaagggccgggccgatggaggtctcgggcttgacgaagccgggcacctcggcgttggtggagtccatcatcagcaggtccacgcccttttcgccgatcttgccgaattcgacgaggtcggtgatgcggtggtcgagcggcagctggtcgagcttgatatcgcccgtgtcgatcagggagccggccggggtcttgacgtagacggccagggcgtccgggatggagtgggtgacgttgacgaattcgaggtcgaaggggcccaccttgagcttctcacggccggcaacctcaaccttggtggggttctggtggtgttccttgcacttggcgtccacgaaggcgagggtcagcttggagccgatcagcgggatgtccggacgcagcttgagcaggtagggcacgccgccgatgtggtcctcgtggccgtgggtgagcaccagggcgtcgaccttgtcgagacggttcttgatgtagctgaaatcgggcaggatgagatccacgcccggctgctcctcctcggggaagagcacgccgcagtcgatgagcagcaggtgaccgttgtattcgatcacgttcatgttgcggccgatttcgcccaagccgccgagcggcgtgatgcgcatggagcccttgcggtacttcggcggggcgatcagcacggcatcctgctggggtgcggtggcctgccgggtggcgttgatcttacgggacggcgtacggctgttggatccgttggcgttgcggccgcgcgcggaaccgcgacggcgagaattcgtgttcttgcttgttttcttttgttcttgtgccataacctttttgggatttctgttgtggtgcctctgctctgtcatgcaggggcggcgggctggcaacccgtatgcagcgtttcgggcttacagcagtccggcagcgcgcatgccctcttcagccttgtcaagctgagtggcgtcgggaccgatgttcggcagacgcatggtggtggaggggataacgcccttgaccttgagcgcagccttggccatgacggcctgatagccgtcgccattcaacgcgtggacaaggggggcgagctggttggcgaggcgacgggcggtggtgatatcgccgcgatcgaatgcctggacaagctgctgcatggggttggaggcgacgtgggcaatcaccgaaatgatgccgacggcgccgatggagaggaacggcaggaacaggccgtcatcgccggaataccaggcgaggccggtgcgctgctgcttctccactgcggctgcaagatcgccggtggcgtccttgacagccttgacgtgttcaagttcggccagtcggtcgtaggtttcgaccttgaccttcaagccggtacggccgggaacatcgtagacgatgatcggcttttcggcggattcgtcgacggccttgtagtggccgacgataccgtcctgcgaggggcgggaatagtaaggcatgacgacgagcaccgcgtcggcgcccgcttcctgagtctgttcgaccatacgcacggtgtgtgcggtgtcgttggagccggcgccggaaatcaccggaacgtcgacgacctccttgacggccctgaccagctcgaccttctcatccatatgggtgacgggcgattcaccggtggtgccattgaccaccagaccatccgcgccatcggcgacgaggtatttggcgagcttctgcgcggcggcgaaatcgacgctgccgtcggatttcatcggggtgaccatagccggcagaatgcggccgaaaggtgctggctcaagaaggtgcatgtcatgctcgctcatagtgttcaccgtacttcccattgtggactcttatactacgtaccttgattgttgctgaatgcgtggcattatggccggagccggtggcaatgccgtgatgcgcgtcccggcgcgcttccctgcctgaaatgcgggggcgactactggtcgactgcgggtcgattacaggtcgaggaagtggtcgaggccgatggtcaggccagccggagcgtcgccggcgagcttgcgcacggcaagcaggacgccgggcatgaagctggtgcggtcgaagctgtcggcccgaatggtcagctgctcgccggcgttgccgaagagcacttcctcgtgggcgttgaggccgcgcagacgcacggcgtgcacgtggatgccgtcgaccacctggccgcgtgagccgccatcggtttcggtggcgtccggcacgggggcgagtcctgcggccttgcgcgcttcggcgatgccgtgggcggtgtgaatggcggtgccggagggggcgtccaccttggtggggtggtgcagttcgatgacttcggcggattcgaagtatttcgcggccttggttgcaaagtagtcggccagtacggcggagatcgcgaaattaggtgcgatgaagaccttctgggtttcgggcttcgggccgttggcgatggcggatttgacctgggcgagtttctcgtcggtccaaccggtggtgccgaccaccacgtccacgccttggccgatcagggtcagcacgttgttcaggctgacggacggcacggtgaattcgacgaccacatcggtgttgtcggtggtgacctgggtcaggtcgtcgccggcatccaatgcgagcgccagctgcgtatcctcggcgttgttcaccgcttcgaccacgtgcgagcccatgcggccctttgctccgaccaccgaaaccttgatcatgtcttcttccctgtctacccgtacctgcccggcaatgtacccggaacgttttccaatcggcaatcagcctatcaccgccaagccctcacgccaatatcccgtccacagaatcgagctccctctgacaagccgaaccgtgaagtcgagctccctctgatgagccgaaccgtgaagaaaacgccggaggcgtttttaggtgagggcgaacgacagtgagcaataattcagttggctgaaagccatcatttaattgcgttcgagctggccgcgaagcggactgagggagagacccccggcgaagccgccaaccatccatcaggcgtagcccgattccgtttcacccacgccgcttggccaaggcccatccggccaacgccaatggcacggacgccagcgtgaagatgaatggcagcatcatgcccacatgagggttggaggcgtcaagcacaatgccggccacggacgagccgatcgatgtgccgaccgtgcctgcggtggttacccagctcagtccttcggtcagggattccgccggcaccagatccttgacgatgaggttgccggtggcgaacgtcggcgagacggtcaggccggcgaggatttcgaagacgcccagcaggatgagattgtccattgacagccggaagaacacgtagccgacggtcagcagcgataggaacatcaccatatgcgcccaatgggagcctttgagtcggcaagagccgaacaccagcgcgccgatgcacgagccgaccgcgaacatcgccaattgcagaccgaggaagggctcaagtcccatggatttcatggtggcggtaatggacacgtcgaaggacgtgaagctcatattgaacacgatgaacacggcgagcaacggcagtacgccggcatagagcaatacgctcttgggcttggcgccgctgcgtttgagctggcgcagggtcagctggtcggcatcttcgcttgcagcagggctgccgtcatcgtgcgcggccacggtgacctgttccacgataaccggtggctgggtggatttcagcgagaagaatatggtgccgccgataccgcatgccacggtgggcacgaacagttgggataccggatgcacggaggtggccagccaagccgccagaatcggccccagaataaagacgatctcgtcaatggcggcttccatggcgtaggccgtgttgagcagctgttcaccatcttccacaccgcgcaacgcataggaccagcgtgttcggaccaatgcgccgaatgagaactgcgtcagacccatgatgatggccaggacgaacagcagcggaatcggcacgcgcaccaacgccgcgaaggcgaaggcgagcatggccacgatctgcacggcgagcgcaagccggcccacgcgggcttggccgaaacggtcgaaggcgcgggcgtagaacggggtgacgcagctcatggccagcacataggcggcgctcatggtgccggcgatggtccaattgtcgtagagatggttgagcgccagaacgatgccgagactcatcatggagatcggcaatcgtgccaccgcgccggacaggcagaacgccttggctccgggcagcacgaacaggcgctggtagggcgagtgggcagcggacgacttcgaaaccgcgcgagtcgtggacacaataactccttactggtgcgttgtccggcacgtgcgcccgcccacacgtgccatccgagggtagcggttccctagcaacgtcacgcggtgcgtttcaaccgcggaccggtacgtggccagtcgtcttcatcgtcggagatgccttgcgatgcataaggtctctccaccggtgaaggccgtccgatgctgtacaggtcatgagcctttgggctcagtcgttgtcagattgttcgggaatgccggagctcaactcggtaaggatttcctgtttggatttcgcgcgggcgtgaagctcgcgcaagccctcgtcgggctcactgacatagtagagagtggcgtcgatactgtccaattccacaccttcgaccgctgccagcagcagtcggtacatgtcgagctgggcgagtttgcgggtgatgtcgtctggcttggtgggccgacgaccggttttccagtcgaccacggtaaagcgtgcggtggtgctggacgggtcaagtccaccgatgaataccgcatcgagtttgccattgaccaggcccacgcccggcacgtccacgacgatggcacgctccgtccacgccgggatgcgcttggcccacgatgattcggccagtctgcgctgccacgccaccagcttggactcggtggcattgtcgctgcttatggaagtggcggatacggcggatacggattgttgagccgtgggctgtgggacagcgggctgccgtgtggatggcttgcggcattgccgctcccgttcggccaaatcggccaacatggcttcccgggaaacgaatcccgcatcctgacctgtatgcggcatgcttggttcggcttcatatgccagtaccgcttcatccggcttaccggcattgatgaattgctcggcccacgcatggaactgcgtgccggcctcggccgccggagacgatatgcgcggaatcgggcggataatgctacgccagtagaggcgctcctcccgttcgttcatgccacctacgcgggcttgcaggcttgtcacgttctggcgtcctgcagccagaacgcgttgcgccctggctttgactgcctcatcaagcgactggccgctggcggcatcggccatcaaatcggcgtcgtccaccagcaattgtgcccgttgcaggagtgggccggcgtcttggtgctgctcaagtgacgaggaatctgcggcgatgccatcgatgccgcgtgacagctgttcatgcaccgcgtcgctgagggtagccggccacggcaattcggcggcggcattcgtctgcgtaatcggcgtttgccacgcctcccccaccacggcgtcaccgtatgccgcggcatgctctccgataaagaacccttcgggaggggcaatcgcttcgccttgcgccgagatcagcatgggcttcccggcattggcggcttgcagccgttccacacagtcctgagccgatatcgcatgttcacgggcttggagcgcgtcatgcacttcaagccagaaattggatggctgagcggcgcgagagcctttgggcaccactgacgggtcccgcccggattcgcccgtataggcgcaataggtcatcagggcatcttcccgcgcacgggtaagcgccacatacatcaatcgacgttcgtcggcatgcagccgacgcccatattcctccgcctgcgtcaaataccaaccggatgcatccacttcttccacgccatcgccgaattcgcgcatggagccgaacacttcatcatcgataagctccacatcatccaaagccgccaacgatgcgacggggtcggcttccacatcggcatcatgggggaatcgcggcaaaatgccggcatcggcgcgcataggcacgggcacggcggtggggttggtgagccaggagtcggcggtctcatgatattcgggtgcggtccagtgaccttgctcggtgcctcccgtatggtgttcgtccagcacgatcttgagatggtcgccctgattgctggggaatccgccggcggtaagccccactaccgcaacggcatcccattccaaccctttggactggtgtacggtcatcagttccacatccaccggagcgtcggggagactggcggcttcatcctccaccgaagccagatgatccacccatgtgatgaacccatgcaacgagggagtttgctcagcggcaatctcttgcgtgtacgtatccaccaaatccacaatcgcatccataggcatatgcgccaaagcgggattggcgcggtgctgcggattatgcagcacaccggccaatacggtgtcgatgtcaagatccaacgcttctatgccggcgcgaatcacgtcgcccagtggccgcccgacggcatcatgcacctgacggagcatcaccgcggcccgggttatggcgttgcgcccgtgtgcgctcaaccgttcaagcagttttaccaggtcgccgcatagcaatacgtctggcaggaataccgcattggccacctgatcgcggtactcacgcaccacagccgcccattcattcgctggtgtatccggttgggcaaggccggcctgcaccaatgcttggaagcgttgttccatgttctgttcttcagcaaaacgggacaacatggtcaaatccgctgcggacatggtgaatcgtggcgtggccagcaagcgcatcagcgatcccgtatcggtgtggtcggcggccacgtgcagcaacgccatcagatcgcggatttccggacgttccagcagcgcggaatagccgaccacgaatgtggtcaatccggcctgttccaatgccgcctgatattcgggcatatgtgatttggaccgaaacagcacggcgaccggcgctttctgttcgcccggcatctgttcctgttgttcggctgcggaacggtgccgtgcgatggccgtcttgcagaaacgcactacggcgtcgatctcctgcccggccgtggcgaagcccagtactcccaatgttccttcgggggcatcaggcatggggtcgagcgatgagacatcgacctcacgcatcaatgagctggagggacgcgacggattggagcgcaacggcagcgtgagattattggcggcttcgagcactatacggctgttgcgcctggtgacggacaacgggaatggcttgtatccggcaggcaggtggaaatcctgctggaacatacggaatgcaccagggctggcaccacgccatgcgtaaatcgactggaacggatcacccaccgcgttgacggcggacctccgtgacgcatccacatggaacagtgctgccagcagagcggcctgcgtggtggaggtgtcctgatattcgtcgagcagcacatggctgtacctgcggcgcgtgcgctctccgatggaggggaagcgctcgataagctgatacgcggcaatggtgaagtcggagaattcggccatattgcgttcccgcttggcttgggcataggcctccaccagctggagcagaatatcgcgtttgcgtgtggtctccagcagcgcaccgcaatgataggcgcagcgggcgtgcaaatgttcggcacggtcatcgagcttggcttgccagctggcgtcggtatctttcttcagtcgtttgatcttggggattttcggctcgtcctcgggcatgggttcgtctgcgacggcttgctgcaatcgattgatgaatgccgaatcccattgccgtacttgattgatcgcatcatcgaagctggtgcagccggcaccgatcatggcactgccaatggcatccgacaacgccagaacacggttcgccaaactggagaaggcgccaaaatcctcactgaacgccagatccatgtgactgtcgatgacttcggtggccagttgaagcgctccggctgcgctcaatggttgcgtgttctgatcgaatccgacaagcagtccatattggcgcacgatggtctggaagaaggcgtcatacgtgaaaatggccggcttgaggaatgcccgatcagacaccgtggcggtcgtagagcccgccatatcaccggccactgcggcggagacgcgttccagcagttcgcctgcggccttgcgtgtgaaggtcaggccaaggatgcgttcaggtgccacacctcgattgataagcgcgatgatgcgttgggtcatcgtaaaggttttgccggaaccggcaccggcaaccaccagtacgtcagcatcgactggcgcatcgatgatggcggcctgttccgcactgggagtgaacgtgctcatgcttgcctcgtttcgaaaatcgtgtcgatctggcccgcacaggcagggcagacgttcttcatacggcagaatccgatatgggtgtcttgcggatgggcctcgatgatggccgacctgctggccgccgcgacatagaatacgcgggcgatcatggtcagcgaccataacgtctgcgtaccggcgagcgcggcgaattgcgcccacgcttcggcactcacaccttcgggaggagtagccggatctatggcgggtatgtcgaagaaacggctggggtctttataccagtatcgtggcgtgaacggttcggcattcaacgaaccatcagtgaacagcggcggctggaaggcaccttccggggcgtagcttctggctggtgccgcattctgcccgacatggaacagcgcgctttggctgatatgcggcattgcggcaagtgccttggcaccgcgcggcccgtcttcggggaacacgaggccaagctgatagcacacgagctgcagatcattgaaaatctgtttgaccgtgggcgttctgcctgttttgtagtcaatgaggcgaatgcattcgccgccgtctgcgagtacgcgggtttccatacggtcgatgcgcccggacagtctcacggtcagatgctcgtccatgccttccggccaccctccgaccagtgctcccatcagacggaccagcatgttccgatcgatcgggtgcgtgccgggcacggcattgtatgcgtcgagtatgtcacgcacatcgaatcgtgcggcaaactcccgttcgcattcggcaccggccaatgcgccaatgctgaagttgctggagttcttgccaagatacgtttccggatcggcgtcgctgcgcacaaagtaatcggcgatgttgcgcagggcatctgccgcggactcgtccttacgggtggcctcatagcggttccgggtgtcggctatggcattcggatcggggcgtttgctctgatagatggcattaagccgtgccgtgacagcctcgatgcggcgttccgtgccggccgtggagtccaagcccagtatggccaacgtctgggcattgtgggaaagatggtccagcccttcctcgctgccttgctgtgcaaccgcatggatgagggttccgaagctggtggccacggagctggggcgaggaccggcgaaccggttctccagcatccagcacaccggacatgcccataggctgtcgaccgccgatggagacagggtgaccatgggtgcggcctgcgcatccgtcttgcctttccccgtttggataccgtcagactgtacaccgccagatgacgcgctgtcggatgaggcaccgccagatgacgcaccgccagatgacgcaccgccagatgacgcgctatccgattgggccggcgattccacgaacgcccagctctgcggatttgcggcgcgcacaccatgctccgacaggagtgtcaacgcaaccgcggcgtcctttgcggcagcctgctgcggttgagcagtggccagaaccgcgcgggcggcgctgaccaacccacgtgggtcggcgtccaatccggccagatcatattcggcggatcctgtatgcgcccccactgtggtgaaaggcgcctgttgccggttgcgcggatagtattccggcagatacccgaaaagaaagtccgaggggctcatgctgtcgttccataccgcgctgatcatgattcgccgtgcacgggtcagcgcgaccaggaaacccttcttctcgcccgacagcacagccgcgaactgcggatcatgcccggttttgtcactttcttcaagtgctcccctcagcacgagctcggcaaggtcttcaccaccgaacatggtgttgcgcccggcgaggttcggccacacgtcttgctggaccaccggtatccacgcatatccccagtggcgtccggccgcgcctgccggcgtggtcaatgtcacagcgtcttccaccggccctatgtgggccaaggaatcggcctgcacttccatgccccgaacctgtgccatgaatgacgtgatgtctcggctggcggtggaatcatcggcgaactggaacaggcgcattgccgcgtccagccggtcattggccgtgcgcccctctgccgtgttgaataatgccgcacgctgccagaccggtgccagaccggtggcgttccaggcaacagacagtgcataacgcggctgtacgcgctggcttgccggcagccgctccaagccggaagcaacgctgcccaccagatgccacaggttcgcaaaagcgcgggcctgagggtcgttgccaagcaccgcatggatggatgcgagcgcagcctgcgccggcgcggcggcatcatcaacggcaagcatcacgtacagcgcgtcaacgccaaaggccaagtcatcgtcggacggttcaccgagtatttcgacagacactggcgacgaaaccactgacgaggatgtttcacgacctgtttcacgccgtgtttcatggtatgtttcacgcaatgtctcccatgccgtcgtcagagaggtcagcatggcatcatccgtggcgagatgcgccagcgactccagcgcgctcatggccaattcaatcggagcgagccttgcaggacgcccttgaccgggtctgcccccggcactcaccaacgggccgttcatcaacgtggccactctagtccttatatatgccgcgcaggaagccaacgtcatctggcattccgccattccctcggcacgcaatcgggcaagctccacaagcgcgaacaatccctgcacgaaagtctcgtccttcaaaggacgggtgaccgacgaataccgcaccggcacgccatctcggcgcagtcgttcgccgaacagccgcacggcggcattgtcgtgggtgatgaccgccatgtcgttccaccgaatatgccggtcgagatgcgcccgcttgatgcgccagaccacatcatccagctcctcacgtgaggatcggtacaggccggcggtcaccgtgccgtccgactgataattcgctgcatcgactccgcccagcatggcggtcagcttgccgggacgctcggccggaggcagcggctcgtcttccggcgagggaatcgacagcgaaatacgagacgcgatcacatcagccatcgtcatgtgcgactgatcagcgccggtactgccgccaaccagctgttcttccttggctttcagccacccttccacggcacggcgcatcagatattccggatacgatccacggaaggtctgcaccgattcatccgggttgccgaccagcaccaacttgacgccggcattccccaactcctccaagaagcgcatgccggccagcgtggtgtcttgaacatcatccacaaccagcagccggggcaagcccaacgcctccatacgcataggccggtcggaatcatccgcgtgatcggcggcgaatgcctcatgcaccacacgagctcctgccaccagcaaatacgaggcatccaaacggtattgccccggatatgccgcgctttgggctgcaatatattcacggcgcaacgcgaaagccaaacgccattgcaccgacaatcgcgcgtcctccgtcacggcgtccaagagacgtggctcttcgtgaacgcctacaccgagctcgtccaatcgggccagcatatcgcgcaactggctgataaacgcatctgaaataccgcgagtgaacctatccgcgctggtcgagccgcctgccgacgtcggagacagcgaatccgacccttgttgcgagaggcttgattgtgcggaagcggccgagccgggcatctcgccggcaccggcatcgcgtatgagtttcgcccagtcatcctgggcaaagtagacgcgtagcaaatcacaggtgccgcaatcatctcccgctacggcatggcgcagatgcacggccatgacttgacgcagcaaagcatcctgttccgcaccgttcaacaatcgaggcgacggcaatccagttccctcgcgcgaagctgatatggcccggaatgccacggcacccagcgtggtgaccggcctggcctgcacggaaaacccgagctcacgaatcacccgattgcccaatgcgtcggcggccacacggccggatacggccatcaccgcctgcgtgccaccgtagcggcgcagccccgccatcaacaccgataaggcgaattcggttttgccgcttccaggcgtgccgacaatcagcctcgccgctccatcacggtcgatgccgtccagcactgttccaggttcaagtctcgtcatcatggctccagcctaaacccgaccgtcacagagggaaaaattttaccgaacccgacgaagaatcgtacccttgacggtatcctgtagaacgaatgcagggagagcgcattttccaaggagggagggacagatggccaatattccgatgaggccgccgaagctgcccggatatgatttcgtccagatgttgggaagcggtgccaccgccacggtgtacctatataaccagcgtatgcccgcacgcccggtggcggtaaaggtcagcgccaaaacccttgacccacgggccgctgccctgttcaaccgcgaggccaacttcatggccaagctgtcatcccacccgtacattctgccggtatatggtgccggcgtcacctccgatggccatggctacattgtcatcgaatatgcgccgggcggcacctacaacagcatcatgaaggcccggtccatgacctgcgagcaggtactcgacctcggcatcaagctgtcaagcgcgctgttcaccgcgcatcgcagcaatatcatccatcacgacatcaagcccagcaacattctcatcacctcgcagggtttgcctgttctgggtgatttcggtatctccaccgatgtgtatgaccgtaccgaaaccggattctcgccgccgtgggcaccgcctgaagtgcttcagcatctgaccaatggttcggaagccgccgacatctattcactggcggccaccctgtacgccatgttcgtcggctgctcgccattccagcacgaatatcatccacgttcgcaatcggaactgatttcgctgatcgtcaatcagccattgcctcgcctcaaccgccccgacgtaccggccgatgtggaagcggtgctgcgccgggccctgaacaaggaccccgaccagcggtactactccgcgttggagttcgcacgcgccatgcagcgtgtgcaattcgcatatttcgggcatgccactcccgttaccgtggaagggatgccggcctaccccaaagacatcgagcgtcggcgccgggccacggaccagcgagatcagaccacccgttcgtcacggcgatgggtcaaaccggtgggtattaccgtcggtatacttgcggcgatcaccgcagcggcactgatattcgccttcgtggtcgttccccgcatggacagcgccaccggatcagataccaaacaggtggcgacgcccggcaccaaggatgatgacaacaaccgcaataatcaggatgacgtgattaccgataccgcgaacgcccagattccttccccggagaatctgaacggcacctatgcggcggatgggtcatccgtgacgttcacctggacgaatccagacccgcaaagcggtgatacctatgcgtgggccatagtgcagggcagcaataccgaccagagcgcgcaaaccgtcacaacgtcagatcccacggtgaccgtcaacgcgcaggaaggctcgcagacctgcattcaggtgtccattgtgcgcaagaaccgccagatgtccgtcagccccgccatcgcctgtgcggccaagccgcaagagtgatccgctcgccactgccgggcataccaccttggcattgcgtatcgcatcaggcatgcgaccggcagtggcgaattcaccaaatggacaacaggaacggcaggtattggaaccgtaaagcgttgtcattacactagcaaccagagaaaccagggttcagggagttcagatggccacatcgtcccagtcatacgatcgtcgccgacgcatcagcgcggctttgcgccgccttatgccctccggagggcatacgtggacggttcccgtaatcacgctcctgctgcttctgggacttgttgccggcgcggtgatcatgagcaccgtcacgcgccgccatgtgcaactggacgatggcaccgtgtgggtcacttcgctgaagaaccagaaggccgcacgattcaacgtaaagaacaaggaggccgacgccggcgtctcctcctccgccccacgattcgacatcgcgcagcataatggcgacaccatcctgaccgaaacgaccaaagcctccaccatcaaggcatccacggtcagcaccggtgtcaagactgacatcaaagccaacaccaccactgtggtcggcggggataccgtagccctgatcaacgagaagaccggcaatgtgtggaccggcttgtcggaaaaccttgattccgtggcccccaccacttccgatccgaaaatgaagctgggcgagggcgggcgcatcgcagtaacccacgatggcaaggtctacggataccgtccatccgacggtatggtgctgcgtcttgacaatcccagcagcgccaaggccaaaaccctcgaatcgctgaccgacggcaagcagcagaccgttgaaagctttaccgtcatcgggagcacgccggtaatcgcaaccggcaaaaccgtcatattcaagggcggccgcgtcgatgtcgacacgaccggcaccctcacccttcaggagcctcccaccgatgacgtacagtccgattgggtggccgcggcatcaccgagaggccttgcgcttatcccgttgaagtccaatgccaaggcgaatttcatagccaacgggggcaaggcgaatccggcacgaccggtatcgtccaagggctgcgtgtactcggcttggagccagaaggccagcaactacattcgcgcctgctcccccgcggataccagcgtcaagccgcaaaccctcgaatccgtcaatactacttccgaattggtgttccgcaccaaccatcgccttgtggtgctcaacgacacggttaacggcaatgtgtggaaccctgaggattccaccaaagtcatcaaaatacagtggaacaaaatacaggccgagcagaccgagaaagaacagcagaacaacgactcggccaacaaccaccacgacttctccaagacctgttccgcacaatccggccaaatcaaagccgaggatgatgaaatcggcgcacgagccggttcggaacagattctcgacgtgctgcgcaatgacgagcagaccgattgttccgtgcttaaaatcaccaaggttggcgcaccaaacaacaaagacgtcaccatttcgccgatttacgacggccggtatctgcaactcgatgcctccgccacatccgcaggcaccgttacctttacttacgatatttccgatggccgcggccagacctcttccgccacggtgaccgtaaccctgaatgatggaggcaaccacgctcccgtacagttcgacactcctcccgagatcgatgtggagcagggagccagttataccgccaatgcgctgagcagcttcaacgatccggatggagacccgctcactctggtctccgctgtggcccagaacaccgaccaggtgcaggtgtccacccgagccgacggccagcttacgttcaacaccggtgcgctggcgtcgggacgcgtgggcgtcgaggtcaccgtctccgatggcacggcgaccggcaccggcatggtgtatttctcggtcaagcccgcgaacaccttggccgcggtcatcgacccggtagcgaaaaccaccgttcccaacacggataccgtcgtcaagctgtcctcttacgtgcatggcacttccttgcagccggcacagctgactcaggtggatacgcccaacggcgcttcgacgaccaccaatgcggcggatatgtcgttgacgttcaaggccaccaatcccggcacctattatgtgccctacaccattactcaaggctcgattccggccaccggattggctcgcgtcgaggtacagcccgccaccggcgaggccgccaaaccggttgccgccaacgatgtcgccctgcttggcgcggataataccgccattgtggagccgctcaccaatgacgtcgatccgatgggcggcgtgctgtccgtcaccacggtgagcgcaccggccgactccggcatcaaggttggtctcgtcagccataagcgcgtgtatatcactgcgcgtcaggtgcccacgaaacccgtcgcccttacctacaccgtggccaacgcctccggaaccgccaagggcaccatcgtgttgcagccaccggctctgaccacctcgaattcagtgcccaaggccagcaatatcaatgcccaggtgcgcaccggcggcatcgtgtccgtggatgtgcttgaccatgtggcctactcggatggcaccacggtcaagctcaagaacaacctgcaatacgacaaggagacgttcaagggtctggccttcgtctctggagacacggtccgctaccaagcatccagcgagaccggcaacttccccatcacctatacggttgaagacaatctgggtaatgtggcttccgccaatatcaccattaccgtgcataagagcgacgcagcgagcaaggccgcgccaaccccgcatgacgccgaagcgcaggttgccgccggacagaaggtccgcatccccatcacactgaccggcatagacatggatggcgacgacgatcagctgttgggtctgggcaacaaggcacccacgctgggccgcatatccgaagtcggttccgactacttggtctatgaagcgtatccggattcgtccggcaccgacaccttctcctatgccgtggaggattggaccggtcagcgcgcacaggcgcagatccgcgtgggcgtattccaaggatcgtccgactccggcgtatacgccagggatgacgaaatcacgttgaggcccaatacggccgcaaccgtgccggtcgcgcagaacgacatctccggcgacaacaccaatctgaccgtcgacaagcatgtcgaggtccaaggtctcgacggggtgagcgcgaaagacaacatgatctccttcaccacgcccggcagcgccaccaccgcctatatcgcctacacggtcaaagacaaggccggcttgtccgatacggccaccctcacggtaaacgtggatccgaatgccgccatcgagccgcctaccgcctacgactatcgtgtgccgtccgccgccaccatcgataagaagtccgtggatgtggatgtttcccagtggatcgccaatccttccggcacagccaatgagctcaaggtcggcgtgcatccctccgccagcgctcacgctcacgtcaagggcggcgagcattcgaccaccatcaccgtcgacctgacgtcacaggcgcgagccgtgccttacacggtgaccaatacgaaatacaacatcacctccaccgcgttcatccaggtaccggcctatggtgtctttccgcccacgttgcgtcccaaggcaccggaattgaaggtcaattcgcgtgagaccattgaaatcaacatcaatgactatgttcgcgtcggtgccggcaaggaaccgtatatcgaaagcgctgattccgtcagcgccaccaaggcttccaactccgatttctacgtgaacgacaagaccctgaagttcactgcggcaaaagactacgcaggccccgcctccattacctttaccgctgtggatggcaagcagggatcggataagaccaagatcatcaattccgcagtgatcactctccagatcacggtgataggccgcgatgtgccgccgcccacgttctcgtcctccactattgatgtcgaggcgggcgcggcccccaagaccgttgatctgacggcgctcacccatgcaccgtccggcgtgtatgacgacgagaagcaatacacgtattccggcggaagctcatcgtccgggcgaatcaccgctaacctgtcccgttccggcagcttgcaggtttccgccaccaaggatgccgctcctggcaccaccgcgtccattcccgtgcaaatcgcatacggcgcgggcaccgtgaatgccggtgtgaccgtgcgcgtagtgtcttccacccgtccgctggcacgcgtcggcgacaagacgctgaagatcaaggccggtgccagcgatgccgtgaacgtgcttaccggcgcgtacaatccgttccccgattcctcgctgaccgtcatcagctgcaaggcggatgacgccgccaaactcactatcgccggatgcgatgcctccggaaacgtcaccatcgccgtcgcatccgatccgggtgcttccacgaacaccgtgctcgtcaccgtgcaagacggcagcaagtccaaggatcgtgaagtcaccgcatcgattaccgtgtccgtgatcgacaagcccgagccgccactgctctcccccgtagccggggaaccgcaggacagcgcggtcagcctcacatggacgcccggtgccgccaatggcagcccgatcaccaactacaaggtcagttggaccggcgccgccactggagagaaggattgcggtgccgtcacctcatgccaggtcacgggtctgaagaacggcaaaacctattccttcaccgtcgccgcgcgaaatgacgtcggttggtccaaaccgtccaccaccgtcgaagccacaccggacaaggtgccgtccgctcccaccgatgtcacggtcacaggtggcaataaaaccgccaaagtgacgtggaaagcgccgagcggtgatttcagcgccgtcgacaactattcggtgaccgtcaccggtgcaggtgctccgcagaccaaggaaaccggcaacacggccaccgagctgtcgtttacgttcaacaacaacgacatttccgatggcaccgccattacggcgaccgtcaaagcccataacaaaatcaattggagtgccgagtccgcctcatcacagccaaaggacatctggggagacccggatgcgccgaccattgcgctgtcgaacgacgacaccacaggaacggcgaaagtcactctcggcaacaaccgcaatgccggctgccggcgaatttccttgggaggagacgtcaaggacaccatcgattgcagtgacggtggcgctacgttcgatatcaatgagaacgatttgaacacccgggaaatcaccgtaacggccaccgtggtgccgcagcgcgatgcttccgccggcacaggcaagagcaggtttgtcccgcagtacaatgtccagccgcccactgacgtctacaccaccggatccggcagtacatgcaccgtgcattggaccaagcaggggcatgcgcagtcctacaacgtgactgccgatggcatcgattccggtacagctactaaccggaactcactcgacttccgaatgagtccttgggccaaatgcaataccgcatcggtgcaacaggtgttcaacggcgctaccagcgatgcctccaccggaggcccgtacaatggcgctccttacacctatgagaagaaggctgtaatcaacaaaccgcaggagctgcgctggtcagacaacgctcacgtcattaacgtcaccggcggttcggttgaggtctatggcaagcaggccaccgtacaaatcatcatcaatggccaaccgttcacgtggaaccccggccagccattggacgtcaccgacttggccgtggccgccgatggcaactacacgtggagcgtcaaagtcaccggcgggccgggatactccggtctcgacaatacggcggacggcagcagcgtcgcgggcacacgcccctctgattcctcggaggggaccgagtcgctcaaatccggtaccgatgtcaccactttggccaagaacccttggattcttggtttcggtaataccccaatatcgtcaaccaccattcacaagcagtaggagaacatccatgagcgagaacatcgacgacgcgacgcagctgtctgacacgacccgtctgtctgacagcacgcagctatccgacgccacgcacttgtccgatgccacacatctggcatcggaaccgcacactggcaccaccccgaacaccgagacggcacagcaacccgttgcgttgcctaacctgccgcagcggccgtcacaagcgtcgtcagaaaagccgtctcctactactgatgccgcctccattcctgcgggcgatgacagcaccgtgctcaagccgcgcaaggacgcggcgccagccatcccgcagcaggtcggcatgccggcaaagatcagcacgcccaaagtcgcgcttccgcacttcggacgtaaatccggcaagcaggccgctactgcgaatgctgcccccgccacccagacctcccgtcaatggacgaccacaaccgccggcaagaccgcagcatccaacgccgaaaccgtggctggtcgcgggccggtagccaatcagcaggccgccgcgcaatcccagccgcaatcccagccgcagcgtcagtcgagcaaagccgcgcaagcagccgcatcggcactgcccgccagcatcaattccggactactgccccagcccacggctcaggtccgggatttccagcagtccttcaatgcgctggtcgagaatgtctccaaggtggttatcggcaagaccattcccatcaagcaatgcgtcaccgcactgatggtcggtggccatattctgcttgaagacaaccccggcaccggtaagacccagttggcccgaggcttggccaactccatttccaccggtttcaagcgtattcagttcacgcccgatctgctgccttcggatgtggtgggtgtgactttctacgatcagaagcgcggagaattcgagttccgcgagggcccgattttcgcctccatcgtgctggccgatgaaatcaaccgtgcatcgccgaagacgcagtccgcacttctggaggttatggaagagcagaaagtcaccgttgacggcgtcacccatgatgtaccgcagccgttcatcgtgatcgcaactcagaaccccatcgagcagctcggtacctataagctgcctgaggcgcagatggaccgcttccttatcaagacgtcgattggctacccgggccatgatgtgtccgtcgatatcctcaagcaggtcgatatcaccgaccgtgcgcagaccgtttccccggtgctgagcggtgacgatgtcatgcggctgcgtcaggtggccaccgaaatctatgtggatgatgcgattcgtgaatacatcgtcaggctcgtcgaggcgacccgccacaacgagaagatcacagtcggctcctccatgcgtggcgctttggcgctgacccgatgcgcccgtatctgggccgcggccgatggccgtgcctacgtggtgccggatgacgtcaaggaccttgcagtggccgtgctcgcacaccgtatcacgctgactccggaagccaccttcgatggcgcgactccggaaagcctgatcgcacaggtgctcgaagacgttccctcccccaccatcggttcctgatagggcctggaaaggtatccgaccatggcatctacatccgccgcattacgccgtcgccggcgcgctgaacgcatgttcaagcgcgcggtaagacgcatcagacggttcttcgcatcctacgtctcgcccttgggctgggcggtaacgggcgcaggcatcgcatgtcttattgcgttcctgcctctgggctggtatgagctgctcgtattcggcatcgtggcgatggtgatgatgctcgcggcaatcgcgctttccctcggcaacacacgcttccacgcgtccatcgccgtatccgatcatcgcgtgaccgtgggagacaccatatccgttatcgtcggcatcgacaacaccggcagaacgccgacaaccacggcacgcggatatctgccaatcggcgatgcgcatgaacgattcaacatccccatgctggctcccgggcaatccaagcaaaccgatgtggagttccgtacggtatcgcgcgcaatactgcccatcggaccgttgcgcatccgcaagggagacccgttcggcctggtgcgtcacgaaaaggagctggccgaccgcatcatcgtattcatccaccctcgtaccgtgcgtctcgataccctgaatgccggcgtgccccgcgatctggaaggccaaccatccggccagatcgtggatgatgatctcgacttctacggattgcgcgaatacgagccgggcgacgacgtgcgtaacgtccactggctgagctccgcgaaaaccggcacgttgatgattcgccaatatgaagccacgcgccgcaccgacacctcggtgaccatcagcgtgaacccggatgagtacgtcaacggcgaggaattcgagatggcggtgtccatccactcctccatcggcgtcaaatgcctgctgcaggatcgcccgctgttctgtcacgcgggcaacgcgcacggccagccgcgcaacgccatggagttcctcgacaacgccagtgccatagagcctgatcgtgaggacaatccgaatctcgccgagggcacgctgaagcacagtcctgatgcttcgttctattttttcactgttggatcgctgaaagacatcgagcaaatcaagcgcatgaccttggccttgccccgatcggccagctgcgtggtattgcaggccagcgccggcgccaatcgcggcatcagaagattcgccaacttcacattggccaccatcggcgaactcgatgatctcccactgatcatgggggtgctcgcatgaccttcgaccagtccagtatcaccaataccaataccgctgcgtacgccggatcgagcggcacatacaccggcacttcctccggcacgtacaccggaaccgccaccaccaccggctcctgggccgactccacacattcggttatctggatgaccagaggcaatgtgcttcgcggtatgggcctcagtcgccagccgtggggcaaacgaatcgccagcctcgtactcatagcggcgatgatgttgctggcgcaagccaatctcatcgacgtgtacggcggcgtggccacttgggcgattgccgccgtaccggccaccttgctgggcgcgatcatcgctctggcgggcatgttgccggcgttgcgactgtggtggcaaatcgtgtttctgacgtttgcccaattcatcatcggtccggtggtaacgctgagttccaccacgtcccattacgtgattcccaccttgaagaccttgagttcaggttgggaaatgacgtttggctcgttcaagtacattatttccgtcgatccgcctctgggcacgcaagacggcgtgctgatggcggtatggaccatcggcctgtggcttacgttcctcaccggcgtgtttgccattaatgccaacgcatggttgtctctggtgggagtcctgccccttgcgacggccgtgaccgtatgtgctctgctgggtacggacagcggctggcaacgtgccatctgcggcattgcctttgccttgctgctgattatctggctgtcttggcgtcttgaactgctggaatgggggcgctggatatccgcgctgatcatcgtcgtgctcgctgccggccttgctttcggaggcacgttgctggtgccgcaggaccgtttcgtgctgcgtgaccgctacgatccgccgttaagcccctacgattacaccagcccgctcagcggcatgcgatcctatatcaaggaccacaaaaaagacgtgttgctgaccgtccataatctgccggccggaacaccagtcaaacttgcggtgatggatcgattcgacggcacagtatggaacctgtccgattcttccgaagccacggactcctcgaattatcatcgcgtgggcaccacgatcaaggcggatgagcagggcgaatccttcactgcgaccttcaccgtcgatcagggattgaccgacacctggctgccgctggcgggagcggccactggcgtgagcttcgccaacgatgccgacaacggcaatgacacgttctactacaacacggataccgattccgccattattcccgccggcacgcgtaaaagcctcacctataccgaatccggcattatcgcccgcaagcccaccgataagcagatcagcagtgcggccgcggcccgcatcacccaaccggaagcccaggatgttcccgattcggccagcaaactggccacgtccattgccggcggacagtcctcgggcggtgccgcagccacggcgttggccgacacattgaaagactccggatggttctctcatggactcgaaggcgattatccctccgatgccggccatggcaactaccgtatcaacaagctgctggcaggcacggccatggtgggcgactccgagcaatatgcctccgccatggcactgatggctcgtgagctgggactgccctcccgtgtggtcctgggcttcctgccgaaaaacgaggatggcgaaatcaccgatgcccgcacggagaagacctcgggcaatggcaccaaaatcgaattcaccggcaacgatgtcaccgcttgggtggaaatcaaattgcagggcctgggatgggtggcgttctatccgacgcccaaggagaccaaggtgcctgatgaaaaccagaacctgacgccgccgaatccgcagacgctggtccggcaaccaccggtgccgttgaccgatccgctgcgcgatcagacgcaagccaggggccaaagctcattggcaggcgccgacgccgatgattcgccgaccaacctgttctgggtgcggttctggcgagtgacccgcaaggtggccctgtacggcagcccattgtggaccctactcatcgtctgcggtctgattctgatgttcaaggccatgctgctggcgcgagcgcggcggcatggcagtccgaaagcccgtgtggcagcaggttggaatgccatacgcatgcttgccgagcaaagcggcatcacagccaagggcactcgtcgagatcaggccggtgccatcgcccgtcaactcggcacagatgaccaggctttgatccagcttggccgggaagccgactacgccacgttctcggggcaagacattgaatcgggccaagccaccacatattggacaggagtcgaccaattgcgcaaggcaatgctcgcttctttgccgcgtttcaggaggatacgtacacgactttccctgaaaagcgtggctatactgtcaaatagacacgcagccaagtcgcacacgacgcatgtcaagcgcgcgcgtaagaaggggaagacgtcatgaccacaggctccatccgtatcgcgatgaccagtgacgtgggtcttaggcgcaagaacaaccaagacaccggattcgcccaacagggcgtgttcatggtctgcgacggcatgggcggcggcaaaggcggcgagcaagcaagccagttggctgcccagcatttcgcgcagctggcttccatgccctcgcgcacccgccatgacatcgacgacaccctggcacaggctcagcacgacattctcgatttgggtgaccgtctcggcggcgtggccggtacgacctgctccggcctggttttgccccagccttacgcagatgccatcaatgcccacagcgcagctccgtttgacgatgccgactccccggatttctcggaccagacctatgtggtcaatgtcggcgattcccgaacctaccatctcagcccgctgccggatgccgatgcccccgccacggatatcatccccgtgtgggacgcctcctcgctgacccgcatcacgcgggatcattcccaacgccaggaggctatcgattccggtcagatgctgccggaagaggcggaggcgaccattccacgcaacatcatcacccaatgcctgggcgatccggacggcatagtgcccgacgtatatgttgccgatctgaccggccgtttcatcatctgttcggatggattgcacggtgaagtgtcagacgaacagattgcggccatcgccgcagcgcattccagtccgcaggaagccgtggacgccttggtggcggccgcgctcgatgcgggcggaaccgacaatatcactgtgattgtggccgatatgccactgaccgaacccgaacatcacgcgttcagcgcttttaaactggacgagggcgaggacattggcgccattgaagacgcaacactacaaacactacggaccatacgttcggcataaccgagcgaacataaggaggtaatcccatggttgattatgatgctgcggtcgctgccgtacaggatccgaacgcggacccgattctgttggcaaaaatcgcctacgagaatccggaattcggcgcaaacgtcgccgtaaatccgcgttgctaccccggcttgaagcgttggatcgccgagttcggcgatgagcgcgcccgcgagaccctggcgcaatacgggttcaccgccgaggcattcggcggcccggtccaggatcaggaagccccgtcacaggcggcccagcaggctgccgagcagcagcctgcagacgcttacgccgccgaccagtacgccgctgcccagcccgctgccgaccagtacgcagcccagcagcccgcggctcaggcggcattcgaggagcctgtggccaccaatccttatggcttcaccgccgaacaggccctgaccaccaccgaccagatgcaaatcgcccagattgcccaatacgcgcctgaactacgcgcctgcatcgcccgtaatcccaacacctatccggcactgatcgaatggctgggccagctcggcgacccggcgatcaacgccgctttggcttcccgtcagtgaaaggacggcatcatcatggccaaacttccctaccctccagcacctgaactgggttggtattctgacgatccggtggaaggcaccccggattccgcagttggcacagccgaaccgcagaatgactacgggcagcccagcaccgcggaagcggcaaccaatgccgcttttaccgcagagcccgccgccactgccgccgctgagcccactgccgctccggtagacaccacaccgcacgccgccgaaaacgacatcgaggattgggacagcaccgtgctctcctcctcgttcacgtccaaggcaccgaagaagacgtacctgctgcataacgatgtcaccggccagaccattgtgatcgacaagagcacgttgctgggccgcaagccttccatggatgtgccgcagggtgccaaggccgagcgtatcgaagacccgacccgcaccacgtcccgtaatcacgccgccatcagcatcgataccgatggcgcgttgtggatcgaggactatggatcgttgaacggcacctacatcatcgccgacggccaggagacccaagtcaccaagggcacaccgctcaagctcagcgcgcctgccacggtgcgtatcggagaccagttcttccagttctccgaacagcagtgacctctggactgtacaggccagcgatacccccccccagatatcaataaaccgcaggtaacgtaccaagcaagctgtgagaacaacttgtacccgtacggtacctgcggtttattgttgccgttggcgggcggtcagtgacggttgctcggctatgcctataccgggctgggcggtcactgaccgctgaacgcagtagttacttcttcgagtctgacttgttatcgctggatgagctcgacgaacttgacgagtccgactccgagtccgacgaatccgaatcactctcgctttgcgacgaactgttgctcagatccggtgcggggtcgcccggggcctgaccgatggtcacaatcacgtctccgctggattccgggctccacgccatccattccatagcggcatggtcgcacaccgtggaatcatcacccaatggcaattgcgtgtacttgcccacggacttgccttgcgcatcaacgatgatctgctcatccgtggtcttcacgtatatggtcttggtcagatagttgatgcccttgaaactgccgtcggtcaacaacagacgaccccactgcggcccatccaacacttccgtgggcttcagatcggacgacagcaggaacacgcgtttgctttcgttgccgttaccatccgtctgcacgtagagggtgccgtcggagaattggtcaatggccttgacgtcctcatccttgctcagtcccagcacgtcttccaacgattgccgtttgccggtcgtgctatcgatgacaaacttgccgctatacgaatcatcggtcacatacatgttcttgccgagataccgcattcggctcaaatcacaacttgagtagtccgtatcgcagtaattcaacgggaaactcatgatttccttgttgtcttcgaccgaatacaggtggtacgaattgtctcgcaccatatatgcgtcgtacaagctcacgccgctcgcggaggcattgacctgtttcgcatactggtacccgccagaatcagtggtaagcacgattttgtcttggaaggtctgcaataccttggcggtatcactgtcatgagttacgcccatcacctgcgtgtggttgatggtcgctgagcgctcgtccttgttagcggtgtatttttcatcgctatgccacgttttcttgatggccaccatgttgcgggactcggcgagcaacgagtattcgtaaccctgctcatagtcgataaggttgtcttcctcggttcgcaggtcgatgcggtcggacaattcgccggtttcaagatcgacttcgtgagcgaacagatgcacgctttccggcgtggtgtccaccgccttggtcttcaccgcgtagaacacgaatacggctggattatcgccgtatgtggcggcgacttgcggctcggagtactccttctcccccgattcgagcatggatacgtggatttccttcgattcatccagcgccggcgtccagacgccgaaggcatactcgccgctgccgtccagggaatcacttgaggatttggacgacgaatccgaatcgaccgaggaatccccatcccagcagtggatgacgttcgagaccatcgcgccgccagtccacttccagtcactggcggagttgccgtcgcatgagaaatcggtcatcgtcacttcggtggctgccggcttggcgggctcggacttggtcttctgctggtctttggttgttgtcttagtctttgtcttaggtttcgatttggtggtgctggaggtagttgttggcttggcctcggccttctgatgcgcgttacgccagaatataaagcccgtgatgccgccggctatcagcgccactaccacaataatcgctatgatgattggcacgattttacggggctttttgccgttgttgccggcaccattgccgttgttgggcccgcctgcaccagttggcatgccattgttcgaggtcgggattcctgccggaggaacggcaccggcggcaccggcatacgctccgggtaccgggctgcccggcacctggccgccgggcattggaccgttcggactggaaatgcccggttgcggaatattcgtttgaggcgcattcggccgaggtacgctcggctgcggctgcggcacacccggctgcggaatcccgcgcgatgccactaccgtagcgtccgccggtaccggggctccgcaccgcgtgcagaacatcatattgtcaggaactgcattgccgcattgtgcacatcgtttcatggttcttctccccccgctatcagcgtcatcgcttcggttcttctctgccttctattgtaggagagatcacgaatgtgtcgtcggccagcgtgaaatcgccgccagatgccacatattcgcaaccgccgcttgccagttcgcggccacctaccgcagtgccgttggccgaatgattgtcggtgatgcaaaaacgtccatcatccagcatgtcaatcaccgcatggatacgactgacgttcgtattgccgcccatgtgaatgtctgcggttttcgatcgcccgatggtggctcgagtggcgtgcaccgttattgctttaccgtcgcgcaatcgtgtgacggtaaagcctctggacttgtccgtgtagaggcgcagcatcgtctcgccttcgctgtcgttctcatcggcgcgcagtgctgtgctgacggcgctgacagggaggatagggcgaacgacgttgctagtggcgggaacgcgagcagcatcaacgttgttgacggtgtgagcaacgtgagcggcggcagcagcgttacccgtgttagtctcggccacggcagcagtagcggtatcacccgcggcagcggcagccgccacattggatgccacaccgcgggcggaatcttcacggatatattgttcgcgaacgagattctcacgagcgggctgcgtttcctgcttgcggggaagatttacggcaatcggcattgcaggagccggctgtgtcacgggcgaggccgacgttacaggagtcggctgtgccggtgccgcgtgtgctgccggcattgcaggagccgccggcgttgcatgcgttgacggtgccgcggaagtcgtcggcattgcggcctgttgcggcgtcgtctgaagtttaggcttggagctcaatactgtggcgccaaatcgcgtggcaccgaccatggtgccgtcagacactacggtcgcgccgaattgcgtctccgaaccattatcttcatgagtcgactgcgctgactgcgcttgacgcggctgaacagtgccgggcagcaaatacgccataaaatcatgcagagcatctgcattaaccagtgaattgcgccccaggaactcggcgagcgcacgctgatagccttgcacaacggcatcctcaagccgggtccggcgtgcatcggccaatgtctgcagcaaagtggtggcggtgttgcgatcgggttccagtcccagcgccggcaccaccacgaacagcggatacccctgtgcggagatatacacgcttttggggtcccactgcacgtacgacagcggcacgcgatgctcctcgcattgctccataacggacaataccgccacgagtatgcccacatattggccgccaggcactaccgacctcaacacgccatgcatggtctcgcaatgagtcacgtcgtaatagaagaggatttccgcgccattactttcaaaccggaacggcagcatataccaatggccttcagcaagccattgtgcctgcccaagatccaacgactcgcctcgcgtggtatgtatggtcagcgtctgagcccccgtacgccgatccttaacagtcttcgctctcatagcacttaagtctagtcctgtaccaaggccaatgctttgcggagacgcaaaactcgtcaacacagtaacacaactccggctaagtaactttaccaaaaaactaaaaattggtaagataaggttaccagttttcctcaatattggtaaggtagcattaccgttttcttgaaaggcacattatggcaaatccgatcatcgccgaaaagctgcgcgattttagaatcgaagatttccacccgattgtgccgcgcgacttggatctaggtaagccactgaccccgagagtaggcaatctggtgaaggtcatcgtaggcatgcgccgcagcgggaaaagctaccgcctattccaagagatagaggccctacatacatccggtgtcagctggaaccaaatctgctatatcaattttgaagatgacaggctcggcgacatcactccaagtgtgggcgatgaagtaatcgaaaccttttgctccatgcatcccgaaagcctagacaccggcttgtacctgttttttgacgaattacaggaaatgcagaactggggcgcttggctacgtcgcatcgtagacaccacaaaagcaacgatctatgtcaccggctcttcctcgaaaatgctctcaaaagaaatttccaccgaatttcgaggccgagcattggacttcgagcttttgcctttctcattccgtgagtttgtccgcgcgcgcggtatcgccgaatcagaattgctcagccggaacgaagcagctggatattccaccaaagaacgattaatgctgtcggccgcattgatctcctacctggaagagggcggattcccagcaatcgagggactgccaacgcctcaacgtgtgaccctgctccagtcatatgtgcagcgtgtcgtatcccgcgatgcagtggaacgttatgacatcgcgcgtccaagagttgcctccgcattggcacgacgcttgcttggcagcaacggcaagccattgtctattcgcaagatagaaaacgaattgcgttcagccggactagccaccagccgtgtgctactgggagatttattggaatattttgaagacgcctatctggtgtttcgaatgaaagacttctctatgtcgctcaaagagagcaccacttccacatcaaaaatatacgccatagatcccgggctggccgcagcctcaagcatggcaagcgccagagatgatggccaacgattggaaaacgccgtttatctcgaactacgccgccgaaccgcaggttatcgtcgcgacggcatatcgtcatgccataccaaggaacatggctatgaagttgattttgtgatgggcgatgcactcgaacatgaacaatatgagctatatcaggtcacggcacgcatggatgataatcggaccatcgagagagaaacccgcgcgctctgggaactcatggccgaacaaaagctccatgaaggaaccatcatcgtcggcgatggaatcgagcgcgaataccgcaacagcaattatgtcatcaaacaagtgcccgcttggaaatggttcgttgcgcatgagccccggtaagcttcaccggccatgtcagattcctgagatggcaaccatgatggcaaggaatatgaacagagtctcgacccagatgagttcggcggaataccacatccagaacggttcgacccgcttgctggcgcattgacgggcaatcgccacttcgcttggcagcaccgcccaagccataaacagggcgaccaacaacagcacaaaagaaatgggcacccaaccgcattccaccagcactatgccgaacaagccgatgcttgccgcgattccaatgccaatcatgggctttgccgcaccctgcctttgtctgcgaggaatcacggcgaacacgaaagcaatcacggcaaacacaatgccccctaccactgcgggccacatcccaactaccgtgtccgattccttcaacgggccaggcacgccgcttcccgcgaaatgatcgatcacgccgtcacgtacgccacgcatatagaggatcgttcggcccaaaccggcacccagcatgcgcgaagtgccttcccagaagcacagcatcatgatgtgaaacaacgtgcgttcacgtggccagatgaacgcgggcaagaccaacagtatgccaaccaccggcaatacggcacacacgccggccatgaatcccaggaaatcgaacgagctaccatcgatgcccagcacgcccagccaccacggatcaaacccgatgctcaggctcatgttcacccaccatgcctgtgccaacatatccgccacagacaaagcggcaagcacgccgatccgccaatacacgccgcccatcgcatacactggaccggcaccgtccggcaccacacgcatgtcgtcatcgacataccgcagcacaccaagataacgccccctgcccgaacacgtcatagccacgcgccacaaccccatgagccgcacgactcgacggcaacaagccaaccacaacaggcaaaccagccaacgcatccctcaaaccacggacacacccgacaaaaccctcaccgtcaacaaccacagcaacaccctccataccaacatccgaacagcaaacacgccgcacccacatcacacacccgtggcggccgcgtaggcaagcagcatcaacatgacgaaatcaagcaccaggaaaccagcagccacaggctgccacgaggcatcacgcccctccaagacacaacgccggatcgcacgaagctcaccgggaatccagaacaacaccatgccgaccgccatcacggaattcacccagaacaactgattcgcatcggccgggccgacccacaacatgcccattaatcccaaaccggcaaccacattgccacccacacgcacacgcggggaaacacccaccccacgcaacaccacaagcaccacggcaaccaccacggcaaccccagccacaaccaaaccaggcaccaccacagcaggagaactgtcgtaatacagtctgtccggacgtccagtcgtggagtcaatcaaactttcgacatggggaccatacatcgcatacataacggtctttccaatctccgcgcccacggcaccggcgacacactgaacaatcagaacgtccccggcaacagcaatccacggcttgcgcataacatgagcagccagccacagcaatagtcccggaacaacacccacgtcgaaaaagaccgccacaggccaccaatcgctcgacaacgagataccggccatctgcaggaaccacacaccacctcttgcggaatcacgttcgaagaacgcataccgggcttgcaaacctacctgcgcaaggaacagcacaaaccacatgatagtccacaaggcaacccccaaacgagtgaacacacgcctgccacccacaggaatgcacatgtcgatgaactcgcccaacgcgccattcgccagaacacgattctcaccgccgacatcagaaccgccagcctcggcatcaccgcccacaccagcggctccacgctcccacggtggccgaccaccacttctcaccatatcaatcacctctccaccataaaggaacgaatcgcggaacccgcataaacaaatccttcaccggcattgttcaccgcatctgccgcatcattcaactgggcaagccccggaatgaacattttcgccacatcccatggacccgatgtctgccgcccgtacttgacctgatcaagtacgaaatcatgcgcatggccagccggattggcccccttctgcaacaaatgctcacgaccggcgtaatacaataccgttctcagtgtccgaccgctgcctccccatcgtcccacctgagaagcgataacacgcacactatccgaaaccctcttcacatcaccaagaaacgtcatcccttccgacaccttcgtgtaagtagggagaaccttggaatactgggtgagtataccgaaactcgccacgctgtgacactccccgagattagttgcgatattccccgacgccagtttgaaggatctcaaatcatctgccaaaccggtcgacttcgccacactagccgttttgaatccttgcaatccggcggaaagacaacgtaccgatccaataatcgaaagaatcaggaaagcaccttctgcaatcacttcgttaaaagatgcatccctataaagataatctacatacttgtctgctaacagtaaggctcccagcgccacgactgccagcgcgattccccatccagaaacaaacaggctcactatggcgagcacggcggaagcggccttcgcgaacgatacgatgcactgccatccatccgaataatggaacttctcgaaaccgttcacggcaggtgcatgctcctgtgccttggcaatctcacccgcacgtttatgcgcttcactctcataggccaagcggatatcacgtacacgacgtttcgcatctgcccactcatcgcccgcggtctcgacatggtcgctgtacccgtccagcatctgctgtgcggcttccttcgcctcacgcgcattcctgcgctgcacatccgtggcggcatcgggcaactcgtcaaacaccgcccccgcctgcgtcaatgccgagcgcgccccacaagacagccgctcataccgctccttctcgtcgcgtgcggcgatggcacgttccaactgggttttggcatccgactggaacccgtccaaagactgcatccagccacgcagctgacaggacacctcaccaaagctgtcagcaaatcggccgaaatccctaggaagatcctgcagcttctcctcgaacttgacaacccactcaccttccttcacactaccatcccagcacacaaccagccgtcacgccatgggcagcgccgtacacacgccaatgacgaacaacgcctcggcggtgagccagaacgcggccggccactcgccacacgactcacgacgattatccacacaaaaacaggcagccgccaaatccaacgggaac

SEQ ID NO: 1093 - DNA, 19696 bp, Unknown
  R13_10m  MAG No. k141_12000
catacggttctcgcgacaccactgccacaccgtctgctcgttgaagccctcacgcctcgcccattccctgacacgcatgacttaattatatcacacgaaaacaaactaaagcaaataatcaatctagcaggttataaccccgcatggggctggactcacgtggacgcgatagtgaccacgctcaacgcgctcggcatcctcgccggcgcgctcatcggcgtcagcgccatcagacagcgcctcgacctcgccgcatgaccaccacgcacagttcggccccgtccggcatcgcagacgactcaacccgagtcggcctacttgccggtcggggccgttctcgcgttgtggcagagggcttcgcgggctcgatttttgcccacattttgcccacattatcccgtgaaaccgagagaatacgagggaatcgacgggaataagaaaagccgctcagccttactttcgtaaagccaagcggcttgtttccgccgaggcggattggtggaggcgcggggaattgaaccccggtccgatgaccgagcccacagtcttctacgtgcgtagtctgctggccaagttggcgatttttctgcccccatcgatgtcgcagacaactgatggcgagcatatccgcagttaaagtcccgatgcagccctgaggctcaactgcatcagcaagtcttctaaacgacgctcagcatcctcccaaagacgaggaggagtgaacggagcggctgctcactggttaatcctgactaaaaatcaggcagcgagagcgaactcagtgcggttagatttagcacttattcttttgccggggtcatccacgagcggacccggcgttctcggcacgcttccctgcagcgaacaggtcaccgtcgaaaccgatcgcccccaatcttgagttatcaagcttccggcttttcggccggacttttcagcatacaccctatggcgctactcgcgcaaatcgccggcagcgaacatcgccccggcattgacgggaccaacgttgtcagcagaaccaacggagcgaacgccgccccggaaccaacggaaccaactgaatcgccgtcacttgatgatgggcttctgggatgcggaaacatcaatctgatgtttgccggcaaagccagccgtgccagcggtgatgttcttgtcgatttcctcgacttccgccagcttcagcttcagttgcgaggagtctccccaaatgattacgcggtcaccgtcgttaagcgtggtggtcaccgaatcctgcgtctcagcggtgaccttggtaatggacttacgcatcgattccggcaatgcgcccagaatcgccagcgcctccttcaccgaacggttcttgagactggcgtctatatccttgacctcgatcaccgggatgccatccacgttggcgttcttcaccgagttcaacacgcgcgcctgggaatccaccgcggtcagggtatcgcctcttttcagcatggccgcaggccgttgcgccttgacttccacgctcatcgacttggggaactgtttggagaccttggcctcgctgacgccgggaatggacttgagttgctctgtgacctcatgggtggagaccaggaacaacgactttccagcctgcttatcggcgatggcatggatggtctgcgcgctcacccattcgttggcaccggatacgccgatctcgctggtttccagacggaacaccgacgagaagagcagcagccacgttagccccgtcactacagccacgctgacgacagcaatcaacacgcgtaacgcaacgacacgtacgttcgcacgcttgcgttctttggcgcgttcggtgaaattcaccactttcgggcgtgatacgactcctagggagccggtggtctggtgcagcgtttcggcaacgtaatcctcgctgtgcagccgtcgtgcatcgacgaaggcaccggcctggcccttggctaccgtcacatcgtcgatgatctccggctcgttgatctcatgcccggaagacacggaccggggagcgcgagacttcgacgagtgacccgtgtttccgcgtgaaccgatggtgcgcggcttgcggggacttccggacgaacgacgtgagccgttgtcattgcccccggatctgaccgtgcgcccggacatcactcgcagctttcccgatgggcctcaagtgcggtgagcagcacctgatccatgtcagtgatgtcgcccgcgcccacggtgaagatcacgtcgccgtggtgggcacgcatggccatcatcttggcggccaggcacatatcctcgaccggctgaatccacgtgcctgcggaagcgtccttgagtccctcagccgcgtccacgatggtggaggggctgatgtccgggaaatcggtctgcttttcacgggccgggaagatgccggtgataatgacgtcatcggctttggccaaggattcggcgaactggtgcgcgaagaacttggtgcgggagaacaggtgtggctggaagatcacacgaatggtcgaatcggggtaccggcgtcgggccgcatccagcagggccgcgatttcggtgggatggtgggcgtaatcgtccactacagtgacctgcttgaccgtgccgcgcacctggaagcggcgtgccgcaccgaggaatgtgccggccgccttggccgcgtctgcggggttcacgcccagcagcacggcagcgctgatggcggcggccgcattgcgcgcattgtgcacgccaggaaccttcagggcaacgctctgagacaccggctcccccgccgtcaccgcggccggcagatgcagggtgagctgttcgacgccgctgcctgcggtctcgctttccgaagcgatccagacatacgcggcaccgcccaaatcgggcagggattcacgcgcggtagtgccgtaggcaacggtatgggatttcacgtcggcgggcatggcctccagcacggcaagtccgtcggggtcgtcgatactgatgatcacgtgaccggtggcccggccggcgtgggcaacgaacgcggcacggtagtgggcttcgtcgccgtaatggtcgagatgatcggcttcacagttggtgataatggcgatggttggatggtatttggcgaagctgccgtccgattcgtcggcttcggccaccagaatatcgcctttgcccgcgtgtccaccgtccagcgtggtgccgtccgggccttggataaagccgccgatggcgtagcttggatcagcaccggcgttcaccagaatgtgggacagcatggagctggtggtggttttgccatgcgctccggccacggtgacggctcgtttgccgttcatgagtagggcgaggatgtcactgcgatgcacaatacgcttgcccgccgcgtgtgctgcgacgatttccggattgtccggtttgatggcgctggagtagaccacggtctcggcctgggcgacattttcggctcgctgcccgaattcaacggtgatgcccagcgtttcaagtcggtcggttttggcgctgtgcgcgcgatcggagccgtccaccgcgactccttcggcgtgcagcatttcggccagaacgctcataccggcgccgccgataccgatgaaatgggtggcgccgagatccgcggggcgggccgcagcatcgaacgaggcatacgtggggtcaagcacgatgggctgatcttgagacaattcaaaactcctttggggattccagcaccctatattatgaccgtatctcgtgttgcgggacgggattggtctgtatcgcgcacgggatgatatctgaatactatttggatggttcggctaattgcagaacgtgccgggccatgatttcggcagcgtttctgatgccgtattcccatgccttgcggccgaattcggcaagtcgttcgtgatcggcgagcagatcgggcacatgctcatgcacccactgcggggtcaggtccttgtctgcgaccagaaggccgccgccggcgttcaccactggctcggcattgaaacgctgctcgccgttgccgattggcagcggcacgtaaatggccggcagacccagtgcagccagctcggataccgatccggctccggcgcggcaaatcaccaagtcggcacaggcgaaggccagatcgattcgttccagatattcggcggtatggtagtcaccttgtccggccgattcggggccgatgccggtaagcacgtccgcgccggccgaggccgtgaccagttcgcgtacttcgctgattttgcctcgcccggtcaagtggatgatttgtgcgtgggccaacaggtctgcggcggaggaggcgatggcgcggttcaggctttgcgctcccagcgatccgccagtgaccagcaccagcggacggttcggatcgacgccaagctgcgcggccgattcacggcgtacggcggcacgatcgtcaccgatgcgtttggtcagggaggcgatggtcgggcgcaacggcagaccgacacgctcgacgtcggctccggcacgcggtttgagaccggtgccttcgtacacggtaccgatgaaatcggcccaacgagcgcccagtttattggccatgccggcacgcgcattctgctcatggatggcaatcggaatgcccatcttgtgtgcggtggcgtagacgggggcggaagcatacccgccgaatccggccacgacatccgcatgccgcgtttcaagaatggagcgcaccttggcggtttctcgcttccattttgccgggaagcgaagcatgtacaggtcagggcgacgcgggaacggcactttttcgatggtgtcgagctcgtagccggcctcaggcaccaaatccttctccaaacccaccgcagtgccgatgacggtgacctgtgccgtgggttcgatgtcgcgaatcgccccggcgaccgcgagcagcggattgacatgtccggcggtaccgccgccagcaagaacgatatgtggtgtgccttgattcatgattaccgagtctacttacgcgctctgacgcgactgttttatctgcggttgagaacgcataagtcccacaaccagtccggccgccgtcaagcacatgatcattgatgagccacctgcggagacgaacggcataggcacgcccaataccgggaacacacccacgaccacgccgatgttgaccatggcctggcccacgatccaaatggtgacgcacatcagcaccatggcaacataacgatcggtgacctgcaatgcgatgacgatcatgcaccaggcgagaatcgcgaagaacagcaatacgatggcgcaaccgacgaatccggtctcctcgccgatgatcgcgaaaatgaaatcgttatgggcggccggcaggtaattccatttctcacgcgaattgccgatgcccaatcccagaaagcctccggaggcgatggcgtacttggcgtgaatggactggtagcatacgctctgcgcgtcagcggccgagcaatcaccatatgtggccagaatacgacgcatgcggttcgggctggaaaccgccaatgcaccgaccataaccaccgcgcccaatacgccgattcccatccatttgccggggaatccgacgatcaggaaggccacgcctccgatggagaccagaatcatggccgtgccgaggtccttgccgcccatcaccagcgccacgcctatcgcatacaacaccaacggcgcggcatatgctttgattcccttcttgtggtacatcttgctgcaggcatgcaacgacgagggcagccatatgcacatcgcgaacttcatgaattcggccggctggatagtggtgaagccgaggttcagccaacctttgttgccgtagacgtcgatacccagcggagtaaaggtcagcgcctgcaacaggcaggcacccaccacaaagaacacgccggtccgtttccagaacgtcaccggcatcgtcaatgccacgaagcccagcaccaagccgatcaggcaaaacgcgccctggttcagaagctgaaggaacggcgacttgcccagtgcggccatggtgaccgtggagctggagaacaccatgatcaggccgaagcatgtcagccccaccacggccatgcggaatccgtggtagcaccatagcgggttgagcaagcttcgccaacccgtgtagtcggtgatctcgagtgcgggcctgtcaggggctctgtatgccttacgcttatgggtatcagtggaggccatgcacctcgctccacgtcttggctgcggcggcgaatcgattgcctcgatccgcataggacttgaactggtccatggaggcgcaggccggagccataagcacgatgtcgccggcggcggcatacgtgccgcaggcttcgacggcacgatccatgacggtatcgttgtcttcgggatcgatgatggtcaccgggatgtccggagcttggctggcaaacgcttcgaccatcggctgctggtctttgccgatgatgacggccgctttgatggtatgtgcctggtccttgaccaggtcctcgaatcgactgcccttggccagacctccggcaatccagatcacagacttggccgggaagctggacagcgaggcgcgtgccgcatgaccgttggtggctttggaatcgtccacgaaacgaacggagccgccctcgactgcggcctcagccacggtttcgatgcgatggccgcccggcttgaacgaggtaagcgcctccaacgcggtatctcgatcagcgccaagtcccagcaccaacgccaatgccgtcaatgcatcggccaccagatgcgggtacagtgagccgtccggctctgccagatgcgtgaaatcggtgatggcggccagtctgaccggctcccccactgcgccgccggccacgccgctcctgtccacgatccagccatcttcaatgccgatctgaccggcctggggggcctcgagcgtgaatcccaccttgcggcatccttcggcggtttgggcctcggccgccagttcgctgactttggcgtcctgcgcattgtagacgatggcgcgtttggcgttgtggaacaccttggatttgtcggcggcgtaattctcgcgcccgccatgccagtcgaggtgatcgtcggcgatattggtgatcgccgcgcagtcaagtgccagcgaatcggtgaagtgcaattggaaggagctcagttccacgcacagtacgtcgtgctgaggattggtggcgcaacgagacaggctcatgctcatgtctccggaggcgatattgccggcggtcggcgcatcgagtccgcaggcggtgagcatttccgaggtcatctcggtggtggaggttttgccgttggtgccggtgatgccgatccatggagccggagtaccggtgcgctcgttattcatacgcagctgccatgcgaattccacctcgctcatcacggggatgccacggcgttgggcttccagcacgaacggggtgcgggggctgaacaccggggacgacatgacgtagtccacatggtcccagtccacgtcatcaaaggagcggagaccggcctcgggcttcctctcgtcgacgccaatcacgtgggcgccgcattccctcaatacctccgccaacgaggtgccggacacacccagtccagcgatcaccactgtcttatccgctacttgcattgttcctcctgatataggaattccgtgggtgagcataatcccacccagatttccgctagctgaacagcaggccggagcgggtgacccagtcgccgtagaaaatcgtcagggcgagcagcacgaagatgagttcgatcatccagaaccgcaccaccaccttggtttcggtccaacccttcagttcgaaatgatggtggatcggtgccatcttgaatacacgtttgtgggtcatcttgaagtacccgacctggatgacgtcgctcatggcttccatgacgtacagtccacccagaaccaccgccaggaattcggtgtgcgtggcgatggacagggctgcgaacaggccgcccaaggccagggacccggtatcacccatgaaaatcgatgcggggttcgagttgtaccacaggaagccgaagcaggcgacggccgcgcatacggcgatgacggtcagatcgagaggatcggacacggcataggaatatccgccatggctgccgcccttgatgtggtagctttcccagaatgcgatgatgccaaaaccggtgaaggcgatcatcgacgaacctgccgccagaccgtcaagcccatccgtcagattcactgcgttggtccatgcggtcatcaggaagttcacccagatgacgaacaggatgatggccacggttcgaccggcgaaatcgaagttgaagaacggccgttcgatgaagctgatgcccgcctgcgcactggggaatcccgatttggtgggaatcagcagcgcaagtaccgcgtagatggtggcgaagatgaactggccgatgaacttgccgcccaccgataggccttcgttctgcttcttacgcaccttggcgaagtcgtcgataaagcccagcagacccatcgacagcatggcgaacagtacgagcaccgcggaccaggagggcacgtcgcccgaacgcaggtatcggtacagtgcggaggatgcccaaccgagcagaatcgcgaagttgatgaccacgccgcccaacgtgggggtgccgcgcttgaccagatgcgactgcggcccatcctggcggatgtactggccatagtgcagcttgtggaccagccgaatcagcagcggggtgccgactaaggtgacgatgagcgacaccagcattccaatgatcagagcaatcacgtgcagcttctctttcttgtcggtttcttggggtggttatcgggtcagttctttgcccagcgttcagccaaagcgctcaggcctgacgtgtgcgatcccttgagcagtaccacagcgtcggaatggttgcgcgccaagtcgatgaccagctgttcggccgcatcgatgtcgtgtacgcaatccaccgacgcggattggctctgacgggcaccgtccgccagagcctgtgccagtgcatcgagatgttggtcttgggcggaaccgaccgcgatgatcgcgtcgatgcccaattcggccgcatacgtgccgatagaggtgtgcaatgccgtctcatcggcgccgagttccagcatggcacccagcagcgccacacggaacggatccttgccgtcatttgagttccaagccttcaacccgttcaggccggctttcatggagtcgggattggcattaaaggaatcatcgatcagtgtgaaggaagtcccctcgcgattcaccgtggacaatgccatgcgatgagggctgatggtgtgctgcgaggccagaatccgcgccaccgtttcgggtgccataccgtaacgcatcgccacggttgcggcggccaacgcgttcatcacgttgtgacgtccaggaatgcccagatgcaccggcgtatggttgccgtccgcatcgaccaacgtgaattcagcatgatcggaccggtcggcagtgacatcaatggcccgcacctcgggctcctgcgacgatcccaagccgaaccacagcacatcgccgctggccaggccggccatgggaaccacgtgttcgtcatcggcgttcagtaccgcggtgcctccgggaagcagtccctgcacgatttcgcttttcgcctgtgcgatgcgttcgcgggagccgaattctccaaggtgagcgacgccgaccttcaatacgattgccgtgttcggcggtgcgatacgggtcagtcgcgcgatttcgccgatatggctggcacccatctcagccacgaagaaccgggtgtgctcatcgacccgcaacgcagtgagcggcaggccgatctcattgttgaacgatcccaccggagccacggtcgggcctacggtggcaagcagggaggagagcagatccttggtggtggtcttgcccaccgaaccggtcaatccgatgatgtcgaagtcgccgtccagctcgcggcggcgaacgatgttgtgtcgggcgagctcgccaagggcgtcgaccgtgtctttcactacgatctgcggcaggccatcggactccacctcatggtcgacgatggccaccgtggctccctgttcagcggttttcgccacaaagtcatgcccatcgacacgctcgcctcggatggccacaaacaccgatccggggccggcctgccgcgagtcgctgaccgtattggtggctcgagactcggaatcggcgtctccgatcaatcgaccatcgacggccttggcgatctcctccacactcatcggaaccatggtgtttcaaactcctttacgattacgcttcgtcccgcatccacggacttaattgagattgttggccacatgcagggcactgcgtatgttgtttttcctcacgccggcggccagcaccatggcgatggccaaggacatgtgcccgagtcggacgcggtcatacattgccggtgaatccgcagccatttcatccgattcgggtgtcgacgaggtcatggacatgtcatgttccgcaacgaatgcgtagcgtgtcttcaattcgttcaagcttgcgcttgcgttgacatcctccgtgcccagtacatccacgttcaccgattccaacgcatgctcggccaacgtgcggtcatccatggcgatgatcacggccgccacaccgtcttcggcgcacacggacagcgcgcgctgcatatcgaggatgcccagaggatagttcaggttcatggtacgtgtcatcgacgtggacccggatgcggtgattaccgccaccggattgcccagcatgtgcaggaattcggagagctgggacacgcctgcgtcgacggcctgctcatccgcaccggtcaccgcgaacaccgccatggcattggacggtccgccggccagaccgctggccagatcgccgagtacgcgatcgtcgaaatcgccgtagagcaacggtatatcggcattggcgatctgccctttggacgcgcgtggcagcaacgccgcataggcaccggcctgtgcggcatgcagtacatcgggttcctgctcatgcgtgcagatgaacagcgagccgggaatcacggtgtccacggcatcgctgagtgaggtaatggtgacattggtggcgaagggtggatcgacttcaaaaccgtaccgttcgaccagcattcccagggtcacccgctgggcgatggattcgctcactgcactcatgggctatcgcctttctcccctgatccttaccacgtgactggaatagcatttttgcgtggactggagacaggcacctcgtatttctgcataaggaactcacaaatctgtgcggaaacagggccggccgtcagaccgccgaacacaccattcggatccttcatcaccacggtgaccgcatagcgcgggttgtccgcgggaatcaccacggaataagcggagataatggacgagagcgtaccatccgagccctgcacctctgcggtactggacttggcggccatgcggtaaccatcgaccttgacgaacttgttgtagccttccgccactgattccatcgcattcatcatgtccgatgcgaccttttcatccaccacgcgggtggcttcgcccttcttggtctcagtggtcttgccattggcatcggtggttgatttgatgatcgactgctgctgcttgacacccttgttcgcgatggtggccaccacgttgttgagctgcagggcgttgacggcgtagccctgaccaaacaggatggtgttgcgcgtacgcagatcccacgccgaagggttggtgagcagaccgctcgattcaccgggcaggttcagtccggtcggttgtccgatgccgaatttggtcaggtactcgtagcgttgctcatccggatagttctccccggccataatcatgccgacgttcgatgagttctgcagaatgccggcgagcgtccagcgctcagtgccatggtcgaatgagtccttgtaggtctggccctcctgtgtgatgtggtccgggaccgacaattgatcgctcatcttatgcagtcccatctgcagatagccggacatggagataaccttgcccaccgaaccaggctcgaaggtttcggacacggcccgagacgggctcatcttcgccgcatcggtaccagcctgtacttcatcgctatcggccagtgcgagaatctccccgctctggacatcctgcaccacggcgatcgcccacgctgcaccatacttggattcggcctccttcaagacctttttgacataccattgcacatcacggtcaatggtcagggtgacatcgtcgccatttttggccgccaccgattcggtcatggtgccgggaatctcttcgccgccattaccacgctggtaggtttcatggccatcggttccggtaagcgtcttgttctcgacctgctcgatgccggcgacgccatcgccgttgtcgttcacgccgccaagcagcgcgcccatgagatcgccatccgcatacagtcgttcactgctcagctcaccccagacaataccgcccaggtgcaacgcctcgatgctgcgcttgacctgcggagtcacatctttcttcagaatcacatactgcccggtaccggacagatcagcgcccagttccatggcgttcatatccaggactttggccagcagtcggcccacggccgccgctccggtagcgcccacgggtttgccgtcaatttcgtggcagtaatcacgggtgttgtcattgcaagtaatcggctcgaactcctgtgcagcctccggattggcgacgatagtataacgctccacgctttgagcgagcacggagccgttggcgtcgaggatacgcccacgcttggcgctcaacgtcacggtcagggtgcggttagccgtggccgcttgtgcggtttgacggccgccgatgagctgggtggaggccagctgaatcacgcatgccgacgccaccaacgccaatgcggcgccgatggcgatgcatttgaacgcgaaggtcttgaccttggcgaactctacgatgcgacgaatggtgttcactgggttccgcctttgttggactggtatccgcttaagtcgatggacactgatccctgctgcgggaccatgcccatgtcgctggccttgtcgggcaggttcgcgaccaattgatcgagtttggcctgatcgtcttcgatatcttgggtaagtctgttgatgttggtttcgatctgtgccgcctcaaacgagttctgcaccatctgggtacgcagcatcagcgcgccgaacaaggtgccgacgaggaagatcactgcaatggccacgtgcaccagcggtgcgcttcttgttctggtccattcgatgacccgtccgacgacattgccctgctcgtttccacgcgggttggagaccacccgcagctcaggtcgggaggaggactgatgcttggtgtgcggtcggttcgaggctggagccgcgttcgatcgaatgctacgtgcagttgccatatgctgttatcccctccttgtacgaattcgtgccgtgtttttggctctgcccggagacgcggagccttgtatcttgacgtcattcaggccctgcgcggtttgcgtaaagcgtttcctccatcgtgacggaatctcacggctgacttccaccgcccgcaaccgcaccgaagccgatctcgggttggctgcgatttcatgttcgtcggccttgacggcacctcgcgtgagatccgtgaaaaacggttgggcatccggcggtacgacaggcaggccagccggaacatccactcgcagcccttgtgccatgaacgatttgacggttttgtcttcgagcgaatgataggactccaccaccagtcgtcccccgacatgcagtcggttcgcggcctgcggcaatgtggaggcgagcttgtccaattcgccgttgacttcaatgcgcaacgcctggaagacgcgtttggcgggattgcccgccgggcggtgggcttgcggcaccacttcatcgaccagacggttgagctgtgcggtggtggtaaacggctccttgtctcgacgcgccacgatggcgcgggcgatctgacgcgagaaacgctcttcaccgtattccttgaatatgcggaccagttccgccgcatcataggtggcaagaatccgttcggccgtcaacggctggctgacgtccatgcgcatatccagcggcgcatcatgcgaataggagaagccacgatcggtttcgtcgatctgcaggctggataatcccagatccatgaatacggcgtccacgcgttcgatgtcttggtccgccaacacctgatcgagctgatcgaaggcggcatgcaccggaatgaatcgatcggcgagcccctcccgttccatacgctcggtggccagccccagcgcttcactgtcacggtcaatgccgatgagccgaacctgaggcgcggccttgaggaaggcgatggaatggccggcaaggcccagggtgcaatccactgcgatggcgttctcatgttccagggcaggtgccatcaggttcacgcaatcgtcaagcaataccggcagatgaatattcgccacatcaaccatcagaattccacctccggcaacacatcgtcagcaatatcggaatatccctcttccttctcggcgaggtaggactcccacgtgtccttattccacagttcggcacgggtgccaacgccgatcaccacgacgtcggaacccagattggcgtaatcgcgcagcatctgcggcaccagcacgcggccctgcttgtccggctgctggtcgacggcaccggaaaggaacacacgcaggtattcgcgggcggctttgtttcccaccgacacacgctgaatctgcgaggcgatacgtcgaaattcgtcgaacggcagcaggtacacgcaccgttcctggcctcgggccatgaccaggccctgccccagctgggagcggaatttggccggaagcgccatacggcccttggcatcgatcttcggcgtatatgtgccgagaagcaatggcggcagaccagccatgagatcagccatagtggtggagccttgtgcgttggcatcagcgtcgcgaatcgtctgatcggcaaccatggctccacctccttcatcgttacgtgggatacacttcggccaactggttcaccactctaccccacgattccccatttctccccactcatgcacgatttgctcacccttttagggcaattaccgatggattgcgcgtgtcggccacgactgtcgcacgaatgggcgctccgcacatccaatccacgttgcgcactccaccgaccgagcagcatggcgaattcacgctgaattcacctattccgggttgtccgcatcactgacgtagggggtgtgcggtaaatttgaatgccttaagttttttctgccccacggaaatggaacgaagagaacagcatgtcgagttacgcctcccagctgcatgaggagcagcaggccgtcgatcgcgcctatggacgattggatgatctgcgagccgaaatgtggcaacgcctggacaccgtacgcgccgccggctcccacggatcccccacgcaacgcagcgaacgagactcctttgccacaatgtacgaaaaccgcctcacgcaattgcgcagcgttgaggatcggctggtgtttggtcgtctcgacgccaagaacggcgaccgtcattacatcggccgcatcggcctgtcgagcccggaccatgagccgattctgaccgactggcgtgccgaagccgcacgtcctttctatgaggcgaccccctccaatcacggcgacatcgtgatgcgcaggcatatcaccttgagtttccgcgaagtcgtgggcgttgaggatgaggtgctcgacgtgcattccgaccaagtcggccaggcgtcttccgccggcacgttgaccggcgagggtgcgctgctggcttcgctgagctcacgccgcaccggcaagatgaccgatatcgtggccaccattcaggccgagcaggaccgcatcatccgctccgacatgaatcgtgccgtggtggtgcagggcggtcccggcaccggcaagacggccgtggcgctccatcgcgccgcctacctgctgtacacgcaccggcgcacgctggaacgttccggcgtgctggttgttggccccagctcggcgttcctgcactacatcgatcaggtgctgccctccttgggcgagaccggcgtggtctcacgcaccatcagcgatctgattcccggcatcaccgccacggcggtcgactccccttatgcagccaagctcaagggcgatcgacgcatgacctccgtagtggccaatgccatcgccgcgcgcgtgcgtgttcccgctgttctgccgacagtaaccattagcggcattcaggtaccaatgctggccactgatatcgagcaggcgcaggcggacgcgaagcgcacccggcaacctcataacaaggcccgcgagacctttatccgttcgatgctgaccagcatgcagaaccgttatgccgaacagcttgattacacgccggatcaggcggagctgaaccgcgcgatgtcgttgctgcgtatgaacgagcaggtgcgcaagaccctgaacctgtgctggctgccgatgaccgccccatggctcatcgatcagctgttcgcccatcccgaacgtctgaagtctctggctggttggctgaccgacaacgacatcgcggcacttgcccgccccaagggctccccgctgacccgctccgatattccgctgctcgacgaagcgatggatatgctgggccccgatcccaagacggtggcccgccagtccgccgccgacgcacgtcgtgccgccgaagagcagtatgccaaagacacgctggccgcgaccggtctgggtggaggcatcgtctccagtcagatgctgctcgaccagatgaacggggacgacgccgagctgaccgcgcagcgggccgcggccgaccgtgaatggacctacgggcacatcgtggtcgacgaagcgcaggaactgaccgccatggactggcgtatgttgatccgccgttgcccctcccgctcgttcaccatcgtgggcgatgtggcgcagacctcggcgctgggtggcacccgacgctggagcaaatcgatgaaccgcctgttcggcgaaagccactgggatctgaacgagttgaccatcaactaccgtaatccgcaggaagtttccgaactcgcctcacgatttgccgagaaggaaggcctctacatctccacggtcaatgcggtgcgcaccatccccgattcggtgtcccgcaatgtggtgcccgacatgtcgtccttgctggagacgacggccgagcaggcggcgcagcttgccgaacaattcgtttcggcagacggcaccggccgcatcgccgtcatctgtccggatgatctcatcgccccggtgcgcgacgccgtgcgccgcaaactggccgccgttcttgacccggccgaatacgcaaggctcatcgagcagcccgaatgggatgagcaaatcagcgtctgcggcaccgaaacggtcaagggtctggagttcgatgccgtcgtggtggtcgagcccggtctcatcgaggatgacgcgccgagccgcctggtcgccgcctcggacctgtacgtggcaatgaccaggccgacccagaaactggttatagttcggacaagaacggacgaaaagtccctgaacatctaaggtatgaagcatgcccaaagcactgttattggaaaacattcaccccgacgcggccaaatcgctgcgtgatcacggtttcgaagtcgagaccatgaagggagccctgagcgaggacgaactcatcgacgcgctggatggcgtggacttggtgggcgtacgctccaagaccaacgtcacagcccgcgtgctggatgcgcgtcctacgctaagcgccatcggctgcttctgcatcggcaccaatcaggtcgatctggcacatgccggcaagcgtggcatcgccgtgttcaacgccccctactccaacacccgttccgtggtggaattggtgatttgcgacatcatctgcttgatgcgccgcattcccgcacacacgcatcacatcaagcatggcctgtgggacaagtccgcttccggctcgcatgaagtgcgcggcaagacccttggcatcatcggctacggcaacatcggctcccagctgtcggtactggccgaggccctcggcatgcgcgtggtgttctacgacattgaggagaaactggcactgggcaacgcccaccgttgcgataccctcaacgaactgctggaacagtccgatgccgtgaccctgcacgtggatggccgcaagtcgaacaccggcttcttcggcgaagaccaattcgcccacatgaagcaggacgcgattttcattaacctttcgcgcggtttcgtcgccgatctgggagctctgaagcagcacctcgattccggccatctgtctggcgcggcggtcgacgtgttccccgttgagccgaagaagagcggagatccgttcgagacctcactggccaacgaagacaatatgattctgactcctcatattggcggctccaccttggaggctcaggaatccatcggccatttcgtctctcagcgtcttgaggattactggttcaagggttctacctcattgtccgtgaacctaccgcagatcaacctaggtgaacgcaagggcgtgtgccgtatcgcccatctgcacgacaatcttcctggtgtgctggctcatgtcaatcgcgtgctcggcgaagagaacatcaacgtttccttccagtcgttggccaccgaaggcgaacttggctatgtggtcaccgacgtggctcagaagcccagcgccgccacgcttgaagcactacgcaacatcgagggcaccgttcgcatgcgtgtcatcagctgacgcagctcatcctcgattgatatgaaagagacccgtcgctgaaccgcaccccgattgttggactgaagtaattcagattcgatgatcggaggtgcggtttctcatgtgtagggatcgcaggcgtcattacgatgacggtttcatgcgggtcgtcgccgacctgatccggggcggggctgggaggcgttctctcgcccgccggcttggcgtgcccgtcagtaccgcgggaaaatgggtgttgtcataccggtttggcggggaggcggcgctcatgggagaacgcgaaggcaacaggagatacgactacgagacgaagctcgcggcggtgcgcgaccatgtggagcatgggctgacgaaggccgaagtcatggagaagtacaggatcgcgagtctcaccccgttggagcgttggtgccgcgagtaccggtccggcggcccggacgcgctgcgtccgaaaccgaagggcaggcccaagggcgcgaaatccaagccgaggccggctcccacaagggaacagctccttgaggagaagaacgcgtacctcaaggcgagggtcgcgtacctggaaaaagtcgacgccctgctggcgtggagatcggcaaccgggacagaacggtgatcgtctccatgctggcggggctgggacatcagctccggcacctgctcagggcggccggactggcgaaaagcacgtattaccatcttctgtcgcatccggccgccgtgacccggccggacatcgagccgatggtcgccgagatattcgcgcgcacgcccaacgggtgcggcca
